United States Patent Application Publication US 2006/0134663 A1 - sequence listing, part 23

SEQ ID NO: 30757 - DNA, 4804 bp, Homo Sapiens
gtttccggccgccgtcgctgtccagggaggctgaggcgagaggtagctgtccgggtggggagcccgcactaccttcttcctcttcctcctcctcctccgggtgaggggagcgaaggttgggggtccccgagcccatggaccaggaggaggcggaggccgccgagagccggggccccgctatgtggccctgagccccgtgtactggttctgcctgtctggagggccatggagaagaggctgggagtcaagccaaatcctgcttcctggattttatcaggatattattggcagacatctgcgaagtggttgagaagcctgtacctgttttatacttgcttttgcttcagcgttctgtggttgtcaacagatgccagtgagagcaggtgccagcaggggaagacacaatttggagttggcctgagatctgggggagaaaatcacctctggcttcttgaaggaaccccctctctccagtcatgttgggctgcctgctgccaggactctgcctgccatgtcttttggtggctagaagggatgtgcattcaggcagactgcagcaggccccagagctgccgggcttttaggacacactcctccaattccatgctggtgtttttaaaaaaattccaaactgcagatgatttgggctttctacctgaagatgatgtaccacatcttctggggctaggttggaactgggcatcttggaggcagagcccacccagagctgcactcagacctgctgtatcttccagtgaccagcagagcttaatcaggaagcttcagaagagaggtagtcccagtgacgtagttacacctatagtgacacagcattctaaagtgaatgactccaacgaattaggtggtctgactaccagtggctctgcagaggtccacaaggcgattacaatttccagtcccctaaccacagacctgactgcagagctgtctggtgggccaaagaatgtatcagtgcaacctgaaatatcagagggtcttgctactacgcccagcactcaacaagtaaaaagttctgagaaaacccagattgctgtcccccagccagtggctccctcctacagttatgctacccctaccccccaggcctctttccagagcacctcagcaccatacccagttataaaggaactggtggtatctgctggagagagtgtccagataaccctgcctaagaatgaagttcaattaaatgcatatgttctccaagaaccacctaaaggagaaacctacacctacgactggcagctgattactcatcctagagactacagtggagaaatggaagggaaacattcccagatcctcaaactatcgaagctcactccaggcctgtatgaattcaaagtgattgtagagggtcaaaatgcccatggggaaggctatgtgaacgtgacagtcaagccagagccccgtaagaatcggccccccattgctattgtgtcacctcagttccaggagatctctttgccaaccacttctacagtcattgatggcagtcaaagcactgatgatgataaaatcgttcagtaccattgggaagaacttaaggggcctctaagagaagagaagatttctgaagatacagccatattaaaactaagtaaactcgtccctgggaactacactttcagcttgactgtagtagactctgatggagctaccaactctactactgcaaacctgacagtgaacaaagctgtggattacccccctgtggccaacgcaggccccaaccaagtgatcaccctgccccaaaactccatcaccctctttgggaaccagagcactgatgatcatggcatcaccagctatgagtggtcactcagcccaagcagcaaagggaaagtggtggagatgcagggtgttagaacaccaaccttacagctctctgcgatgcaagaaggagactacacttaccagctcacagtgactgacacaataggacagcaggccactgctcaagtgactgttattgtgcaacctgaaaacaataagcctcctcaggcagatgcaggcccagataaagagctgacccttcctgtggatagcacaaccctggatggcagcaagagctcagatgatcagaaaattatctcatatctctgggaaaaaacacagggacctgatggggtgcagctcgagaatgctaacagcagtgttgctactgtgactgggctgcaagtggggacctatgtgttcaccttgactgtcaaagatgagaggaacctgcaaagccagagctctgtgaatgtcattgtcaaagaagaaataaacaaaccacctatagccaagataactgggaatgtggtgattaccctacccacgagcacagcagagctggatggctctaagtcctcagatgacaagggaatagtcagctacctctggactcgagatgaggggagcccagcagcaggggaggtgttaaatcactctgaccatcaccctatcctttttctttcaaacctggttgagggaacctacacttttcacctgaaagtgaccgatgcaaagggtgagagtgacacagaccggaccactgtggaggtgaaacctgatcccaggaaaaacaacctggtggagatcatcttggatatcaacgtcagtcagctaactgagaggctgaaggggatgttcatccgccagattggggtcctcctgggggtgctggattccgacatcattgtgcaaaagattcagccgtacacggagcagagcaccaaaatggtattttttgttcaaaacgagcctccccaccagatcttcaaaggccatgaggtggcagcgatgctcaagagtgagctgcggaagcaaaaggcagactttttgatattcagagccttggaagtcaacactgtcacatgtcagctgaactgttccgaccatggccactgtgactcgttcaccaaacgctgtatctgtgaccctttttggatggagaatttcatcaaggtgcagctgagggatggagacagcaactgtgagtggagcgtgttatatgttatcattgctacctttgtcattgttgttgccttgggaatcctgtcttggactgtgatctgttgttgtaagaggcaaaaaggaaaacccaagaggaaaagcaagtacaagatcctggatgccacggatcaggaaagcctggagctgaagccaacctcccgagcaggcatcaaacagaaaggccttttgctaagtagcagcctgatgcactccgagtcagagctggacagcgatgatgccatctttacatggccagaccgagagaagggcaaactcctgcatggtcagaatggctctgtacccaacgggcagacccctctgaaggccaggagcccgcgggaggagatcctgtagccacctggtctgtctcctcagggcagggcccagcacactgcccggccagtcctcctacctcccgagtctgcgggcagctgctgtcccagcatctgctggtcatttcgccctgacagtcccaaccagaacccctgggacttgaatccagagacgtcctccaggaacccctcaacgaagctgtgaatgaagaggtttcctctttaaacctgtctggtgggcccccagatatcctcacctcagggcctcctttttttgcaaactcctcccctcccccgagggcagacccagccagctgctaagctctgcagctccccagtggacagtgtcattgtgcccagagtgctgcaaggtgaggcctgctgtgctgcccgcacacctgagtgcaaaaccaagcactgtgggcatggtgtttccctctctggggtagagtacgccctctcgctgggcaaagaggaagtggcacccctcccctcaccacagatgctgagatggtagcatagaaatgatggccgggcgcggtggctcacgcctgtaatcccagcactttgggaggccgaggcgggcggatcatgaggtcaggagatcaagaccaccctggctaacacggtgaaaccccatctctactaaaaataaaaaaaaaaattagccgggtttggtggcgtatgcctgtaatcccagctactcgggaggctgaggcaggagaattgcttaaacctgggaggtggaggctgcagtgagccaagatcgtgccactgcactccagcctgagtgacagagcaagactccgtcaaaaaaaaaaaaaaaaaaaaagaaatgatatctggcccccccttaacactggagccccactcccttctcccatccggcccgagattagggaggattgactgtgtcagggatggcgggtggcctctctcgctgccagggcccttgtcagagcagccaggctggacagacggcctccctcctctccatctgaccggcacctgctgcttcggggcttaggccaccgctccctgtccccagaggagatagccccagatggactggaatgttgtggcatgagagcgcatgtgtgcgatggccccgctgtggtcccctctctgtccctccatctgtatgtgttctgtgtcccttgcatgtgtgcgtgttagagtgagcgcgtatgcatcaactcattgggctcttggctgctcacaaggcaaatttgacttggaaagactttcatctccttggaaccaagacttcctgagtccccctcaccctggccctgttccaccatggttatctgggtattggggaatggaaactttgggggagtgactttttaaagagacacttataatttctactactgcactactgtccattgtgggatgattaaacatggtatttaactgtgcaaaaaaaaaaaaaaaaaaaaaaaaaa

SEQ ID NO: 30758 - DNA, 2811 bp, Homo Sapiens
acacaggaagctgagccggcttggggcccagcatacacaggcccccaggacccctggggagagggccccgctgggctggccctgcagggaccatggaatccagagctgaagggggctcccctgctgtgtttgattggttcttcgaagcggcctgccctgcctccctgcaggaggatccccccatcctgcggcagttccctccagacttcagggaccaggaagctatgcagatggtgcctaaattctgcttcccttttgatgtggaaagggagccccccagccccgccgtgcagcatttcaccttcgccctcacagaccttgccggcaaccgcagatttggtttctgccgcctgcgggcgggtacccagagctgtctctgcatcctcagccacctgccttggttcgaggtgttttacaagctattgaacacagtgggagacctcctagcccaggaccaagtcaccgaggcagaggaacttcttcaaaatctgtttcagcagtccctgtctgggccccaggcctcagtggggcttgagctgggcagcggagtgacggtctccagcgggcagggtatccccccccctacccgggggaatagcaagccgctttcctgcttcgtggccccggactccggccgcctgccatccatccctgagaacaggaacctaacggagctggtggtggccgtgactgacgagaacatcgtggggctgttcgcggcgctcctggccgagagaagagtcctgctcaccgccagcaaactcagcaccctgacctcgtgcgtccacgcgtcctgcgcgctcctgtaccccatgcgctgggagcacgtgctgatccccacgctgcccccacacctgctggactactgctgcgcgcccatgccctacctcattggagtgcacgccagtctcgccgagagagtacgagaaaaagccctggaggacgtcgtggtgctgaacgtggacgccaataccttggagacgacctttaacgacgtgcaggcgctgcctccagacgtggtgtccctgctgaggctccggctcaggaaggtcgccctggcccccggggaaggggtgtcccgtctcttcctcaaagcccaggccctgctcttcggggggtaccgcgacgcactcgtctgcagcccgggccagccagtgaccttcagtgaggaagtcttcttggcccagaagcctggggcacctctgcaggccttccaccggcgggctgtgcacctgcagctgttcaaacagttcatcgaagcccggctggagaagctcaacaagggggagggcttctcagatcaattcgagcaggagatcactggctgcggggcctccccaggggcccttcgatcctatcagctctgggccgacaatctaaagaaaggtggtggcgccctcctgcactcagtcaaggccaagacccaaccagccgtcaagaacatgtaccgctcggccaagagtggcttgaagggggtgcagagccttctaatgtataaggatggggactctgtcctgcagagggggggctctctgagggccccagccctccccagccgctcagaccgcctgcagcaacgcctcccaatcactcagcactttggaaagaaccggccccttcgccccagcaggagacgccagctggaagagggaacttccgagcccccaggggcggggacacccccactgagccctgaggatgaggggtgcccgtgggcagaagaagctctggacagcagcttcttggggtctggagaagaactggatttgttgagcgagattctggacagtcttagcatgggagccaagagcgcaggcagcctgagaccgagccagagtttagactgctgtcacagaggagacctggacagctgcttcagcctgcccaacatactaagatggcaaccagacgataagaaactaccagagccggagccccagcccctttccctgccatccctgcaaaatgcctcgtctttggatgccaccagctcttcaaaggactccaggtcccagctgataccctcagagtccgaccaagaagtcacgtctccatcccagtcctcaacagcttctgcagacccaagcatctggggggaccccaaaccctctcctctcacagagcccctaattcttcatctcaccccttcccacaaggcagctgaagattttacagcccaggaaaaccccactccctggctctccactgcacccactgagcccagccctccagaaagcccccaaattctggcccccacaaagcccaactttgatatagcctggacgtcccagccccttgatccttcctcagaccccagttctctggaggaccccagagcccggcctcccaaagccctgctggcagagcgcgctcacctccagccacgggaggaaccaggagccctgaattcccctgctacacccaccagcaactgtcaaaagtcccagcccagcaagccggcccagagtcgctgatcttaagaagtgctttgagggttaagaatcaggggtccaagagagaccccagtccctcaataaagccacaagagcccaaaaaagctggtttttttcctggtgaatttctctggtgccctcactctgctcggaaatccatcccacccacctctgtccctccaagggcagcctctctaactggctcctagcagggaattccaggaagcctcctggtcttctagaatcctggcaaccttacaattcctctcggcatttgtcacttccatctcagctaatgcacccaccagctcaaacacaccaataaagcttttgttactctcaaaaaaaaaaaaaaaaa

SEQ ID NO: 30759 - DNA, 1854 bp, Homo Sapiens
ctccaaccctctgctcccgtttctccctctggttcatagcccgcgggacagagcagccctggattgggaggctcctcaggtctcaggctcaggtgcagaagcagagcccctaactggaaggctcggaggtgggccggtgaggcaagcaagccctgtggggggttgaggacagcttgggttggatgtccctcactgcagcctgtccgtggatgtctctgccttaagggaattggaggtggaaccatccagtcttgaaggtcaacggagcgtgaagagaggagcgtgcagcttgagggtctaaggataactctggggccatgacagccatgagtctcacagaggaccccgagacttctgtgctgcgagtaaccggacttgttctgagacctttgccctagaggatggccaaggggctcctggtgacctatgccctctgggctgtggggggccctgctgggctccaccacctgtacctgggaagggacagccacgccctgctctggatgctgaccctggggggaggtgggctgggctggctctgggagttctggaagctcccaagctttgtagctcaggccaacagagcccagggacagaggcagagccccagaggggtgacaccccctctgagtcccattcgctttgctgcccaggtgatagttggcatctattttggccttgtggcactgattagcctttcttccatggtcaacttctatattgtggccctcccactggcagttggcttaggggtcttgctggtggctgctgttggcaaccagacctcagactttaagaacactctggggtcagcatttctcacttcacctatcttctatggccgccccatagccatactgcccattagcgtggccgccagcattacagctcagaggcatcgccgctacaaagctttggtggcatcagagccgctcagtgtgcggctctatcgtctgggcttggcttaccttgctttcacaggcccactggcatacagtgccctctgcaacacagctgccaccctcagctatgtggcagaaacctttggctccttcttgaattggttcagcttcttcccccttcttggccgcctcatggagtttgtcctccttctgccttaccggatctggaggctactgatgggggagactggcttcaacagcagctgctttcaggagtgggcgaagctctatgagtttgttcacagttttcaggatgagaagcgtcagctggcttaccaggttttgggcctctcagaaggggcaacaaatgaagaaatacatcggagttaccaggagctagtgaaggtctggcacccagaccacaacctggaccagacagaggaggcacagaggcacttcctggagatccaggctgcgtatgaagtcctgagtcaacccaggaagccctggggatcccggaggtgaaaagaaacttccccctgaggactgactcttcctagcagagctgggcaacttgtcccaaatctagctttgcccacgaatggcatcccaacagagttaaagaaactgcttgcaggggctgggcgtggtggctcatgcctgtaatcccggcactttgggaggccgaggcgggcagatcacgaggtcaggagttcgagaccagcagcctggccaatatggtgaaacttcgtctctactaaaaatacaaaaaattggccaggagtggtggcaggcacctgtagtcccagctacttgggaggctgaggcaggagaatcacctgaacctgagaggcggaggttgcagtgagccgagatcacgccactgcactccagcctgggcaacaagagtgaaactccgtctcaaaaaaaaaaaaaaaaaaaaaaaaaaaaa

SEQ ID NO: 30760 - DNA, 1815 bp, Homo Sapiens
gagctcggttagggcctcacttccctgcttccacacctcagggaggcctcggtgattttgccagagcctcagcctccatcgctctgtaacctgcgggtattggatgattcgtagctaagacttcgcgacacccttgaagctgagaaatggaacccttaacattcagggatgtggccatagaattctctccagaagagtggaaatgcctggaccctgcccagcagaatttgtatagagatgtgatgttggagaactacagaaacctggtctccctaggtgtctggaaatgaagtatggaaatgaaatcatgaataaagacccagttttcagaatctctccacgaagtagaggaactcataccaatccagaagagcctgaagaagatgttcaagctgaaagagtccaagcagcaaatgcactcactactccaaacttggaggaggaaccagtcataactgcaagctgtttacacaaggaatattatgagacaaagaaagttgcttttcaacaacaaggaagaaagcagccatcagaaatgtttcgttttgtgttaaaaagtgaagttttgggattactaggacacaatggagctggcaaaagtacttccattaaaatgataactgggtgcacagtgccaactgcaggagtggtggtgttacaaggcaacagagcatcagtaaggcaacagcgtgacaacagcctcaagttcttgggtactgccctcaggagaactcactgtgtcccaaacttacaatgaaagagcatttggagttgtatgcagccgtgaaaggactgggcaaagatgctgctcttagtatttcatgattggtggaagctctcaagctccaggagcaacttaaggctcccgtgaaaactctatcagagggaataaagagaaagctatgcttcgtgctgagcatactggggaacccatcagtggtgcttctagacgagctgttcaccgggatggaccctgaggggcagcagcaaatgtggcagatacttcaggctaccattaaaaaccaggagaggggcgccctcttgaccacccattacatgtcagaggctaagtctctgtgtgaccgtgtggccatcatggtgtcaggaacgctaaggtgtattggttccattcaacagctgaaaagtttggtaaagattatttactagaaataaaaatgaaagaacctactcaggtggaagctctccacacagagattttgaagcttttcccacaggctgcttggcaggaaagatattcctctttaatggcatgtaagttacctgtggaggatgtccaccctctgtctcaggcctttttcaaattaaaggcagtgaaacagaccttcaacctggaggaatacagcctctctcaggctaccttggagcaggtgttcttagaactctgtaaagagcaggcgctgggaaatgttgatgataaaattgatataacagttcgatggaaacttctcccacgggaagattcttaaaacgaagaacctcctaacattcaattttaagtcctactgcattattagtttccataattctacaagaatgtttccttttacttcagttaacaaaagaaaatattcaatagtttaaacatgcaacaatgattaaagttttcatttttaaaaattttaggatgaaggaaacaaggaaatatagggaaaagtagcagacaaaattaacaaactcagacatgttattcatccccaacatgggtctattttgtgcttaaaaataattttaaaatcataaaatattaggtttgtttttggttattatcaataaagttaacactgagcacatttt

SEQ ID NO: 30761 - DNA, 2215 bp, Homo Sapiens
agccgccacgccccgggagaggaccgaccgcccagaccgccggtcccggggccccctgggccacgccgatcacggggagcccctcgactgcctcccagaacaaagtgggaaagggaagcttagcccgccgctgccgcctccgagcagcccgccaggactctggctactggagatgggcgcccggctatcgcggcgacggctgccggcggacccatccctggccctggacgcgctgcccccggagctgctggtgcaggtgctgagccacgtgccgccacgctccttggtcacgcgatgccgcccagtgtgccgcgcctggcgcgacatagtggacgggcccactgtgtggctgctgcagctggcccgcgaccgcagcgccgagggccgcgcactctacgcagtggctcaacgctgcctgcccagcaacgaagacaaggaggagttcccgctgtgcgccctggcgcgctactgtctgcgcgcgcccttcggccgcaatctcatcttcaactcctgcggagagcagggcttcagaggctgggaggtggagcatggcgggaacggctgggccatagaaaagaacctaacaccggtgcctggggctccttcgcagacctgcttcgtgacctctttcgaatggtgctccaagaggcagcttgtggacctggtgatggaaggggtgtggcaggagctgctggacagcgcccagattgagatctgtgtggctgactggtggggcgctcgagagaactgcggctgcgtctaccagctccgggtccgccttctggatgtgtatgaaaaggaagtggtcaagttctcagcctcacctgacccggtccttcagtggactgagaggggctgccgacaggtctcccacgtcttcaccaactttggcaagggcatccgctacgtatcttttgagcagtacgggagagacgtgagttcctgggtggggcactatggcgcccttgtgacccactccagtgtgagggtcaggatccgtctgtcctagcgactggactactgcctgacgttgtcagtcaagaccagccttgcagccaggtgcagtggctcacacctgtggaatcccagcacttcaggaggccgaggtgggaggatcactggagctcgggagttcaagaccagcctgggcaacatagtgaaaccgtctccacaaataatttttaaaaaattagccaggcatggtggtgccgcctgtagtcccagctactcaggaggcttgggtgggaggattgcctgagaccaggaggttgaggctgcagtgagccgtgatttcaccaccactccagcctgggtgagaaagcaagaccctatatcaatgaaaaaaaaaaaaaaaaagaccagctttgcagccagaagccagaggatacccagggacagtagggctcccaggtggctggttctcagcacaccttccatgaatctgcttgctgctgcttcagtgtggtggccatcatgctgtgtgacaaaccaggctgttcacagcttcctcagccccccagaaggggagtgtcaggaagagacatttagttcatttgcctgcaaattttcttctcctgcaaggatctcggtggactcagtcacaaaacaaaggctaaaccaggatttataagagagggcttataaatccctctgccgacgcagggagcagagacttgccggcatgttttgggggtaatgatcgtgggcagggagcagaggtccgctgaggcagtctgtccttgagactaacaaagtcatctgctgtttggggaaatctctggtgttgggaacaggcccccaaatctggccataaactggccccaaaactggccataaacaaaatatctgcagcactgtgacatgtttgtgatggccatgacccccaccctgaaggttgtgggtttactggaacgagggcgaggaacacctggcccacccagggcggaaaaccgcttaaaggggttcctgaaccacaaaccatagcataagtgatctgtgccttaacgacatgttcctgctgcagataactagccagacccatccctttatttcagcccatccctttatttcctgtaagaaatgtttttagttaatctataatctatagaaataatgcttatcactggcttgctgtcaataaatatgtgggtaaatctctgttcaaggctctcagctctgaaggccgtgagacccctgatttcccactccacaccct

SEQ ID NO: 30762 - DNA, 2525 bp, Homo Sapiens
agccggccgctaagaagccgaaagatgtccaggtcgggcgcggcggctgagaaggcggactccagacagcgaccccagatgaaggtaaatgaatataaagaaaatcaaaacatcgcttatgtgtctctgagaccagcacagactacagttttaataaaaacagctaaggtctatcttgcccccttttcactcagtaattaccagctagaccagcttatgtgccccaaatccctatcagaaaagaattctaacaatgaagtggcgtgtaagaagactaaaataaagaaaacttgcagaaggattatacctccaaagatgaaaaacacatcttccaaggcagaatccacgctgcaaaattcatcctcagctgttcatactgaaagtaacaagctacaacccaagagaacggcagatgcgatgaatctcagtgttgatgtggaaagtagtcaggatggagacagtgatgaagataccacaccagccctggatttttcgggattgtcaccctacgaaaggaagagactgaagaacatatcagaaaacgcagacttttttgcttctcttcagttgtctgagtctgctgcaagactccgtgaaatgatagagaagagacagcctcctaaatccaaaagaaagaagcctaagagagaaaatgggattggatgtagaaggtcaatgcgattactaaaagttgatccttcgggagtttcattaccagcagctccaacaccgccgacattagtagcagatgaaactcctttgttacctcctgggcctttagaaatgacttctgaaaatcaagaagacaacaatgaacgatttaaaggatttctgcacacatgggcaggaatgagcaagccaagtagtaagaacactgagaagggattatctagcattaaaagctacaaagccaatttaaatggcatggtcattagtgaagataccgtttacaaagttaccacaggcccaatattctctatggctctccatccatcagaaactagaactttggtagcagttggggccaaatttgggcaagttggactttgtgatttgacccagcaacctaaagaagatggagtttatgtttttcacccccatagtcagccagttagctgtctttacttctcacccgccaatccggcccacatactgtcactgagctatgatggcacgttacgctgtggggatttttccagggctatttttgaagaggtgtatagaaatgaaagaagtagcttttcctccttcgacttcttggcagaagatgcctccactttaatagtaggacactgggatggaaatatgtcactggtggatagacggacacctggaacttcttatgagaaacttaccagttcttctatgggaaaaataagaactgttcatgtccacccagtgcatagacagtattttatcactgccggattgagggatactcatatttatgatgcaaggcgattgaattccaggagaagtcagcctttgatttctttgactgaacatacaaagagcattgcttccgcctatttttcacctcttactggtaacagagtggtgaccacatgtgctgattgtaatctgagaatttttgacagcagctgtatatcttctaagattccgctcctcaccaccatcaggcacaacactttcactgggcgatggctgaccaggttccaagccatgtgggatcctaaacaagaagactgtgtcatagttggcagcatggcccatccacgacgggtagaaatcttccatgagacaggaaagagggtgcattcgtttggtggagaataccttgtctctgtgtgttccatcaatgccatgcacccaactcggtatattttggctggaggtaattccagcgggaagatacatgtttttatgaatgaaaaaagctgctgagtttttggtttaggaacatcaatttgttcaaattgaccactgtctaaggagcctagtaatcggcgtgccttagtgtgtttatgtggtaatgtgttacatttagcaattataacattgttttattaataagactataagaagagtgtacttttagtaagggagaagtcttggagggttgcttctgcaggacggggagggaatttgaggggaggctgaggtgccgtcaggactttttttttttttttttttttgagatggagttttgctcttgttgcccaggctggagtgcaatagcgcgatcttggctcaccgcaacctccgcctcccaggttcaagcgattctcctgcctcagactcctaagtagctgggattacaggcacctgccaccacgcctggctatttttttgtatttttagtagagatggggtttcatcatgttggccaggctggtctcgagctcctgacctcaggtgatctgcccgcctcggcctccaaaagtgctggaattacaggcgtgagccaccatgcctggccatcagaacttgtaatcaagacagtatgttgagaaattctaacattataaattacaaagctttgactattaaagtttttgtgatct

SEQ ID NO: 30763 - DNA, 3520 bp, Homo Sapiens
aactgcgggcggcgcagggcaggggcagtcagggagcagcggcggcagagacagggccgggcgggcgccgcctgcggagagcaccgggaggcgggccctgcgtggggccgcgcgcagcagcggcgacgactttatctgggccgcgggggacagcgcagggccatggaggaggcggccgcagctccgatttctccgtggacgatggcagccacgattcaggccatggagaggaagattgaatcgcaggctgctcacctgctttccctagaaggtcaaaccgggatggccgagaagaagctggctgattgcgagaagacagccgtggagttcgggaaccagctggagggcaagtgggccgtgctggggaccctgctgcaggagtacgggctgctgcagaggcggctggagaacgtggagaacctgctgcacaacaggaacctctggatcctgcggctgcccccgggcagcaagggggagtcccctaagactacgccatctccaagtccgaggtcctctcccagattgaacaagggaaggagccctgcaactggcgccgccctgaccccaagattccagatgttcctgtggaccccagtccagatgcagaaactgaggcccagcagagattgagtaacttatgcgagttgtcactcacctcacacgccccagcaagcatccaggagagcctgcctcttggaatagaaatcagacatcccacaggaactctgaggttttcccactgctgccagatgtatgcaaggaacacgtgatcttcgtaattccagagcggggcaaactgcttggcacctcttcaataggtgacattcaatgatagatctctggcttcctgctctgtttgttctggttgccctggaaagcctgctgctcagcccatgccccgggacttcctccaccctcaccaggacattctttccatctcttgtctcctgtgtgcaagtccctttctcctggattccatgtcttgaatgtttcttaatttacttcctcattttggcagaggatgtcctccagttgttttctgggaatgctaatatgcaagtgaaccagtgacctgcagttctgcccacacagggttaataaccaatcagattctctcttttcaagatggttaacataacagacaccaagaaagggaagaggagccgacagcagagggggaagctgaaaagacgcacaaagaatggccataaaagatatgagcaaccccagctttccagacagtcacttttcccagtggtcatacctggtctggaagattccccatcatctcgaataaagctgttgttgcttttaactccatggagagaccgaatggagtgagcccagcagggcatgctgggcaagagaggtcccccgagtcccaaataagaatttcaactagtataaaacgaggcagcgaacccacacgtggaagtctgataccgcttgcagaagggaattgaatagatgtctccctattggtaaggatgtggttttattgacttgaaataacaaagcccgcaagcaacaactgatcatccgcgggatgctgccacaaggaataattgagcactcattcagacacaggggaaaccactgcctctttcagtctttctcccagattccaacagtcagtgttacagcatttcaccttgttcacctccctgagaagacgttgcagctcactcaccccagtgggcactgggagcctctgctcaggtgggagacagatgccccccacacgcacatctggtgtttatgaagcagatactggggcttcataaacacagaaggggcagggaagtagccccagggcatagtgtggggcctcctgactaaaagtagcttgcaaacccctgcctataacagccacttcctggcggtcattgtgccacttaggagccctcctcaccgctcttcctttagttccttcactctgtatagaccctgccagagcagctcagggtggagcagctgcagccatgggacctgctccaggcaaggccctatgctacacagtccctgggggtgaggattccagaggagtcaattccctacccgcccttccaggggatggccgagatgagcgttcccacagggaaagtgaaagttgcaaggctgttgcggaaacaccaggggttccatctaggtcttgctgctcatctcacagaaagccagtcactgagacaagtattgtcagggaagaaggctttatccaggtgctacagacagggtgaacaagagatcagtctcaaatccatcatcatcaactgactaaaattaggggtttatatagcagggaagaaatgtaactacatgtgggaaaacagggattaacgaggggcaaggaagaggagttggccaacaggcagcaggtggtcacctggagaatcatgatgggtgaggggtctggcttctcactttccagatgtggggatctggtaaatttcagtttcttgataccgtctgggaggattgctggctggtttcctgagaaaggaattcagatgacataaatgtaaatttctccttgggtttcaagactgagagggtcaatttctaggtttattcaagaaaaaccataaacatcagttctatgggacaattgggcccatttcaaggctctgaggataagggttaatgaggggacagagtcgcctggagaagttcactggggcctacaagaaactagagaggcttcctggcaaagctctatgctgtctatcctctcttctctccttgcaggaagattccagtataatagacccgaggtgaaaaggcttttgttcaataagtagaaaactgaaggggggtgggaggcacatggatttgaaccagagaccgcttggcctgcaggcaaatgctgtaccttcagttgcacccctcacttgttacagctgtttctgataagcacttgtgcagccccatcagcacctcgatttcttcttggtgagtccatgggaacagccccactgcaaacaacccattcctgctctcctctttcctctaaacctcaacctcctcctacctggcagtccacaggcctacagcttctcctcagtgggaaagacatcagcttggaaaaccacttggaaagccaacgttatcctagaaaagctttttaaatgacccagcaggacaagtctccggatggccttggccaacccggtgcttccctcttttcttggttgtagttctcagaataactagagaatgtactgggagtgttgtcctgagataaggaggaactgtcctaaacctggactctgttcccatcacacctagaacaggatgtcctgcaacgctttagcccaatgatccaagttgcccttggggtataaaacttgacagcagagggcgttcagggtccctcagctgcagtgtgaagtgggacacacaggtgagactccatctgccctgggcaggttcctgagccttgggggaccagttcaccctacatcccaggcttctgttgtcccttgcctgcctgtaaggaataaagttgctttgcttaacttgc

SEQ ID NO: 30764 - DNA, 4802 bp, Homo Sapiens
gagaaggttttactcttttagaaagcagcagattgtaaaaagtgtgacaaacacatgtagctgatgaaaaggagcatgatgaacaacagtatgaatgaaaataattatatgaatgataatttctcattcaggtgtgaaaacttaggtgaatgggtatatttggagcattacttcaaatacatagtcttcaggctgtccattggtgatgatgactgtaacttctggcttctcaagaatttcttctctaatatatgatgaaaaatttagtgcagaggagatatggtggagctggatacagctaagagttagtgaaataactgtttttcatgtctggcccccccttttttttttgtttgtctgtggcaattcttagctttatgaccctatctagagcactgcaaattttcacctactttgtctacagtatccagctgtctttttaagttgaccaggcttttgtgctcagtaattataaacaagacaatttagaggcttaatctggaacataattaaacatcctacacactcaaaccaagtagtaatggctttaggattgttcagtgtttaatttaccttttattttttgcattcaggtagtgtctgccatattcgtacctctccaccttgtctcacagtctgtttcacttctattaactgcttctcttctattccaaatgatttttagtactaactacattttcatgacagcattcatcacatttgatctgaacgtgactttttagatcctcaccatttctgctctcaaattgaaagtcatttgtccatccatccaacatatatggtgaacaaaacataatccctgccttcaaagaatctgtgatctagaagtgttatcagacaagtaaagaggcaactgtagtacacttcggtaattgttgggataaggctaagttcagaggatgtggggaggatataagaggggcagcaaacctagtcctgaggaatttggattcttaggaaaaggaagagctaagtcagggtccggagaagttgtagaaactagctaaccaagaagagaggcagagaaggtgtgctcagcaccaaaagcaattgcaaagatctaggaggtaagagagtcagcttcaatactgatggtaagaaagaaataggaagatgataggtcactttgaagtctgaagggtatccttttttctgtattccagttctgagacagcaagattttcaagtcagataaacagatttgaattcttaactgtgaggccttcctttattacttatttgaaatagaaggcctgcccttcctttctctgtttctattagcttctttatttttctccagatatttatcaccatatgatgtacattatattttacttatatatttgtttattgcttgtttttctcccaattgtaaatttaatgtgattttgactgttttattcaccactgtagcatctgaaattgtgcctaacagaaagtaaatggttagtaaatttttgttgaagaaataagtccttattctcatctgttacttggttatgtgaatttaggcaatttacttaaccattcaaagattggtttccttattggttaaataggaataatatctaccaaatgaggagtaaatgagataatttgtgtaaaataatcagtataataaaattctacaattctttatgtgaaatctttgtgaccaaatgcaatttggaattcagaattcttcatattttagaaaggtactaatatagtcggctctccacatctatgggttctgcatctgtggatttaaccaactttgaattgaaagtatttggtgaaaaataacaatacaacaataaaaaataatacaaattaaacaaccaatatagtgtaacaaccatttacgtagcatttacattgtcttaggtactatttataacctagagattatttaaagtacatgggaagatgtgtaaaggttgtatgtaaatactgtaccattttatatcagggatttgagcatctgtagattttggtattcaaggagggaggatcctggaactaatcccctgtggataccaagggatgacagtgtattttatattatacatcttagagtctagggcagcagtccataacaaatagtaacatttctacagcaaaacatacaggtattcacaattaaatgggataaatgaagattctgtagtagcttcacatcttttcggtcagatttttgcctagaggcaaaatctacagttgaattcagttttttatgcagtcaaattagttatagaataactttgatttttcagagctttatggatattggaacattgatatgggatggtggacctgtacctaacacacacataaacaaatgtaaaaattactatgaagtacttggagttacgaaagatgctggtgatgaagatttgaaaaaagcttatagaaagcttgctttgaagtttcatccagacaaaaaccatgcacctggagcaacagatgcttttaaaaagattggaaatgcttatgctgttttaagtaatccagaaaagcgaaaacagtatgacctcacgggcaatgaagaacaagcatgtaaccaccaaaacaatggcagatttaatttccatagaggttgtgaagctgatataactccagaagacttgtttaatatattttttgggggtggatttccttcaggtagtgtacattctttttcaaatggaagagctggttatagccaacaacatcagcatcgacatagtggacatgaaagagaagaggaaagaggagatggaggtttttctgtgtttatccagctgatgcccataattgtattgatcctcgtgtcattattaagccagttgatggtctctaatcctccttattccttatatcccagatctggaactgggcaaactattaaaatgcaaacagaaaacttgggtgttgtttattatgtcaacaaggacttcaaaaatgaatataaaggaatgttattacaaaaggtagaaaagagtgtggaggaagattatgtgactaatattcgaaataactgctggaaagaaagacaacaaaaaacagatatgcagtatgcagcaaaagtataccgtgatgatcgactccgaaggaaggcagatgccttgagcatggacaactgtaaagaattagagcggcttaccagtctttataaaggaggatgaactggaatttttatttataccttttagcgtactctttattttttctgtaagtaagtttggtttcatcatgagggatgaaggaaaagatttgatactgaaaactaaactgaatagttggttcctgaaatcttggactgtttatgacctactggctcctttaaatagtaactgaaaactaaaatggaatattttagttaacgcttctacaagtattttcattttaaaagcttacatgattcctaactaaagtgtcatgagaaaggattatcacacctgtagcaatttccagttttagtgattctccattttttcccttgtcatgtaaatatttatggaatgatcattttgtgtacatacaggttactgcttttttatttaaattcttttagtgtttagctccatgagacacttcagtttaaattgatggaataaatgttatatgacacatttacattttccttatcaaggtgtcaaatatgtggactttaaacaatgaaactttttcaaaaagaaaaaacaaaaactttaactttgtgtaaaatcttatagtattatcagcttagagggaattgatatttttaatattgccgttatattccaaaatatatattgagataaatgaactggtgtagaatatcagtttgctatttagttttatgaattactatacatatacatgcatagaaatgaaatgctatactgataaattttaaagaaaatatgaggaagtggctataaatattaaactaaaagggtcttcaacagtaaagtgcagttatgtcatttaaaattccaatactttaaaggccaccaaattttgatgtatatgtccttgaagggctgctaaaatttatgaagaggactcacattttcccccatagaaatttgcagtttcttggtgatcatttaagcaggatccaaagaagttcctttacaaataagtaataagaaaaatgagtactaaaatacagctttgtgccttttaaccctatgccaactcctaaacatataagtagattacagtatacttatctgatcagagcatgatctgtttggccacatgcaagtgtgagcagaaatagagcagcacgtagaatagtaacttaaagcaagtcatcctttaaaaattctgagctaaaatctatttaccattgagtaattgaattaatcccataggaataagctccttgtaagtaaatccatgatatgaattagaaaaaaaaacagctggaaattgaagtttttgatgcctgtatactgggtatgaaactatttgatttctagtcttctgtgtttagcagttgtaatattttaatgattttgcttcatactcggttaatggaacataaacatatctttgatacttctttgtgagtgagagaatgctagatagggtggctttgttctttgtttaagttttttttcctgaatgtagttaatttatggcatctgttgaataaaactgctaaaatgacctcttaaaaatgttctgttgtatccccttttccaggtgaatcaatagaaatgcctgattgaattagtaggttaaactaaacaacatactgtcataggaaaactggagagcttaaccaacttgctcttagaaatgttaccttaaaaaaaaaaaaaaaaaaa

SEQ ID NO: 30765 - DNA, 2996 bp, Homo Sapiens
agtttagcgtaaaccgggaagcggatcgcgtggagtgaaagtcaccgcagcggagatggacaaaccatgtgggtgccctccaggtgtgtgcgaccatgaaatgggagactagcaggacccacgttggccaaccgtggacctggtccctccagtaggagtcgtgagccagctgaatttgaatgcaaagatggagcaagggccgactggagtcacactgacatccacccccataacatggggacagatcaagaaaacaaagcaggaagctgagaaaatgctggagcatccatgtgcttggccatgttagcagtagtgtcctgtgaggattgatttccaaaaactcctgttacatgaggaagacaccaagaagagcaaagaaaaggagccagggtggctcttcctcagctatctcttccaaatgcatgacaaggaagttctcatcaagaaggcaaggcaatacagaagtgttccacacagggacattgcaaagacaagcaagtcatcacactggagatttttccttccaggaaattgagaaagattttcaggactttgagtttcagtggcaagaagatgaaagaaatggccatgaagcactcatgacagagataaaaaagttgacaggtaatacagactgatattatcaaaggcatgctggaaacaaacctattaaagatcagcttggatcaagctttcattcacatctgcctgaactgcatatattgcagagcaaagggaaaattgatagtcaagatgagaagtctgtcaatgatgcttcctcagtttcagcatcccaaagaatttcttgtattcctaaaacccatatttctaataagtatgggaataatttcctccaggaagcacacatgagagaaaaatctttccaatgtaatgagagtggcaaagcctttaattgtagctcactgttaaaaaaatgtcagataatccatttaggagagaaaaaatataaatgtgatatatgtggcaaggtctttaatcagaagcgataccttgcataccatcatagatgtcacactggtgagaaaccttacaagtgtaatcagtgtggcaagaccttcagttacaagtcatcccttgtaattcacaaggcaattcatactggagagaaacctcacaagtgtaatgaatgtggcaaggtttttaatcaaaaagcatatcttgcaagtcatcatagacttcatactggagagaaaccttacaaatgtgaagaatgtgacaaagtttttagtcgctaatcacaccttgaaagacataggagaattcatactggagagaaaccgtacaaatgtaaggtttgtgacaaggctttcagacgtgattcacacctggcacaacatattgtaattcacactggagagaaaccttacaagtgtaatgagtgtggcaagacctttgttcaaaattcatctcttgtaatgcataaggtcattcatactggagagaaatgttacaagtgtaatgaatgtggcaaggtttttaatcacaaatcaaaccttgcatgtcatcatagacttcatactggagagaaaccttacaagtgtaatgaatgtggcaaggtttttaattgaaaatcaaaccttgaacatcatcatagagttcatatcggagaaaaaccttacaaatgtgaagaatgtgacaaagttttcaatttcaattcacgccttgaaatacataggagagttcatactggagagaaaccatagaaatgtaaggtttgtgacaaggcattcgggtgtgattcacacctggcacaacatactagaattcacactggagagaaaccgtgcaagtgtgatgagtgtgacagagccttcagtggtcagtcaacacttattcaccatcaagcaatccatgtcatagggaaactttactaatgtaatgattgtcacaaagtcctcagtaatgctacaaccattgcaaattattggagaatgcataatgaagtgagaacttacaagtgttataaatgtggcaaatttttcagacttcgttcataccttgcagtttatcagcgaactcatactggagagaaaccttacaaatgtgatgattgtggcaaggtcttcagtcaagcttcatcttatgcaaaacacaggtgaattcatacaagaaagaaacctcacaagggtgatgattgtgtcaaagcctttatttcaggttcatgcctcattacacatcagagaatccatactagacagagatcttacaaaagtcatatgtgtggcaagatctttagtctgaggtcactccttgcaggacatcaggaaattcatttttgaggtaataatttcaaatgcaatgagtatagcaaaccatcaagcacaattgatgttagattcaaatcagcattgagttcagtttgagttgacttaacattgagttcaagtatttgttgagattaaagtgtttatgttaagaggattaggccaggtgcggtggctcacacctgtaatcccagcactttgggaggccaagacaggtagatcacttgagatcaggagtttgagagcagcctggccaacagaggtgagcacctttcccagtctgttttttgtttcttcaacaaaaactgatagagatttttatgggtattgtgttgaatcaaaatcacattgggttatgtaatcatttaacagtattaatttttccaaaacatcaatatgggttatatctttatatatgtttttaatcattttgatcaatgtttgtagatttcaatgtatgaatttctcacttctttccatttattcctatttcttactttaagttctctagcaaatggaagtgtttttaaattttcatttaaaattgtttattgttaatgtatgaaaattcaacgaatttttggtgctgatattgtattgtgcaaatctactgatgtgtttattagtcacagtagtattttggttgactctttgtgattttctacacagaagatcatgtcatctacaaaaaatataattttactttttctg

SEQ ID NO: 30766 - DNA, 3399 bp, Homo Sapiens
aggtgtcattctattagaagaccatcccatagcaccagtgtcatctacctcacctggtatcaaagtggaaagcttacctgcgtctcaagcacacatgctggaaaccacgaccaagtcagtaatacctgtaaaaccagttgccacagaaactctcatcaatggtaaaggaaaggaaagaggaggcaaggggcagcctcctttgcgccacagatccgagggtggcttagtggataagggacccttgaagaagttgccccacctgtctttgtctcagtatgacttactagaaacagacgtttctttccagccgtgggggagtgagaattcagtcctgattccagaacctgtcagttgtccccggggctccataagggaacgggtacaaagcaagtcacctcaggacagcctgagcagcagctgccctcaatgtgacaccatcgtggccaagcctgtggaggagccagcagacacatcctgtcaggtagatacctcctgccagggggacctgcccttgcaccaggaagtggactcctcagatagtgaggtagctgttactctcatcgatacttctcaacccggagacccactgagtctacatgagcccataaaaattgttatcacgatgagcagtaccccaaactccatgacagatttggaaagctccctccacctgagggtggttggcacagagaagaccagtgtaaagtctgacgctgagcccactaacccaggggcggccggttctccaaatgccgagcagatctcaattcctgtaatcaccctggacctgcctgagggtgggggaggaggtgttccctgtcccgaaggcaatggaagtgaaaggactccagagagactgaagacgagggtatccaccaatcagtgttctggctacggatctggggaggggggaaatgccatcaaggatcacagttcttcatcacgggaaccctgggaatcggtgtcccggcttacacctgatacaggctccgagtctaaggtggggaaggaaggccagactaaccttgacccatcgtcttgtaagtccagccatgaaaagaggcatgcccgggtgctcagtgtggacagtgggacagatgtcttcttgagtaaaagttctgcagaaattgttaacgatacagagaaaacaatgccaacttccaaatctgacctagaggctaaggaaggacaaatgccaaatgagtccaacttcctggaatttgtctccctgttagaatccattaatacttccaagatgacggcatccagtcaactgaatggctcagctgagcagaatgaagaaagtgggcttctccgagataactgttcccaggaaaaaaaggaggaaatcctggaaaatgaaaagcccagtggacacagttctaagcaaggaaaaccagatttgcaaagtcaagaccatactagcaccggccccgcatgcactcagcctgccaagaccacagccttttttcagggcaatagacaaagacagataatctacagggtaacttcccaacaagatagttctgtcttgcaagtcatcagtgggcctgaaacatctgtacaagaagagatatctgtggatgctatgcatgtcttcattgatgaacatggggaaattagatcctgttatttaaaatctggaaatcagaaagaaggccctttacagcctctaccatcaaataatgactgtctctctcaggctcgagagatgcaggtcagctcctccagtaccacaacttctgagagtcaagatccgtcttctggggaccctgccgtcagtgcccttcagcaacagctgttactgatggtggctcgcaggacccagtcggaaaccccacggaactgaagacatcaaggagaatgtactggcgattttactcattgtcctggtttccctccttggatttctgaccttgagccaaggcttttgcaaagatatgtgggtgctcctcttctgcctcgtcatggccagctgccagtactccctgctaaagagtgttcagcctgaccccgcctcaccaatacacggacacaaccaaatcataacatatagcagaccaatctatttttgtgtgctgtgtggccttattttgcttcttgatacaggggccaaagccaggcaccctcccagttacgttgtgtatggcctgaagctcttctctccagtgtttctacaatcagctagggactacttaatagtatttttatattgcttccctgctatttccctccttgggctcttcccgcaaatcaacactttctgcacttatcttttggagcaaattgacatgctgttttttggtggttctgctgtgtctgggataacctcggctgtttacagtgtggcccggagcgtcttggctgccgccctgctccacgcagtctgcttcagtgcagtgaaggaaccgtggagcatgcaacacatcccggcactgttttcggccttctgtggcctcttggtcgccctttcttaccatctgagccgtcagagcagtgacccatctgtactcatgtccttcatccaatgcaggctgtttcctaaatttttacatcaaaatctggcagagtcagctgctgaccctctccccaagaagatgaaagattcagtgacggatgtcttaaaatgggatctcatcgtctgcgcagtggttgctgtcctctcatttgcagtcagcgccagcactgtattcctgtcattgcgaccatttctcagcatcgtgctgtttgccttggctggagccgtggggtttgtaacacattacgtgctccctcagctccgcaagcatcatccctggatgtggatttcacaccccattctcaaaaacaaagagtatcatcaacgggaagtgagagatgttgcccatttaatgtggttcgaaagactctatgtttggcttcagtgttttgaaaaatacatcttgtacccagcgctaattttgaatgccctcactattgatgcatttttaataagcaatcaccggagacttggtacccactgggacatttttctgatgatcattgctggcatgaagctgttgcggacatcattctgcaacccggtttaccagtttattaacttgagcttcactgtcatctttttccactttgactacaaagatatttcagagagcttcttactggatttcttcatggtgtccattttatttagcaaggtgtttctgggctacgtgaggcaaaaataaaaacagagaaactcaccacagtgtttttccttggatcccatgatgcccagatgctctactttttccttttacctttcagaaggtgtttttataacatgtaaaatccagggttttcgttgtaccaagtagaggaataaggaaaaatacaccaactccatatttccggaagaaaaaaaaaaaaaaaaaaaaaaaa

SEQ ID NO: 30767 - DNA, 7556 bp, Homo Sapiens
ggcccgcggagtccagcgaagtttggcggaacatggcggaagcgtctggggcacgcaggagcgcggggcggcggcggccggagcccgaggagctgtagcagccttagtcgccgccgccgcggggcgaggtcgccgccatggcccgctggatcccgaccaagaggcagaagtacggggttgcgatctataactacaatgcttctcaagatgtggagctctccttgcagatcggtgacacagttcacatcctggagatgtacgagggttggtacagaggatataccctccaaaataaatctaaaaagggcattttccctgaaacatatatccatttgaaagaggcaactgtggaagacctggggcagcatgaaaccgtgattcctggcgagctccccctggtgcaggagctcacgtccactctgcgagaatgggctgtcatctggcgaaagctctacgtgaacaacaagctcaccctcttccgccagctgcagcagatgacgtacagcctgatcgagtggcggtcccagatcctgtctgggacgctccccaaggatgaactggcagagctcaagaagaaagtcacagccaaaattgatcatgggaacagaatgctggggttagatctggtggtgcgagatgacaatgggaacatcctagaccctgacgaaaccagcaccattgccctcttcaaggcccatgaggtggcctccaaaaggattgaggaaaagatccaagaagagaagtcaatcctgcagaacctcgatttgcggggccagtccatcttcagtaccatccacacctatggcctctatgtgaacttcaagaactttgtctgcaacatcggggaagatgcagagttgtttatggccctctacgacccagaccagtccacttttatcagtgagaactatctaattcgttggggcagtaacgggatgcccaaggaaatagagaagctcaataacctccaagcagtgtttacagaccttagcagcatggacctcatccggccccgcgtcagccttgtgtgccagattgtccgcgtgggccatatggagctgaaggaaggcaagaagcacacctgtggactccgaagaccttttggagtggcagtgatggatattactgatatcatacatgggaaggtggatgatgaagaaaagcagcattttattccctttcagcaaattgcgatggaaacctacatccgccagaggcagctcatcatgtcgcctttgataacatcacacgtgattggggagaatgagccactcacttcagtcttgaataaagtgattgcagcaaaggaagtgaatcacaaagggcaaggcctttgggtatccttgaagctcttgcccggtgacctcacccaggttcagaagaatttttcacacttggttgatagatcaacagcaatagcccggaagatgggctttcctgaaatcatactgccaggagatgttcggaatgacatttatgtcaccctgatccacggtgagtttgacaaagggaagaagaagacgccaaagaatgtggaggtgacgatgtctgtgcacgatgaggagggcaagctcttggagaaagcaattcaccctggtgctggatatgaaggcatttcagaatacaaatcagtagtctattaccaagtcaagcagccctgttggtatgagactgtcaaggtatccattgctatagaagaagtcacacgctgtcatataagatttaccttccgacacaggtcatctcaggaaaccagagataaatcggagcgagcatttggggtggccttcgtgaagctgatgaacccggatggcaccactctgcaggatgggaggcacgatctggtggtttataagggtgacaacaaaaaaatggaagatgctaaattctacctgaccctgcctggaaccaagatggagatggaagaaaaagagcttcaagcatctaaaaacctggtcaccttcaccccaagcaaggatagcactaaagacagctttcagattgccaccctcatctgctccacaaagctcacccagaatgttgacctgttaggcttgttaaattggcgttccaactcccagaacattaaacacaacctaaagaagttaatggaagtggatggaggagagattgttaagtttttgcaagatacactagatgcactctttaacataatgatggaaatgtcagacagtgaaacctatgacttccttgtgtttgacgcactggtatttattatttcactgataggagacatcaagttccagcattttaatcctgtacttgaaacctacatttacaagcacttcagcgccactttggcatatgtgaaactctccaaggtactgaacttctatgtggctaatgcagatgactccagcaagactgaactgctttttgctgcgttgaaagccttgaagtacttgtttagattcatcatccaatcccgagtgctctacttgagattttatgggcagagcaaagatggagatgagtttaataattcaattcgccagttatttcttgctttcaatatgctgatggacaggcctctggaggaagccgtcaagatcaagggggcagctttgaagtaccttcctagcataattaatgatgtcaaacttgtatttgatcctgttgagctcagcgtgctcttctgcaaattcattcaaagcattcctgacaaccagctggttcggcagaaacttaactgcatgaccaagatagtagagagcactctttttcgacagtcagagtgcagagaagtgctgctgccactgctgacggaccagctcagcggccagttagatgacaactccaacaagcctgaccacgaggcaagctcgcagcttctgagcaacatcctggaggtgctggacaggaaggatgtgggtgccactgcggtgcacattcagcttataatggaacggctgctgagaaggatcaaccggacagtgattgggatgaaccggcagtctccccacatcgggagttttgtggcttgcatgattgccctgctgcagcaaatggacgacagccactatagccactacatcagcactttcaaaaccagacaagacatcatcgacttcctcatggaaacttttatcatgttcaaggacctgattggaaagaatgtctatgccaaagattggatggtgatgaatatgactcaaaacagggtttttctccgtgctataaatcagtttgctgaagttctcacaagattcttcatggatcaggcaagctttgaacttcagctctggaacaattacttccatttggcagttgcatttctcacccatgagtcccttcagcttgaaaccttctcacaagccaagcgcaacaaaattgttaaaaaatatggggacatgagaaaggaaatcggctttagaatccgggacatgtggtataacctgggtccccacaaaatcaaattcatcccatccatggtgggtcccattctggaggtcactctgacccctgaagtagagctccggaaagccacaatccccattttctttgatatgatgcagtgtgagttcaatttcagtggaaatggcaatttccatatgtttgagaatgagctgatcacaaagctggaccaggaggtagaagggggcagaggagacgaacaatacaaggttcttctggaaaaactgctcctagaacattgccggaaacacaaatacctctccagctctggggaggtcttcgccctcctggtcagcagcctcttagagaacctgctggactatagaaccatcatcatgcaagatgagagcaaggagaaccgtatgagctgcactgtgaacgtgctgaacttttataaagaaaagaagagagaggacatatacataagatatctgtacaagcttcgagatttgcaccgagactgtgagaactacacagaagctgcctacacgcttctcttgcacgctgagcttctgcagtggtctgacaagccctgtgtgcctcatttgcttcagagggacagttactatgtttatacccagcaagagcttaaagagaagctgtatcaagaaatcatatcatatttcgacaaaggcaaaatgtgggagaaggccatcaagctgagcaaagagttggctgagacttacgaaagcaaagtatttgactacgagggccttggcaacctcctgaaaaaaagggcctcattttatgagaacatcattaaggcaatgaggcctcagcctgaatactttgctgttggatactatggacagggctttccttctttcctacggaataaaatcttcatctatcggggaaaggagtatgagaggcgagaggacttcagcctgaggttgttaacccagttccccaatgcggagaagatgaccagtaccacgcctcctggggaagacatcaagtcgtcccccaagcagtacatgcagtgcttcactgtaaagccagtgatgagcttgccgcccagctacaaggataaacctgttccagagcagatcttaaactactacagagccaatgaagtgcagcagttcagatactcccggccgttccggaaaggagaaaaggatccagacaatgaatttgctacgatgtggattgaacggaccacgtatacgactgcatatacctttcctgggattctcaagtggtttgaagtcaaacagatttcaacagaagagatcagtcctctggagaatgccatcgaaaccatggagctgaccaacgagaggatcagcaactgtgttcagcagcatgcctgggaccggtccctctctgtgcaccctctctccatgctgctcagtggcatcgtggacccggccgtcatggggggcttctccaactatgaaaaggctttttttacagaaaagtacttgcaggagcatcctgaagaccaggagaaggttgagctgctaaagcgactaatagcattacagatgcccctgctaacagaagggatccgcatccatggggagaaactcacagagcagctgaagccgctgcatgagcggttgtcttcttgcttccgggaactcaaggagaaagtagaaaagcactatggggttataacactgccacccaacttgacggagaggaagcaaagccgcacggggtctattgtgctcccctacatcatgtcttccactctgcggaggttgtccatcacctcagtcacttcctctgtggtttccacctcttcaaactcgtctgacaatgctccttccagaccgggatctgatggctcaatcttggagccacttttggagcgcagggcctcgtcaggtgccagagttgaagatctgtcccttagagaggagaacagcgagaaccggatcagcaagtttaagagaaaagactggagtctgagcaagtcccaggtcattgcagagaaagcaccagaacccgatttgatgagcccaaccagaaaagcacaaaggccaaagagtctccagttgatggataatcggctatcaccatttcacggttcttcacctcctcagtcaacacccttgagcccacctccactcactcccaaagccaccaggaccctaagctccccatcgttgcagacagatggaatcgcggccactcctgtcccacctccacctccccccaaaagcaagccctatgaaggcagccagaggaactccactgagctcgctcccccactgcctgtccgaagagaagccaaagcaccaccccctccacctccaaaggctcggaagtctggcatccctacttccgagcctggatcccagtaaggatcttgccctccctgcaacaccgagtgccttagacagctgctgcctgagaactggcctccagccggtgtcctcattccatggggctccctgctgactgcatttcctgatctgggatgatgtttaccagcccaaaaccagtcatgttcttccaaaagcttctctttgatagaattttgaggccatgccacctcccttccagtccacatggaattccagaatcagtcacagcctctgattttttccaagaagagattgccttcaccattgttaaatgtcagcctgtacggcagagacatggtggtctgcacaagcctggacaagttcttccatattgatggtggagcaacccctgtaatctactccttggaaggattttttgctttgcttatgaaaagctgtgcttgagacttaggtacttttctcacgtggacacactgatcccatcccatattgcatctttgaagagatggatatcaagtacactttggtagctgaaataatcatatctttctgatgtctattgtatctcctttgaggaaaagaacacacatttttaatggagattggctgctttcaggtatgtgtgtctatcattgaaagagcatggactcaaacatcagccctgagttcttgagtccacccaactcccatcttcttgtggcacaggaaagctgccctctccctctcccaccacactcctgactaatggccttcactgcgtcgcagtcactccttccctacggacttctttgaagctcttccttttgcacatacggctttttttttttgtcctattacctcctctgagcgcaaatcactggctacaagggacttaccagtctggattcagcagtttcttttctaaaacccatttgggtgactcagcagccgcatctgctacctgattttatcctggagaatacagtgcaatatttctctttgattatttattcctcttgattgtggaattaatttgattgcttgctaatggtactagtagtactcctttcagaagaaaaaatggagcgatttaggtgaccaaatattacatacataaatagccacatgaagttttagacgtttggacttgaagcctcaaagatcaaccaaccagtccccttatttagtaaataaggaaattgaggctacacacagaaaattgtgctacagattattactaataacccagcttgctaaattaggctatacctaggtaatctctagaagacaactctgacagactctttaatatttacccctggttggaacaatatttgaaatgtcccggatatttctatgctacttagatatttgtggcaaagcagaaagctttttgactgtgaaggcagaggtcagcactgggggaaacttgctggtggtctctcccacaaccttgcccagagtcctttccactaaggaggtgaagagaacagagaaagagatttccatttctgctgccagagctggtatttgcctgcctgattctctgtgtttcctgtttcaccgccaccctttcaggagagaactacaccagttcatcatgagggtcagggaagcaaaagctctcagatgtgtccagggcgttacttaagaaatgagtatgcagattctggaaggggtgtggaaaaggtgatcctttacccccacccaggaaaacctgcattgtgctagcatggaaaaatcatgggctttggaattaaacccatttggtggaattaaacccatttggtttcaaatcccagttatgacatctgttaactttgcaaactcacaaaaattatttgaaattaaaaaaaaaaaaaa

SEQ ID NO: 30768 - DNA, 5787 bp, Homo Sapiens
gtggttctgcgcttgtcatcatggcgacgcggggccatgtgcaggaccctaacgacaggcgcctccggcccatttacgattatcttgacaatggtaataataaaatggcaattcagcaagcagataaactgttgaagaaacataaggatcttcattgtgctaaggttttaaaggcaattggtttacagagaactggaaagcaagaggaagcctttactcttgcacaggaggtggcagcccttgaacccacagatgacaactcactgcaggcactgactatcctttaccgggagatgcaccgaccggagttagttacaaaactttatgaggcagctgtgaagaaagttcccaatagtgaggagtatcactctcacctcttcatggcctatgccagagtgggtgaatacaagaaaatgcaacaggctggcatggctctatataagattgtccccaaaaatccctactacttttggtctgtgatgagcttaattatgcaatctatatcggcacaggatgaaaacctctcaaaaacaatgtttctgccccttgctgagagaatggtcgaaaaaatggtgaaagaggacaagatagaagctgaggctgaagttgaactttattatatgatcctggaacgtttgggaaagtaccaggaggccttggatgtcatcagagggaaattaggagagaagttgacaagtgagattcagagtcgggaaaataaatgcatggctatgtacaagaagctgagcaggtggccagagtgcaatgccctttcccggcgcctcttactaaaaaactcagatgactggcagttctatctgacttatttcgattctgtctttcgactgattgaagaggcctggagtcctcctgctgaaggtgaacactctttagaaggagaagtacattattctgcagaaaaagctgtgaagtttatagaagatcggataacggaagaatctaaaagttctcgccatctccgaggaccacatctagctaaattggagctgattaggcgtttacgaagtcaaggttgtaacgatgagtacaaactgggtgatccagaagaattaatgttccagtattttaaaaagtttggcgataaaccttgttgttttacagaccttaaggtgtttgttgacctcttacctgctacacagtgtacaaaatttattaatcagttacttggagttgttcctttgtcgacaccaacagaggataagctggcactgcctgctgacatcagagctctgcagcaacatttgtgtgtggtgcagctgacgaggttacttggcttgtaccacaccatggataaaaatcagaaattgagtgtggtcagagaattgatgttaaggtaccagcatggactggaatttgggaaaacctgtttgaaaacagaattgcaattttctgactattactgtctccttgctgtccatgcgcttattgatgtatggagggaaacaggtgatgagaccactgtgtggcaggccctgactttgctggaagagggattaacccatagcccttccaatgctcagttcaaattgctgcttgttcgaatctactgtatgctgggtgcatttgaaccagtggtggatctttactccagcctcgatgctaagcatatccagcatgataccattggttatcttttgacccgatatgctgaatctctaggtcagtatgctgctgcgtcccaatcctgtaacttcgcactcaggttttttcactccaaccagaaagatacctcagaatatattattcaagcttacaaatatggtgcatttgagaagatcccagagtttatcgcttttaggaacaggctgaataattctcttcattttgcacaagtccgtactgaacggatgctgttagaccttctacttgaagcaaatatatcaaccagtttagcagaaagtataaagtcaatgaaccttaggccagaagaagatgacattccatgggaagatttgcgagacaacagagacttaaatgtttttttcagctgggatccaaaagacagggacgtttctgaagaacataagaaactttccttagaggaggagaccttgtggttaagaatccgatccttaacattgaggctgataagtggacttccaagtctcaaccaccctgtggagccaaagaactcggagaagactgccgagaatggggtatcctcccggattgatattcttcgtttgctccttcaacagctggaggcaaccctggagacaggaaagcgatttattgagaaggatattcagtatcctttccttggtcctgtacctaccagaatgggtggattctttaattctggctgttctcagtgccagataagctctttttatcttgtcaatgatatttatgagctggataccagtggtttagaggatacaatggagattcaggaacgaatagaaaatagttttaagtctttactagaccagttaaaagatgtcttcagtaaatgtaaaggtgacctcttagaagttaaagatggtaacttgaaaacacatcctactcttttagaaaatctagttttctttgttgagactatttctgttatcctttgggtatccagttactgtgagagtgtcctacgaccatacaaactaaatttacagaaaaagaaaaagaagaaaaaagaaaccagcatcatcatgccacctgtctttaccagtttccaagactatgttactgggcttcagactttaatttccaatgttgtggatcatattaaagggcttgaaacacatctaattgcacttaaacttgaagaacttattttagaagacacttctctctcaccggaagagagaaaattttcaaagactgtgcaagggaaggtgcagagcagttatctgcactcacttctggaaatgggggagctgctgaaaaaaagacttgagaccacaaagaaactaaaaatttaaggaagtatctatcatgggcactgatgactctgcaacagaatatgacaccatcttcccaggcaaaagcaacatctggttgaccatgattttaatccagaacttcctcataaaatgcatgaaggactttgatcgtgaatttttttaggtgttaaatatatacaactgattaaattattgtatataaaccagaagcgggaccctcatctgggtttgaccactttttatacatgttcatatgcatatggcagcaacaagagaaccctacttttcttcttcccatcaccagaaacatcttttcaggggagcggggggtctataaaaacagcaatagaaattaagcataaagcatcaacctcatagcaactgaatagcccttccattataaataacattgagagtttttggtctggtccttgagccacaagaagtggaggggagaccatgcctgggaacagacccccttttcacagcagtaagtttgttttgaggctttctcagctacttggctcccacagaacccaaggcaggtacacaaaggaccttagatgagatctggcatatgcacccgcaatagaagggcaccacttggatgaccacaggcacttagtttttggctagtttttgtctgatagttaagacatccccatcctagcttctgtgagagttaaaaatctcaggtaagaaggcaaggaaggctctgttaatttatagctgtttagaggggaaagcagtgcagaccacttattaagcccgctgaggactagctttctgtctttcatacatttgggaaagataggaatgactgtttcaaagaagagaggtgcacataatttatgcaggcaagtatgatacttatttcattggttttgtgagtcatatatatacatatatatatatacacatatatatatgacttgaaaattaagatttaatactttaatgttttaagtgtggggggtttgggaaggaaggaatgtaatattatggatttagccttaggctttaagttttaggctggcaaaagaaatgttattcagtgggtttgaggtttggactactttcttcaaacttagagaattataacaggatggtgtttactttgttcacctggatgtccccaagactctagcttcttctatcagtggttggtctgatagaagaggtaaaaattgctcttgaaaatgtcctacaatttatgcagtttctttgataatatttttctgtttaaatccctgcttctgtttttggtctgttacctaaatatagttcaagtttaattctgtaagagcaaagaaatgaatttgatgaggaaattaagcatccaatggaggattggtcttgaagaccttaaaggtgctttccaacctgcactgctccagtgaaatgtggtacttttttcttttaaaagcaaccaagagagctgggaatatctgtgtacgcaaagtaattgcattttgtcccttcattttgactttcttagattcataatttgatacagtgcttaaacttccaaggaaattttaaacaattactacattacctgttcaaaataaggcttgttggaaatcctagtccatcaactaatttcaaaaatttatttttgatatgagtagcaacagctggtcatataccctatcccaaaaggaagaactgtcttgaacaagatgaatggaaaattgtggttaattctgaatttcatgtaatgacaacatattctttcataaaactatggcctgtttaagatggaactttgtgtgtgtctgctggggagggtggggtacatgtgtatggcgtgtgttcttgaaatgatgtctctctgaatatccaaaaaagtactgtactgtagaaatgctctttgaaaaagtctatcgactgaccatgatcaatctagcatatgtatgttcagtgggctagccttggtcctcagggacagtgtgtgactctagtggtcttcctaaccagtctcttgcctaaagatatctgggacctctactggctttaatgacaaataatgttatgttgaggttatgcttcctttgttatttgctgattttcctactaaatgtagcatttcaattagatccagctttcacattttgagataattgtaaaaagaatgaaattatgcagaaatggccaatatctcttatcaatctgttcttttggaaaccctcatgtactataaattgtgtacagttaaaaaaatatatatatatatatattcttacatgagtaaaaagcaccctctcccagcaatcgtatgccattggtatttgaagagaattcccaaataacccattgctgctgctgctgtttttgatttgtatgggtttttttgttttgtttgtttttgtgtggtaaactgatatttaaaaaaggaaaggagaaaaatcacgactactgtttacagactgaaaaattattgctttttatactactgagatcctaagttaagactctccaaagcaaacatttggtttaaatcatttatctgatgtagataaaaggtagagaaacttgtagtgttctccacataatggaaaatgtacaaatgcctagttgtgttgcccatcaattttgtatattttcataattttaattgttgaaaattgcattatattttgcaatcactatgttcaatctggatttgtctttcattttaacttttaatataaaaaggggtttcaatgtatctacaggcttgttattgaaacttcctacttatttgatgtgatttattaatataggaagtatatattcttccttaagtaagtgaagcatagcaaatctactttaaactggatgggttaatttatataaacattttcattttaagttggcaaaaaaa

SEQ ID NO: 30769 - DNA, 2993 bp, Homo Sapiens
cagcaggcggggcacccggactggcggcttcgctggcgcaaggtcggtccggcggccagggacctggaaggctgcgaggccctgcgaggtcgaggttcggagtttgctggtcccaggcccggcccgaggccaccggagccgccagctgtttggaactgagctactgcagaaagggaagtggagagtaagggccaggccccgtgggggcagatggccggcagaaggctgaatctgcgctgggcactgagtgtgctttgtgtgctgctaatggcggagacagtgtctgggactaggggctcgtctacaggagctcacattagcccccagtttccagcttcaggtgtgaaccagacccccgtggtagactgccgcaaggtgtgtggcctgaatgtctctgaccgctgtgacttcatccggaccaaccctgactgccacagtgatggggggtacctggactacctggaaggcatcttctgccacttccctcccagcctcctccctctggctgtcactctctacgtttcctggctgctctacctgtttctgattctgggagtcaccgcagccaagtttttctgccccaacttgtcggccatttctaccacactgaagctctcccacaacgtggcaggcgtcaccttcctggcatttgggaatggtgcacctgacatcttcagtgccctggtggccttctctgacccgcacacagccggcctggcccttggggcactgtttggcgctggcgtgctggttaccacagtggtggccggaggcattaccatcctacaccccttcatggctgcctccaggcccttcttcagggacatcgttttctacatggtggctgtgttcctgaccttcctcatgctcttccgtggcagggtcaccctggcatgggctctgggttacctgggcttgtatgtgttctatgtggtcactgtgattctctgcacctggatctaccaacggcaacggagaggatctctgttctgccccatgccagttactccagagatcctctcagactccgaggaggaccgggtatcttctaataccaacagctatgactacggtgatgagtaccggccgctgttcttctaccaggagaccacggctcagatcctggtccgggccctcaatcccctggattacatgaagtggagaaggaaatcagcatactggaaagccctcaaggtgttcaagctgcctgtggagttcctgctgctcctcacagtccccgtcgtggacccggacaaggatgaccagaactggaaacggcccctcaactgtctgcatctggttatcagccccctggttgtggtcctgaccctgcagtcggggacctatggtgtctatgagataggcggcctcgttcccgtctgggtcgtggtggtgatcgcaggcacagccttggcttcagtgaccttttttgccacatctgacagccagccccccaggcttcactggctctttgctttcctgggctttctgaccagcgccctgtggatcaacgcggccgccacagaggtggtgaacatcttgcggtccctgggtgtggtcttccggctgagcaacactgtgctggggctcacgctgctggcctgggggaacagcattggagatgccttctcggatttcacactggctcgccagggctacccacggatggcgttctccgcctgctttggcggcatcatcttcaacatcctcgtgggtgtggggctgggctgcctgctccagatctcccgaagccacacagaagtgaagctggagccagacggactgctggtgtgggtcctggcaggcgccctggggctcagcctcgtcttctccctggtctcagtcccattgcagtgcttccagctcagcagagtctatggcttctgcctgctcctcttctacctgaacttccttgtcgtggccctcctcactgaatttggagtgattcacctgaaaagcatgtgactgaagccgcttagtgctgtggcctcactgcaggcaggagccccgcccctcctgccgggggaggcccagggaccggagcatttctgcaaggcccttgtgggcacgagagtgcggcccttgctgctggagatctgaggtcactgctgtgagctgggagaactgctgtgtacctcttgctgccagcacccaacagccttgccgtggggaccttggaaacctggctttgctctggacaaagggttccagagagaagctagaagtcccccttgaatgacccccagagcccctctgagaagggctggagtttgggggaaggggatggctggatgtgctccaggccatgctggaggtacccccgaggcacaggcactgcccgttccccttgcctgggcttcaggccttctggcaccttctcaggacacaagtggctgcccaaccctgactcagagaatgagggtggcttggacccctgggaatcaggccgccgagggctgagctccagagccgcaccatctgccacaaacagaattcgagacatacttaattttgaatttctccttgccacgttaataaagccaaaagcagcgggtgctattcgtggcaacacacttcactgaacccacttgcttccaaaacgatgccagcccgaggcactgctacgccagcagctgccacatgggatggtggctcaggcgctccctccaggattctgcccctgcctgtccacagactcctttgtgctggaacctgggctcctccagctgccaggcaggagtcggtaggactgtgcctgtgcctccctcagcggggccctgggcggggttccaaggcctgcgagctgggaaaggacagatgaggggacctcgtgccttcttgctgtcatgcaatgaccccgccttatgttgccgaaataagcaactcttaggtttgcctgactgccttatgctggtaaagaaaagggattcaactgtctcttttccaaataaaaaaaaagtcaaaatttcaagtgtaaaaaaaaaaaaaaaaaa

SEQ ID NO: 30770 - DNA, 2769 bp, Homo Sapiens
atgtttcttcactcagttaatctctggaacctggcgttttatgtcttcatggtctttctggcaaccctggggctgtgggatgtcttcttcggcttcgaggagaataagtgcagtatgagctacatgtttgagtacccggagtatcagaaaatagaacttccaaagaaactggcaaaacgctatcccgcatatgagttgtatctttatggagagggatcctatgctgaagaacacaaaattctccctttgacgggtattccagttctctttcttcctggtaatgctggaagttataagcaagttcgttctattggctccattgcacttagaaaagcagaggacattgacttcaagtaccactttgacttctttagtgtgaacttcaatgaagaactggtggctttgtatggtggaagtcttcagaagcagaccaagtttgtacatgaatgtattaaaacaattctcaaactctataagggtcaagaatttgctccaaaaagtgtggcaataattggtcattctatgggtggccttgttgcaagagcattgcttacactgaaaaattttaagcatgatctgataaatcttcttattacacaagccacacctcatgttgctcctgtgatgccattagatcgtttcattacagatttttatacgactgtaaacaactattggattctaaatgctcgacacataaatttaaccacactttctgtagctggaggattccgggattaccaagttcgttcaggattgacttttctaccaaaattaagccatcataccagtgccttatctgttgtgagttcagcagtgcctaagacctgggtctcaacagaccacctctccattgtgtggtgtaaacaattgcagttgactacagttcgagcattctttgatcttattgatgctgatactaaacaaataactcaaaattccaagaagaaactgtcagttttgtatcaccactttataagacacccatcaaaacattttgaggaaaatccagctataatttctgacttaacagggacatctatgtgggttctagtaaaagtgtccaaatggacctatgtagcttacaacgaatctgagaagatatattttacatttcctcttgaaaatcatagaaaaatctacactcatgtctattgtcagagcactatgctggatacaaatagttggatttttgcttgcataaacagcacttctatgtgcctgcaaggggttgatttatcatggaaagctgaactgctgccaacaattaagtatctgacattaagacttcaagactatccatctttgtctcatcttgttgtttatgtaccatctgttcgtggaagtaagtttgttgtagattgtgaattctttaaaaaagagaaaagatacatacagcttcctgtaactcatcttttttcctttggattgtcttcaaggaaagtggtgttaaatacaaatggcctatactacaatctagagcttctgaactttggacagatataccaagcttttaaaatcaacgtggtaagcaagtgctcagcagtcaaagaagaaataaccagtatctatagacttcatattccttggtcttatgaagattcactaaccattgcacaggctccatcttccacagaaatttctctgaaactccatattgctcaaccagaaaacaatacccatgtggcattatttaaaatgtacacgtcatcagactgtcggtacgaggtgacagttaagacttccttttcacaaatacttggacaggtagttagatttcatggtggagctcttcctgcttatgtcgtatctaatatccttcttgcttatagaggacagttatattctcttttctcaacaggttgttgcttagaatatgctaccatgttggataaagaagccaaaccatacaaagttgatccttttgtaattatcattaagtttctgttggggtataaatggtttaaagaattgtgggatgtattattgttaccagaattagatgccgtcattttaacttgtcagagtatgtgtttccccctgatatccttgattctctttctgtttggaacgtgtactgcctactggagtggcctactgtcttctgcatctgtgagacttctttcttcattgtggctagctttgaaaagaccctctgaacttcctaaagatatcaagatgatatcaccagacttgccctttttgacaattgtcttgatcatagttagttggacaacttgtggagcactagccatacttctttcttatctttactatgtgtttaaggttgttcatctgcaagccagcttaacaacttttaagaatagccagcctgtgaatcccaaacactctagaagaagtgaaaagaaatccaatcatcataaagactcctcaatacaccatcttcgtttatctgccaacgatgctgaagatagccttcgcatgcacagtactgtgattaacttactaacatggattgtattactcagcatgccttctctaatttattggctaaagaatcttaggtattattttaaacttaatcctgatccatgtaaacctttggcatttatccttattccgactatggcaattcttggaaatacttacactgtttcaataaaatcaagtaaattgttgaagactacttcacaatttccacttcctctggctgttggtgtgattgcttttgggtcagcacatttatataggcttccatgctttgtcttcattcctcttttactccatgcattatgcaactttatgtaa

SEQ ID NO: 30771 - DNA, 4627 bp, Homo Sapiens
tcacggtctttaccgctcagcttcccggagtccgcgcaggagcgcgtctgaataggaagcgttttcggacgtggatgcggcgttttgtcgctgccagtggtgtctggagaggttcgggctcggtcctcaggtcctggctcccagaagcaaaataactcaagtgaagcaatgaaggaagaagaaggaggttgctggccttggatatcataatttctggggacaactttaagtggacactaatatttctgactaggaaaacttcaaaaacttcatggcaaatgcagaagagacaaagacgtatagtccatgttatccactattttctgagcacagaagaaaatgatcaagacccaggaatcactgaccctggaggatgtggctgtggaattcagctgggaggagtggcagctcctggacactgctcagaagaacctgtaccgggatgtgatggtggagaactataaccacctagtatcactggggtatcaaactagcaaaccagatgtactctccaagttggcacatggacaagaaccatggacaacagatgctaaaattcagaataaaaattgtccaggaatcgggaaagttgacagtcatctgcaagagcactctccaaaccaaagacttctgaagagcgtgcagcaatgcaatggacagaatacacttagaaatattgtacatctcagcaagacacattttcctatagtgcaaaatcatgatacatttgacttgtacagaaaaaatttgaaatcaagtttaagtttaatcaaccagaagagaagacatggaataaataaccctgttgagtttattggaggtgagaaaacacttctacatggtaagcatgaacgtacgcatactaaaactagattttctgaaaatgcaaaatgtatccatactaaattccaagtcttcaagcatcagaggactcagaaaattgagaaaccccatgcatgcattgaatgtgagcaaaccttccttaggaagtctcagctcatttaccatgagaacatttgtatacaagagaatcctggaagtggtcaatgtgagaaattatccagaagtgtcctgttcactaagcatctgaaaactaatacaacagacaaaatctgtatacccaatgaatatagaaaaggctctactgtgaagagtagtctcattacacatcaacaaacccatacagaagagaaatcctatatgtgcagtgagtgtggaaagggctttacaatgaagcgctatctaattgctcatcagcgaactcatagtggagagaaaccttatgtgtgcaaagaatgtggaaaaggtttcactgtgaagagcaatctcattgtacatcagcgaactcatacaggggagaaaccctatatatgcagtgaatgtggaaaaggcttcaccatgaagcgctatcttgttgtacatcagcgaactcatactggagagaaaccctatatgtgcagtgaatgtggaaaaggctttaccgtgaagagcaatctcattgtacatcagcgctcccacacaggagaaaaatcttacatatgcagcgaatgtggaaaaggcttcactgtcaaacgcactctcgttatacatcagcgaactcatacaggagagaaatcttacatatgcaatgaatgtggtaaaggcttcaccacaaagcgcactcttattatacatcagcgaactcatacaggagaaaaaccctatgaatgcaatgaatgtggtaaagccttcagccagaaaatatgcctcatacaacatgagagatgtcatacaggaaagactccctttgtatgtaccgagtgcggaaaatcctattcacacaaatatggcctcattacccatcagagaattcacacaggagagaaaccttatgagtgcaatgaatgtggaaaagccttcaccacaaagtcagtactcaatgtacatcaaagaacgcatacaggagagaggccgtatggatgcagtgattgtgagaaagccttctcccacttatcaaaccttgtcaaacataagaaaatgcacacaagagaaatgggtagaatcagtcaagttgaaaactcctgtaatggagagtcacagctccttccttataagtgaactcatgcagaagaaaaccctactagtgccgtgactatggaaatgccttttgtggcaactcagacttcattaaacatcagtgtgtttctagccaattggaacataaacatggtgctgcctgttgacagatgtgtgtctgtcctcaggaggtgaaataatttgccctagagatcaatttgatgaatacagtaaataaggtagtgcctttagtggtcttttacctcatattttctgtcaatgaaaatacgttgaataaactatattaatgtggagatgttttgagcaataatttctgctcatatgtctgaaaagtatacagagataaattctgtgaatacaaagactaagaaaagtcttctgtggaaagatagactttattatcaggtttcatcatagatttcaacgtaagtgagcttattgttgatagaaacatgatgaccatgacaaagtctttactcagaaatatgacctcagtgagtgtcaaagtttacactggaaaataactttaaggtgacagtattgatggcaggatttcagcgacgcactctgcttcatcatttgtcaggagatcacatagaaagtaaaattgttccgaacatgctatcaaataaatgtggaacacctttagcaaactatcaacagctcatgaaggcatgaaatgtgaaaatgatgaatatttgagtgctttttcttaataagtataaccttaaacatcagctaatacacctggtgtgcattttcagtcaggataccttaatcctcatttctagttgccttgccaatgattccataatatactgtctcattactgtttatttttactgttgtgtaaaattgtggtataatgagaaatacatttggtctttgttcctggttcctggcatagagctcctaaaacgcttagaatttcatgagtgataagagttttttggttttgttttgtttttgctgttgttgttattcatagcactgcccttttaattacacctgattatactactgaagtgacttatggttgctcccctagacagcctcagaatggggctgttctctaggaagatcaagtaactagaggatggagactttgtgccccatttctcccacctcctggaaggggaggggtgctggagattagattagacaatgagattaagagaactccaaatagcccaagagggtggtgcacccccaacttcataggggtagaggctcctgagattaggagaaccctttttaggctttactctatgtacctcttcatttgagtgttcatttgcgtcctttataaccagtaaaacaaagtacgctgttttcttgagttttgtgagccctgtagcaaattatcaaacctgagtagggcagtgggaactcggaatttatcaccattcagaactgcaggttgtccttgtgagtggcatctgatgtgggggaagtcttggactgagccccttaacttgtggagtctgcactaatttagactgcactaactaacttgcactgcactaacttggactgcactaacttgtggagtctgcactaacttggagaagttagtgtcagaattgaattatagaacacccagttgttcagaattgaattgtagaacacccaattggtgtgggagaattagagaatttatttgtgtcagaaaatactccagaacaaccaccccatattatgattagctcttttcctttctttggctctgagcttaattgtacattaagcaaacttaagtagaaaagaaactgaatatgttaaatatattaacaacatatttggacttgcttaactaagattatagagatgatcagtttataaaaccaccttcaacttaaataaatttgaactcgaaattgcaaaagcagtctagaggctttgctagtatccttcaaccaatttctagtaaaaatatcctatataaccataattatcaaaaccagaaaaacaacattggtaggatactataaagtactaatcttattttggatttgacgaatttttacatgtttttttcttttttagtttgtactctaagaagttgtattacatgtacagattcgtgtaaccactgcaaccacataaaactaatgaacacaaagtccctcatgctacctttttatgcttacactccatccaaacctaactctgccaaccacttttctcctatcagtataatttcatcatttcatgaatatgataaaaataaaattgtttttgtaaatggtttttataaattttatataaataagttatatgaatttttattgatagagagtatgtaagcttttggcatttttgtcactcagcaaattactcctaaggtttatatgagttgatgaatagttgttttattatttttttttaccaccatgtatctaaccagatgaaagttgtttatatttgagagtagtatacatatttgatgtagtagtttatccattcacctatgagatatatttgcactgttttcctggttttaagtgctataaataaagatgctgtgaaatctaaaaaaaaaaaaaaaaaa

SEQ ID NO: 30772 - DNA, 2630 bp, Homo Sapiens
cacttgtaatcctagcacttggaaaggctgagacaggaggatcacttgaggccaggagtttgagaccaacctgggcaatatagtgagaccctatttctacaaaaaataaaataaatagccaggcctggtggtatgcacctgtagtcctagctactgaggaggctgacggaggaggatcacttgagcccaggaattggaggctgcagtgagctatgatcacgccactgcactccagcctgggcgacagagccagaccctatctctgaaaacaataataaaacgacaaccaatgctgactgtgtctccatcactgggtggggctgaggaagcaggcctcagaaaggaagccagttttcccccaaaattattccctgaggctgcctctgggcctgtggatccagatgtgtgggggccttcaggagtggcaggggagtggggcctccagcgtgaaaacagaagtcaccgtcagccttgcacccccggctctgcctcccaggactggtgtttttgcctctgttttaatttcctgctgggtcctcccttggacattgtcaggtatgcaggctgggacatcccttctttcctcctacattccccctagagcccaaggctctgtccgtggtccagccactccatggcagggaagctgtacctccataatcagctgcctgagggcccctgacccaccaccaggcaccaccctggtggggctgaggttagaagggaaagaatgccagaactccagtcctggaggcaggagagtgtgtgagcccagccccgccctctcagactctcagacctttatttcatcctcattttcctggctagaggttccatgcatcatttttttttttttttttttcagatggagtctcactctattgcccaggctggagtgcagtggtgctatgtcggctcactgaaacctccgcctctcaggttcaagcaattctcctgcctccgcctcccaagtagctgggattacaggcatgcaccaccacacctggctagtttttgtatttttagtagagacggggtttcaccatgttggccaggctggtctcaaactcctgacctcaggtgatccacctgcctgggcttcccaaagtactgggattataggcttgagccaccacgcccggctggttccatgcatcttacctggatgacttgggtccctaaatgggcccctgggtgcccagcctcccctcctccaatacattctctgataatctgaccttgtcatgaccattggggcacctgttgcccacagggtagaggccaggtgcctgaggacagcactgaaggccgtgcacctccacctccagcctccagtcacctcacctagctcactgctctctctcctgcaaagtctctcctgcttccctccctaagggaagggctggccgctcactgcttgggcccccttgatttctaagacacctgtgaagggtcccacgaggccaggcacagtggctcttgtctgtaatcccagcgctctgggaggctgaggcaggaggatcacttgaggtcaggagttcaatgtggacaacacagtaagaccctgtctctacaaaaaaatttaaaacttagctggcattggtggcgcatgcctatagtcccagctacttgggaggttgaggtaggaggatcgcttgaacccaggagttcaagtctgcagtgagctatgattgcaccactgcactccagcctgggtgatagagcaagaccccaactcaaaaaaaaaaaaaaggatcccacggttcaccttgtgctgccacgatcggttggcagctctgctctgtgccgtcctgtgcctgtcactgagtaagatgcaggagaagttgggcaaaagccctcaggataaacgaataagtcattcagagtaggtgctggtgggaaatgggcttgagtcactcacctggggccagaagaggcccccagggagttgtgagcagattagaccctccaagaccgccccaggggttggcccatgctttccctaactgtgcaaaaatggtttgggataggctgggtgccgtgggtcacgcctgtaatcccagcactttgggaggctgaggcaggtggatcacctcaagtcaggagttcgagaccagcctggccaacatggtgaaaccccatctctactaaaaatacagaaattagctgggtgtggttgcacacgcctgtaatcccagctactcaggaggctgagggaggagaatcccttgaacccgggaggcggaggttcatggggaacccagcaggaaattagaatagaaccaaaaacgccagtcatgggaggcagagctgggggagcgaggctgacaatgactcctgttttcacgctgagagaccccactcccctgctgagatcgcgccactgcactccagcctgggcgacagagcaagactccatctcaaaaaaaaagttaattaattaattagattaaagtacaacaattagcagggcatggtggtgcacgtctgtagtcccagctactcaggaggctgaggcagaagaatcgcttgaaccctggaggcggaggttgccgtgagccaagatcgcaccactgcactccagcctgggcgacaaagtgagactctgtctccaaaaaaaaaaaaaaaaa

SEQ ID NO: 30773 - DNA, 1668 bp, Homo Sapiens
actatctgcttgttcatctgagtgtcggcacaaaccagcagaggcggtgacgatgctctcgggcatagaggcggcggcaggggaatatgaggactcggagctgcggtgccgcgtggctgtggaggagctgagcccgggcgggcagccgcgaaggcgccaggccctgcgcaccgcggagctgagcctgggtcgcaacgagcgccgcgagttgatgctgcggctgcaagcgccagggcccgcggggcggccgcgctgcttccctctgcgcgccgcgcgcctcttcacgcgtttcgccgaggccgggcgcagcaccctgcggctccccgcccacgacacccccggggccggcgcagtgcagctgctgctctcggactgccccccagaccgcctgcgccgcttcctgcgcacattgcgcctcaagctggctgcggccccgggtcccgggccggcctccgcccgagcgcagctgctgggcccgcggccccgcgacttcgtcaccatcagccctgtgcagcccgaggagcggcggctcagggcggccacccgggttccggacactacgctggtgaagcggcctgtggagccccaggctggggccgagcctagcacagaagccccaaggtggcccctgcctgtgaagaggctgagcttgccctccaccaagccacagctttctgaggaacaggctgctgtgctgagggccgtcctgaaaggccagagcatcttcttcactgggagtgcaggtagtgggggcagagaggaggtagggggacagtggtggggtgggatagaggaacagggagacctgtctaactttgcccctgtccaggaacagggaagtcatatctgctaaagcgaatcctgggctcactgccccccacaggcactgtggccactgccagcactggggtggcagcctgccacatcgggggcaccaccctccatgcctttgcaggtaagtaggaacccctagggcttgagctaagagcaagcccagcttctgggaagggagagaggggaggtctgcataaagagggagttttgggggctgggcgccgtggctcactcttgtaatcccaaaactttaggaggccaaggtgggaggatcgcttgagcccaggagtttgagaccagcctggccaacacagtaaaccctgtctccacaaaatttaaaaattagcggccgggcgcagtggctcacgcctgtaatcccagcactttgggaggccgaggcaggcggatcacaaggtcaggagatcaagactatcctggctaacacggtaaaaccctgtctctactaaaaatacaaaaaaattagccaggcatggtggcaagcgcctgtagtcccagctactctggaggctgaggcaggagaatggcgtgaacccaggaggcagagcttgcagtgagccgagatcacgccactgcacttgagcctgggcgacacagcgagactccatctcaaaacaaaacaaaacaaaattagctgagcatggtggtgtgtgcctgtagtcccagctactatggaggttgaggtgggaggatcgcttgagcccatgaggcccaggttacagtgagccaagatcgtgccactgcacttcagcctgggtgacagaaagagaccttctctcaaaaaaaaaaaaaaaaaaaaaaaaaaaaaaaaaaaaa

SEQ ID NO: 30774 - DNA, 8192 bp, Homo Sapiens
gagagcgagagtgagtgagtgtgagtgcggggtggggtggtggccgttacgttcggggcaacggctacggcagtggagaagtaagaagagaaacaacgtccggcgcttccgccttcgcttaggaggaggaagagctggtagggaaaggaaagtgcttcgccctgggcctggactggaccgagtcgggttggtgggggtctgggctatgagcttttgagggtcgcctgggacgcggagcgagacacgagagccaggagctatgtctcagccgccgccgccgccgcctccgttgccgccgccacctcctccccctgaggctccacagactccgtcgtccttggcgtcggcggctgcttcgggggggcttttgaagcggagagaccggagaatcctttccgggagctgcccggatccgaagtgtcaggcgcgtctatttttcccggcctccggttctgtcagcatcgagtgtaccgagtgcggccagcggcacgagcagcaacagctgctgggggttgaggaggtgaccgacccggacgtagtgctacacaacctgctgcggaacgcgctgctcggggttacgggggcacccaagaagaacacggaactggtaaaggtgatgggcctttccaactatcactgcaaattgttgtcgcccatattagctcgctatggaatggacaaacagacaggccgggccaagcttctccgggacatgaaccagggcgaactgttcgattgcgccttactgggtgaccgcgccttcctcatagaaccagagcatgttaacactgtgggctatggcaaggaccgctccggaagcctcctgtatttgcatgacactctggaggacattaagcgggccaataaaagccaggaatgtctcattccagtgcatgtggacggggatggacactgcttggtgcatgctgtgtctcgggctctagtaggccgagagctcttctggcatgccttaagagagaatcttaaacagcactttcagcagcacctggcccgatatcaagctctgttccatgacttcattgatgctgctgagtgggaggacattatcaatgagtgtgaccctctgtttgtaccacctgagggtgttcccttgggcctgaggaatatccacatatttggtcttgccaatgtgctacatcgtcctattattctgttagattccctcagtggcatgagaagctctggtgattattcagccacctttctacctgggctcatccctgcagagaagtgcactgggaaagatggtcatttgaacaaaccaatctgtattgcatggagcagctccggtagaaaccattatatccccttggtaggcataaaaggggctgctttgcccaaactgcctatgaatttgcttcctaaagcatggggtgtgcctcaggaccttattaaaaagtacataaaacttgaagaggatggtggttgtgttattggaggtgacagaagtttgcaagataaatacttacttaggcttgttgctgctatggaagaagtctttatggacaaacatggtatccatcctagtttggttgctgatgtccatcagtatttctacagaaggactggagtgataggagttcagcctgaggaagtcacagcagctgctaaaaaagcagtaatggataatcgccttcacaaatgtttgctctgtggtgccctttctgaacttcatgttcctccagagtggttggctcctggagggaaattgtataacctggcaaaaagtactcatggacagctgaggactgacaaaaattacagctttcccttgaacaatttggtttgctcatatgattcagtgaaagatgttctggtaccagactatggaatgagtaacctaacagcttgtaattggtgccatggcacatctgtgcgaaaggtcagaggagatgggtctattgtgtatttggatggagacagaactaattctaggtccactggtggcaaatgtggttgtggattcaaacacttttgggatggtaaggagtatgacaatctaccagaagctttccctattactttagaatggggtggaagagtggtcagagaaacagtatattggttccagtatgaaagtgattcatctttgaatagtaatgtttacgatgttgcaatgaaacttgttaccaagcactttccaggtgaatttgggagtgaaatcctagttcagaaagttgtccacactatattgcatcagactgccaaaaagaatcccgatgattatactcctgtaaatatagatggtgctcacgcccaaagagttggagatgttcaaggacaagaatcagagtctcagctcccaactaaaattattcttactggacagaaaacaaaaactttgcacaaggaggagttaaacatgagtaaaactgaaagaactattcaacagaatattacggaacaggcttctgtaatgcagaaacggaaaacagagaagttaaaacaagaacaaaaagggcaacccaggactgtttctcccagtaccattcgtgatggtccatcctctgcacctgctacacctaccaaggctccctattcaccgacaacttctaaggagaagaagatccgaatcacaactaatgatggacgacagtccatggttacccttaagtcttcaacaaccttttttgaacttcaggaaagtatagccagagaattcaacattcctccatatttacagtgtattcgatacgggtttcctcctaaagagttaatgccaccacaggcaggaatggaaaaggaaccagttcctttacagcatggcgacagaattacaatagaaattctaaaaagtaaagctgaaggtggtcagtctgctgcagcacactcagcccacactgtgaaacaagaagatattgctgttactggtaaactgtcatctaaggaacttcaggagcaagctgaaaaagaaatgtactccttgtgtcttttagcaacattaatgggagaagatgtatggtcttatgcaaagggacttcctcacatgtttcagcagggtggtgtattctacagtattatgaagaaaaccatgggtatggctgatggcaagcattgtacttttccacatctgcctggcaaaacctttgtctataatgcttctgaagatagactggaattgtgtgtggatgctgcaggacatttccccattggtcctgatgttgaagatttagttaaagaggctgtaagtcaggttcgagcagaggctactacaagaagtagggaatcaagtccctcacatgggctattaaaactaggtagtggtggagtagtgaaaaagaaatctgagcaacttcataacgtaactgcctttcagggaaaagggcattctttaggaactgcatctggtaacccacaccttgatccaagagctagggaaacttcagttgtaagaaagcataatacagggacagactttagtaatagttccactaaaacagagccttctgtattcacagcttcttctagtaatagtgagcttattcgaatagctcctggagtagtaacaatgagagacggcaggcagcttgatcctgatttggttgaggcccagcgaaaaaaattgcaggaaatggtttcttctattcaggcttcaatggacaggcaccttcgggatcaaagtacagagcagtcaccatctgatcttcctcaaaggaaaacagaagttgtgagttcttctgcaaagtctgggagtcttcagactggtttgcctgaatcttttcctttaactggtggtactgaaaatttgaatacagaaacaactgatggctgtgtagcagatgcactgggagcagcctttgccacaaggtcaaaagcacaaaggggaaattccgtggaggagcttgaagagatggatagtcaagatgctgagatgactaacacaactgagccaatggatcactcttgatttaattagaggctaataaaggcagaatgtttattgtgaatatgtaatatttgttggctgggccacgtaacttgattagtcattaaaaatcttgtacgtatataattcaaagattatatcttgttattcagtgcatgatagcaagtgtgtgattggccatagcttttaatatactgctgcccaggctggctctgaatttctataaattagctgttagatctgctgagatgactttcttccatatatgtggttcattggaagttctttgtaattttaattccatgaaagtcttaatgtttccaacatgaaaattctcttacttaaatacgtttgatttctgaaaagcctacaaatggaggggaaatgagattgtgctaatgttgatgtcatcaaggtaaccatctcatatactagtgtcaaaaggtttatgtaaacttgaattttatctgaactaaattgtatcttaaaattcatacaattatttattagacagtggaatgcaaatgtttctatgaacgtaaacacattcatagagatttcttggcgaaaatatcttgagaatagaatgtaacgatataacattttgctgatttgtgcaagattggggaaaaatttcttctagattgatgaggtcaatgtgattcagttgtgttgctgtctgagccacagccaattgtgtgtgctctattaatatgttaccattatttttgattcctggcttggtcaagaacaacctgatttttttttttttaatcttgcagaaaagttgattgcaaagtgtggtagaaaaagaaataatggtagcagtagagaatttataaataagagtttatctttatgaatgagttaattgttctacaattttgatcagtggtatttaagcctgtatatgctaagtgtatttatgcccctttgagccaaaatttttttttttttttcagaatccataagagtttatttgttggcttcacttgggtttagatgcaaattttactgcatcacaccctgatcagctgggtatttgcttagtgtattcatcaaatcttcagtgccagtttccttgagaagcagctttcatgcttattccttaaaaacaacagaagagtgtttatcctgagattggtattgcactattttattttattctgcaaatctgtatcctgaagtgtacatttcaacccatattcttctctgttcactgaaattaagttgaatttgaatggctgaaagacaaaatatatgttaatacaatctcttacctagagcattcaaagcctggctgtctctgtttgcacatgtaacagatgcagaactgtgtttgtaattctaagaaaatgtatgtcagaaagtattttatcagatgtttaaaaatctctgcctgttgattcataagggatatagacagtactttaacttgtgtttccagataaggcagattttggtcatctttctgtgaaagtatctctaactgaatccacttcttaaacaaactactctattttaaataaggaaagaatggagaatctagacattttacaggtgtatctgagcaaaatatatatttgggttagtttttatcacattatcacgtttgtctttatattttatcttcatcctaaattttctccctatcaaaacagcaggaaatttttaaacttttatattgtacactatttttgcataaaataagagctgtagctaccaaatactatttactacttagtaaaggtggcttctgtgtattaaactacgaattacaaatatcacttcactaaccactataattatttttggctttttcagccactggaactttttttggggggatttaaatacaggaaaactgtttaagcaaaaaatgcactgctttcatgtaaaatgatataatcttctttaacaaatattttcttcattgataactgacagatatctcatagcattaacataaaataccagaaacaaactttatctccctattcttacatttagtgcaaattggaatgcgtatgtgaatgttagaagatggacttaatctctgacaactttattaatttctctagctacagcaatgctatttaaaagccagttaggtatgaatagtacagtaatagtttgggttctcccttgataaatgaataaaaggctcaattctgataagtgatcaaatttcttgaaattctttcaaatcagctgaaaatttggttggggtgaattgatggtttttgagaagtaggccaggtatcctcacaaagaagttttagaatagggtttcttttaagtttttaaatatcatcctttgtctttccatatggttttcataaccaaatacatgactatagcatggttatttttctagtactgccatttgtgatatagccacatcttggcgtgcaagctagacatctcaggtaaatttgtttttttttttttttttagccctagaggtaacattataactaaaatgcattcctgcaattctgtttgcagtgcttcactaaacattgaaataaagttgtaaattttttcttcagtaatccattttatagttaatcataccaaatttaagttgatgacctaaagtccaggtagtgttgaagatagtatgtatctagaatactggtaatgagaaattgttgtaaattgaagaaaacaagatgctgccatatattaagatagaatataattaactccatgagaatggttactcaggaactagttaaagagcaaacccatttctcccgcttcactctgtttcagatatttttattggaaaatgttagggtagaggcctgagaaagttagcaaatgctattgactgatactggctctgtgtcttccagtgatttttagtttggtttttacagtcaagcctactgcttgcaattaagatatcaatctgaaatgcatctgtaattcctggccacaggtccttattgccattatttttaagtatcttcattggagatgaacactgacttttgcatatggtctcttacctcagggaagatcacttgctagcaactcatactactaatgacaggtttttgagaattgtactgacatcacatgttagctactaaatgcaaaatgtataaaagtattgttttatgtagttacctaccaatactatctgctactgaataactctctaaatatgtagacctcactaataactaacctttaggtaaaaaatttacttctgtcattaattacacttcaactggtcaatatagtggcagcataaagtgtttatttcagaatatcaatacagttttgtcttcatttttcaacagtaatttcaattggttcatacttaaaatactacacagattttgagttttatggttctcaaagcaaggtttccatcttaagatttttataaacacaaagcctttgcaaaattggattaaattccacctatcttaatgtgaattaaaaaccaccatttataataataatagcgccatattctaagttgagtaaatgcatcctaccattcaaggttatcatataatttaacaaaattgtacaaccttaaggctcttcacagtataaattaatttttcaaaccagagctgttcacatgaaaatattccttagtagaatgtatatttaagaaataaaacaacaaaggggaactatatcacccatgtaagttatagagttaattacaagttctaccattcttgataattctttgagatgctaagtgtttcagttcatatttaatgatacttaaatcgtgggaattttaatgtttgttccaaaatagcagaaattgtaaaaattatgaattattggagaaaatgccattacttgtatatctgacatttaattttttaattatggagactacatgcttttgtagtataatattaatgattattctcttgtaaaagaaaaggaaaaattagtaaagaaaaaagttttagttgatgttacctgcttgtgagtatcaattacttagtttttaaatttttaaggtattgcctacttttctttagaatgcagaaatctcgtcctgagcccttattatgcctgtggtagagcaatgcaagactgaaaaggttgccagtattttcaggcttatttgactaagaattagtgccaagaactggaaagtctactttttggagggaaatgatacttagaatttgtaaacataagcagtaatagtgtaaatatttagaaaaatagcaagtgctttaactgctcaataaaatagtatagatgttatttcacccttaaaaaaaaaaaaaaaaaa

SEQ ID NO: 30775 - DNA, 15229 bp, Homo Sapiens
ggctcctccatcgtgggtgccgaggcggcgatgggtgtcctcaaagtgtggctcgggctggccctagcgttggcggaatttgcagtattgcctcatcattccgaaggcgcttgtgtctatcagggttccttgttggcggatgccacaatttggaagcccgattcatgccagagctgccgttgccatggtgatattgttatctgcaaacctgctgtttgcagaaaccctcaatgtgcctttgagaagggagaagtgcttcaaatagctgccaaccaatgctgtcctgagtgtgttttgaggactccaggatcttgccatcatgaaaagaaaatccatgagcatgggacagaatgggcctcttctccatgtagtgtgtgctcttgcaatcatggggaagtccgatgtaccccccaaccatgcccaccgctgtcatgtggacaccaggagctggcattcatccctgaaggaagctgctgcccagtttgtgtgggccttgggaaaccctgttcctatgaaggccatgtgtttcaggatggggaggactggcggctgagccggtgtgccaaatgtctgtgtagaaatggggttgcccagtgcttcacagctcagtgtcagcctctattttgtaaccaggatgagactgtagtccgagtccctggaaaatgttgcccgcagtgctctgcaagatcctgctctgcagctggccaagtatacgagcatggtgagcagtggagcgaaaatgcctgcaccacgtgtatatgtgaccggggtgaggtcaggtgtcacaagcaggcctgcctgcccctgagatgcggaaagggtcagagcagggctcggcgtcatgggcaatgctgtgaggaatgtgtgtctcctgccgggagctgctcctatgatggagttgtgcggtaccaggacgaaatgtggaagggctcggcctgtgagttctgcatgtgtgatcatggccaagtgacctgccagactggagagtgtgccaaagtggagtgtgcccgggatgaagaattaattcacttagatggaaagtgttgtcctgaatgcatttcaaggaatggttattgtgtttatgaagaaactggagaatttatgtcatcaaatgctagtgaagttaaacgtattccagagggagagaagtgggaagatggcccttgcaaggtgtgtgagtgccgaggggctcaggtaacttgctacgagccctcttgcccaccatgtccagtgggcacactggccttagaggtgaagggacagtgctgtccagactgcacatcagttcattgccatccagattgtttgacatgctctcagtctccagaccactgtgacctctgccaagatcctaccaagttactgcagaatggatggtgtgtgcacagctgtggactgggtttttaccaagctggcagtctctgtttagcctgccagccccagtgctccacgtgtaccagtgggctggagtgctcatcctgccagcctcccctgctgatgcggcacgggcagtgtgtgcctacctgtggggacggcttctaccaagatcgccattcctgtgcagtctgccatgagtcctgtgcaggttgctggggcccaacggagaagcactgcttggcctgcagagatcccctccacgtgctgagagatggcggctgtgagagcagctgtggaaaaggcttctacaacaggcagggcacctgtagcgcttgtgaccaatcctgtgacagttgtggccccagtagccccaggtgtcttacctgtactgagaagacagtgctgcatgatgggaaatgcatgtctgaatgccctggcgggtactatgctgatgccactggcaggtgcaaagtttgtcataactcatgtgccagctgctctgggcccacaccctctcactgtacagcctgcagcccccccaaggctctgcgtcaaggccactgtctgccccgctgtggagagggtttctactctgaccacggagtctgcaaagcctgtcactcctcctgcctggcttgtatgggtcccgcaccctctcactgtactgggtgtaagaagccagaggaaggactgcaagtggagcagctgtctgacgtgggcatcccctctggcgagtgtctagcccagtgtagagcccatttttacttggagagcactggcatatgtgaagcttgccaccagtcctgtttcagatgtgcagggaaaagcccacataactgcacagactgtgggccttcccatgtgctgttggatgggcagtgcctctcccagtgcccagatggctactttcaccaggaaggtagttgcacagagtgtcacccaacctgcaggcagtgtcatgggccgttggagtctgactgcatctcctgttaccctcacatctctcttaccaatggtaactgcaggaccagctgcagggaagagcagttcctcaacctcgtgggatactgtgctgactgccatcacctgtgccagcactgtgcagctgatctccacaacactgggagcatctgcctcaggtgccagaatgcccactacctgctgctcggggaccactgtgttcctgactgcccttcaggatactatgcagagagaggagcttgtaaaaaatgccactcctcctgcagaacctgccagggcagaggacctttctcctgctcctcatgtgacaccaacctcgtgctgtcccacactggcacctgcagcaccacctgcttccctgggcactatcttgatgacaatcatgtttgccagccatgcaacacacactgtggaagctgtgattcacaggccagctgtacctcctgccgagatccaaacaaggttctgctctttggggaatgtcaatacgagagctgcgccccacagtactatcttgacttctccaccaacacgtgcaaagagtgtgattggagctgcagtgcatgcagtgggcccctgaaaacagactgcctgcagtgcatggatggctatgttctccaggatggggcctgcgtggagcagtgcttgtcatcattttaccaggactcgggcctctgcaagtgtgacagctactgtctccagtgccaaggtccccatgagtgtacccgctgcaaagggccatttctcctcttggaagcccagtgtgtccaggaatgtgggaaggggtactttgcagatcatgcaaagcacaaatgcacagcctgccctcaggggtgcttgcagtgcagccacagggaccgttgtcacctctgtgaccatgggttctttctgaagagtggcctctgtgtttacaactgtgttcctggcttttctgtccacacctctaatgaaacatgttctggcaaaatacacacccctagtcttcatgtgaatggttccctgatcctcccaattggttcaataaagccactggatttttccctcctgaatgtccaagaccaggagggtagggtcgaagatctcctatttcatgttgtgagcactcccaccaatggtcagctagtgctctcaagaaatggaaaagaggttcagctggacaaggctggccgttttagctggaaagatgtgaacgagaagaaagtgcgttttgtgcacagcaaagaaaaactcaggaaaggttaccttttcctgaaaattagtgaccagcagttcttctctgagccacagctgatcaacatacaagcattttcaacacaggccccctatgtgctgagaaatgaagttctccacattagcagaggagagagggcaaccatcaccacccagatgcttgacatccgagatgatgacaacccacaggatgtggtcattgaaataatcgatcctccacttcatggccaattgcttcagacacttcagtccccggcaacccctatctatcaattccagctggatgaactctctagaggccttctccactatgctcatgatggttcagacagcacatccgatgttgcagtcttgcaggccaatgatggacactccttccataatatactgttccaagtgaagaccgtgcctcagaatgacaggggtcttcagcttgtggctaattcgatggtgtgggttccagaaggggggatgctgcagatcaccaacagaatcttacaggccgaggctcctggtgccagtgctgaagaaatcatctacaagattacacaagactacccccagtttggggaggtggtccttctagtgaatatgcctgcagacagccctgcagatgaagggcagcacctgcctgatgggaggacagctacccccaccagcaccttcacccagcaggacatcaatgaaggcatcgtatggtacaggcactcaggagccccagcccagagcgactccttccgcttcgaggtgtccagtgcctccaatgcccagacccgcctggagagccacatgttcaacatcgcgatcttaccacagacacctgaagcacctaaagtgtctctggaagcatctctccatatgactgctagagaagatggcctgactgttattcagcctcattccctctccttcataaactctgagaagccaagtggaaagattgtctacaacatcactctacctctgcatccaaatcaaggtatcatcgagcaccgggaccaccctcactctcctatccggtatttcacgcaagaggatattaaccagggcaaagtcatgtaccgccctcccccggcagcaccccacctccaggagctcatggccttctcgttcgctggtctcccagaatcagtgaaattccacttcacagtttcagatggagaacacacaagtccggagatggtcctcaccattcacttacttcccagtgatcagcaactgccagtgttccaggtcacagctccacggctggcggtcagcccaggaggcagcacttctgtaggacttcaggtggtagtaagagatgctgagacagcgcccaaagaactcttctttgagcttcggagacctccacagcatggtgtgcttcttaagcatacagctgagttccgaaggccgatggccacaggtgacactttcacctatgaggatgttgagaaaaatgctctacagtatatacatgatggttcctctacccgggaagacagcatggagatctcagtcacagatggcctcacagtgacaatgctggaggtgagagtagaggtgtccctgtcagaagaccgagggcctcgactggctgctggctcctctctgagcattactgttgccagtaaaagcacagccataatcactaggtcacaccttgcttacgtggatgattcttcccccgacccagagatctggattcagttaaattatctgccctcatatggtactctcttaagaatctcaggatctgaggtggaagagctctcagaagtttccaatttcacaatggaagacatcaataacaagaaaatcagatactcagctgtgtttgaaactgatggtcatctggttactgatagcttctatttctctgtctctgacatggaccacaaccatctggataatcagatatttaccatcatgatcactcctgctgaaaatccacctccagtcattgcttttgctgaccttatcacggttgatgagggagggagagcaccactctcatttcaccatttttttgctactgatgatgatgacaacctccagagagatgccatcattaaactaagtgctctgcccaaatatggctgcattgagaacacaggaacaggtgatcgttttggccctgaaactgccagtgacctagaggcatcatttcctattcaagacgtcctggaaaactacatttactactttcagagtgttcatgaaagcattgagccaacccatgatatttttagtttttatgtgagtgatggaaccagtcgttcagaaattcacagcatcaatatcaccattgagaggaagaacgatgagcctcccaggatgaccttgcagcccctcagagtgcagctgagctcgggagtggtgataagcaattcttctttgagcctgcaagacctggacaccccagataatgagctcatttttgtattgacaaaaaagcctgaccacggtcatgtactctggaggcaaactgcttctgagcctctggagaatgggagagttttagtccagggctcaaccttcacctaccaggatatcctagctgggctggttgggtatgtgcctagtgtccctggcatggtcgtggatgagttccagttctccctcactgatggcctccacgtggacacagggaggatgaagatctacacagaactgcctgcaagtgacacacctcacttggctataaaccaaggcctacagctctcagcagggtctgtagcacgcatcacagaacagcacttgaaagtgacagatattgactcagatgaccatcaggttatgtacatcatgaaggaagatcctggtgcagggcgcctgcagatgatgaagcatggcaacctggagcaaatttctattaaaggccccatccgaagtttcacccaggcagacattagccaaggtcagccagaatatagtcatggaacaggagaacctggagggagctttgcttttaaatttgatgtggttgatggagaaggcaacagattgattgacaagtcattttccatcagcatttcagaagacaaatccccaccagtcatcaccaccaataaaggactggtcttggatgaaaactcagtgaagaaaatcaccaccctgcagctgtctgccactgaccaggacagtgggcctacagaattgatctacagaatcaccagacagccccagctgggccacttggaacatgcagcatcaccaggtatccagattagttcctttactcaagctgatctgacttcacgaaatgttcagtatgtccattctagtgaggctgagaaacattcagatgccttcagctttacactgtctgatggagtcagtgaggtgactcagactttccatatcactcttcaccctgtcgatgattcgctgcccgtcgtacagaacttaggaatgcgggtgcaggagggcatgaggaagaccatcacagagtttgagcttaaggcggtggatgctgacacagaggccgagtctgtcacattcaccatcgtgcagcctccacgccatggcaccatcgagcgaaccagcaatgggcagcatttccacctcacctccaccttcaccatgaaagatatctaccagaaccgggtcagctacagccatgacggcagtaactccctcaaggaccggttcaccttcactgtttctgatgggacaaaccccttctttatcattgaggaagggggaaaagagattatgacagcagcacctcagccgttccgagtagacatcctcccggtagatgatggcacgcctagaattgtcaccaacctgggactccagtggctggaatacatggatggcaaggcaaccaacctgatcaccaagaaggaactgctgaccatggacccagacaccgaggacgcgcagcttgtctatgagataacgacgggccctaagcatggctttgtggagaacaagctgcagcctggcagagctgctgccactttcacccaggaggatgtgaacttggggttgattcgttatgtgttgcacaaggagaagatccgtgagatgatggatagttttcagtttctggtgaaagacagtaaacccaatgtggtcagcgacaatgtcttccatatccagtggtcactcatcagctttaaatataccagctacaatgtcagtgagaaggcagggtctgtcagtgtcacggtgcagaggactgggaacctgaaccaatatgccatcgtcctgtgtcgcaccgagcaaggcaccgccagctccagctccagggtcagctcccaacctgggcaacaggactatgtagagtatgctggccaggtccagtttgatgagcgagaggacaccaagtcctgcaccattgtcatcaacgatgatgacgtgtttgaaaatgttgagagtttcactgtggagctcagcatgccagcttatgccctgttaggggaattcacccaggcgaaggtcattatcaacgataccgaggatgaacccacattagagtttgacaagaagatctactgggttaacgagagcgctggttttctgtttgcacctattgaaagaaaaggagatgcaagcagcattgtatctgcaatttgctacacagtccctaagtcagctatgggaagtagcctctatgctctagaatcaggctctgattttaaatctagagggatgtctgccgcgagtcgtgtgatattcgggcctggtgtgaccatgtccacctgtgatgtcatgcttattgatgacagcgagtatgaagaggaagaagagtttgagattgccttggcagatgcctctgacaatgcccgcattggaagggtggcgacagccaaggtgctcattagtggtcccaacgatgcctcgactgtgtccctgggcaacacggctttcactgtcagtgaggacgcaggcacagtaaagattccagttatccgccatggtactgacctctctactttcgcatctgtctggtgtgcaacgcggccctcagacccagcttctgccacaccaggagttgactacgttcccagctctcggaaggtggaatttgggcctggtgtcattgaacagtattgcaccttgactatcttggatgacactcagtatccggtaattgaaggactggagacatttgtggttttcctcagctcagcacaaggagccgaactgaccaaacccttccaggcagtcattgcaattaatgacacattccaagatgtgcccagcatgcagtttgccaaggatttgctcctagtgaaggagaaggagggtgtcctgcatgtccctatcactcggagcggagacctgagctatgagtcatcagtgaggtgctatactcagagccattccgctcaggtcatggaggactttgaggagagacaaaatgcagactcttcacggattacatttctcaaaggggacaaagtgaagaactgtacggtctatatccacgatgactccatgtttgagccagaggaacagttcagggtctacctcggccttcctcttggaaaccactggagtggagctagaattggaaagaataacatggccaccatcaccatatccaatgatgaagatgcccccaccattgagtttgaagaagctgcataccaagtccgggaacccgcaggcccagatgccattgcgattctgaacatcaaggtgatccgcagaggggatcagaacaggacctccaaggttcgctgcagcacgcgggatggctctgcccagtctggtgtggattattacccaaagagccgagtcttgaagttcagtcccggtgtggatcatatcttttttaaagttgagatcctgtccaatgaagaccgggaatggcatgaatctttctcactagtccttggcccagatgacccagtggaagcagttcttggggatgtgactactgccacggtgacaattctagaccaggaggcagcagggagcctcatattgccagcaccacccattgtggtcacacttgctgactatgaccatgtggaagaagttaccaaggaaggagtcaagaaatccccctccccaggctacccactggtctgtgtcaccccctgcgaccctcatttccccagatacgctgtcatgaaggagcgctgcagtgaggccggcatcaaccagacatctgtgcagttcagctgggaagtggctgcccccactgatggcaatggggcccggtctccctttgaaaccatcactgacaacacaccattcaccagtgtcaaccacatggtcctggacagcatttacttcagccggaggttccatgtgcgttgtgtggccaaggctgtggacaaggtgggccatgtggggacccccttaaggagcaacattgttaccattggaacagacagtgctatctgccacacaccagtggtggctgggacatccagaggcttccaggctcagtccttcatcgcaaccttgaaatacctggatgtcaaacataaggagcatccgaacagaatccacatttcggtgcagatcccacaccaggatggaatgctgccccttatctccaccatgccgttgcacaacttacattttctactgtctgagtccatctacagacaccagcacgtctgctccaatttagttaccacctatgacctgagaggcctggcagaggcagggttcctggatgatgtggtctatgatagcactgccctggggcctggctacgatcgccccttccagtttgaccccagcgtgcgagagccgaagaccatccagctctacaaacacctgaacctgaagagctgcgtgtggacctttgatgcttattatgacatgactgagctgattgacgtctgtgggggctctgtaaccgctgacttccaggtgagggactctgcccagtccttcttgacagtgcacgtgcctctatatgtgtcctacatctatgtgacagcccccaggggctgggcctccttggagcaccacaccgagatggagttttctttcttctatgacactgttctctggagaacaggaatccagacagacagcgtgctctctgcaaggcttcagataataagaatctacattcgagaggatggccgtcttgtcattgaattcaagacccatgccaaattcagaggacagtttgtgatggagcatcacactctcccagaagtgaaatctttcgtattgactccagaccacctaggaggaattgaatttgacttgcagctattatggagcgctcagacttttgattctccacatcaactctggagagccacaagctcttataacaggaaggactactcaggagagtacaccatctacctgatcccttgcacagtgcagcccacacagccatgggttgacccaggagagaagcctttggcctgcactgcacatgccccagaaagattcctgatacccattgcattccagcagaccaaccgccctgtgccagttgtgtattcacttaacactgaatttcagctctgcaataatgagaaggtgttcctaatggatcccaatacatctgatatgtcactagcagaaatggattacaaaggagccttttcaaaaggtcaaatcctttatggccgagtactttggaatccagaacaaaatcttaattctgcttacaaactccagctggagaaagtctatctttgtacgggcaaggatggttatgtgcctttctttgatcccacggggacaatctacaatgaagggccccagtatggatgcattcagccaaacaaacacctaaaacacagattcctgctgttggaccgcaatcagccagaggtaactgataagtacttccatgatgtgccttttgaggctcactttgcctctgagttgcctgatttccatgtggtcagtaacatgccaggtgtggatggatttactctaaaagtagatgcactctataaggtggaagcaggacaccagtggtatctccaggtcatctacatcattggccctgacaccatctcagggccccgggtccagcgctctctcacagctccactcagacgcaaccgaagggacctggtagagcccgatggccagctgatccttgatgattccctcatctatgacaatgaaggagaccaagtcaagaatggcaccaatatgaagtccctgaatctggagatgcaagagttggcggtagctgcgtccctgtcacagactggggcgtccattggcagtgccctggctgcaatcatgcttctacttctggtgtttttggtggcttgttttatcaacaggaaatgccagaaacagaggaagaagaagcccgcagaggacattttggaagaatatcctctgaataccaaggtagaagtgcccaagaggcacccggaccgggtggagaagaacgtgaatagacactactgcactgtgcggaacgtcaacatcctgagtgagcctgaggcggcttacacgttcaaaggtgctaaagtcaaaagactgaatctagaagtcagagttcacaacaatttacaagatggaacagaagtttaatggaggagacctatgtgtatttttttctaaaatcatttttataaaatggggggaaatactggtatttttataatctcgcagataaaaaagggaaaactatagctttgagtggcagacagcacacatcacatgcatcaactcacaactgagctacctcattcagcaaagaaccactgagaaccccagagtattacagttatttccgtagatccctttaatagtgtcaacaactgtacacagctccttctgtaaggctggtcttagaaaacaagtactttagtatcaggacaggagttgaacaattaggttagcagatggagatgagaggactgggtagagtaccatggcagatctcagagagaagaagtaggtacgggcctttggttccctcccccagccccagctttctcctacagggcttttcctgagtccccagacagcagagtatgaactgctgacacccagattccattaaaaattctgctaatcgacacaacacatatatttgctcatgatttcacttgacagcgtatgctccttggcctctaattgtactttgcttttccagagccctttttacctggggatttcagtgtgcttaagtaaaatcctctgaaaaccacgggagcctctgcctcctcagccacagagaactccctcctacaaagggggagactgaaacccgagttaaggaggggcctggcaggcgtatcagagcacattagtgatgcccttcaccccagggaggtgtctgttcccaactagtttatgtggcactgagacatccatccctgaccaaggatgctgcgaaacaggatcaatgtactacggccttttaattcaacattgccataaatgctttaaagaaaacccaccacactttcctcctactccggtctttgcccgttcctgtaacagacaatcccatgtcctaggtatggttttttattctgttagtgcttcgggaaagtaagtgattcatttgaataaggcaaattaggagaaagcccaggttggggtgaaatcagacttaacagatacatgctggttctccttgctgtgtgtgacacagcagacagaggcactattcctggtgcagtatttcagggatttctctttgaggggttcttttctggtagctcaggcaattatttttaccatatcagcacatgacaaggccatgaacacatggctctaaaataatttagtgttcaagtatcagcttaactattttgtgtaggctacacacagcttgcttttgtttctcttctgtttctgccttattggcggaaacataagcgtgcatgccatgttgttttgaattggaggcacaatttcattattcgagagtaaaagacatgtcctcttctgatgcatggcacaccatagtcaccaagcaaataacagagccttcacattgtgtaatatttgtatgagaatgactcaagctctttgagaacattccaaactagtaacatttcgctactaaaagctagaaaggatgaactgtgaaaggttctaggcagctctgtgagactccaagctccttgaaagtaggacctttgtgagccacgcctttcattcttcaacagtgccttgcatgtaacaagcactccagaaatgtttgttgaatgaatgaatggtgtcatgggtgaatgatggggagtaaatttaggaaggggaagtgagagagtatggtggcaatatcacaagggaggagagaggaaaacaattatcttctctacttggattatgagataaccttttcttggaggaaagaaacaccgctttacaaaggcatgactctggcggtggtcctaaggaagcatgagcagaaaattcataaaaatgtatcatcagcaggagatgagactatgaattggcatccagaacaggagatttagagcaaaatctaatttagcattctgagatgagtgtcaggttttcaggagagaatgagttggggtgagcccagagtctgaaactcctgactggtcaggtgctacttaagaccagcttgggcaattcagggcagaactcctgtatcagcctcatggacacccagaattggtatctcatggctggagagctgatcagccaggcacagaatctccagaacaacctagagagtgaatgctaatttgtagagcgaacttccatttggcccattatttgtaactgtgtaactgctccaagtgccagaatgcttacacgttaaagcagcacctttccatttgcccacatattcttcttgcacaccccttccattactgctgaataggacattgcatgggaagagtacagaggtggcagaatgaagctagagtgggaaggactaaagactgagccccagagtgctcccagcaaccgccacgtacaaggtctgaaatgacaagggcaagagtgagataggaaactgtgtgtgaaaggaaagcccttgcagtatttctgcctccctttctttctgcctttcaccccactaaatgtatgttattgaatgccagtacttctctagtggatgcacacttgttaaatagtgttaagagatgtggagatgagatatacccctttgatgtagaattattcatttggtttgtttcatacttcattataggaatcaagtaatttgatgactaatgtggattatatttcagtcaaagctctgctttcaatttctctgatttgctcactaatgccttgtgtgtgttttactaaccttttatatcttgccttcaagtgagaaggaacaaacaactctcagtggttactacttgcttttatatgctggctgtgaaggttaaaagaaagaatggtctgtaccattctgctttgctgcccttttattgtaccccaggcctcctagaggactcctgcagattctattgttgggtgggaaatagtgttggaatgtgtttgcacagtcttatgatattcagtctcagtctgctataggtatttgttattcttggatactacacacctgctcagactgagtaaacatttgtggtgctgtcaacctgatttcttgactctcaaatgatttttgtatttccaatatgaatttgtgtgttatgaatttctgatttctccaatagtatatgccactatataaatttgtattaataaatgacagtcttgttggttaaaaaaaaaaaaaaaaaaa

SEQ ID NO: 30776 - DNA, 2697 bp, Homo Sapiens
atataaaggcgccgccgtccttgcccccaggactcggccccatggggacgccgccggccgccgctggcgcatggcgggtaggagctgtggcgcggggccttccaggagtctgagctatgagtggcccctgtggagagaagcctgtcctggaagccagccccaccatgagtctgtgggaatttgaggacagccacagccgtcagggcaccccaaggccgggtcaagagctggccgctgaggaggcctcggccctggaactgcagatgaaggtggacttcttccggaagctgggctattcatccacggagatccacagcgtcctgcagaagctgggcgtccaggcagacaccaacacggtgctgggtgagctggtgaaacacgggacagccaccgagcgggagcgccagacctcaccggacccctgccctcagctccctctagtcccgcggggtggtggcacccctaaggctcccaacctggagcctccactcccagaagaggaaaaggagggcagcgacctgagaccagtggtcatcgatgggagcaacgtggccatgagccatgggaacaaggaggtcttctcctgccggggcatcctgctggcagtgaactggtttctggagcggggccacacagacatcacagtgtttgtgccatcctggaggaaggagcagcctcggcccgacgtgcccatcacagaccagcacatcctgcgggaactggagaagaagaagatcctggtgttcacaccatcacgacgcgtgggtggcaagcgggtggtgtgctatgacgacagattcattgtgaagctggcctacgagtctgacgggatcgtggtttccaacgacacataccgtgacctccaaggcgagcggcaggagtggaagcgcttcatcgaggagcggctgctcatgtactccttcgtcaatgacaagtttatgccccctgatgacccactgggccggcacgggcccagcctggacaacttcctgcgtaagaagccactcactttggagcacaggaagcagccgtgtccctatggaaggaaatgcacctatgggatcaagtgccgattcttccacccagagcggccaagctgcccccagcgctctgtggcagatgagctccgtgccaatgctctcctctcaccccccagagccccaagcaaggacaaaaatggccggcggccttcaccttcatcccagtccagctctctgctaacagagagtgagcagtgcagcctggatgggaagaagctgggggcccaggcatccccagggtcccgccaagagggtctaacacagacctatgccccatcaggcaggagcctcgcacctagcgggggcagtggcagcagctttgggcccacagactggctcccacagacgctggactcactcccgtacgtctcccaggattgcctggactcgggcattggctccctggagagccagatgtcggaactttggggggttcgaggaggaggccctggtgagccgggcccaccccgagccccttacacgggctacagtccctatggatctgagctcccagccaccgcagccttctctgcctttggccgggccatgggtgctggccacttcagtgtccctgccgactacccacccgcgccccctgcctttccacctcgagagtactggtctgaaccatacccactgcccccacccacatcagtccttcaggagcccccagtgcagagcccaggggctggcaggagcccgtggggcagggcagacagcctggccaaggagcaggccagcgtgtatactaagctgtgtggtgtgtttcccccgcacctggtggaggctgtgatggggcgcttcccacagctcctggacccccagcagctggctgccgagatcctctcctacaagtcccagcaccccagtgagtaagctgcctgtggctggcaagggcagcacccccagcctccaagggccgtcaggctgggctttgggccattgagcagcccattcccagccctgaggcccaccccagaggctggacagagggaggattcaagtcgggaaggaaacccacaaaccaaagatactgtaggattggttctggcccatgcagcacctctagctgtctgcctcagtgggtcagaagcgatcaccctgttgatacacattgtatctctgtagtttaaggagacgctgccggtaacggcgtcggtccgtggctgaggcccaaaccgtcttttctctcagagggtggggagggaggtgggggcagcagaggcctgggctgggtgccctgtgcacgccaccccacttccgccctacccctgggacgttggccttggctggctagttgggcaccgtgtgcctgccctccaagggcctcctctacgccaatgaggcctcatctgtgctctcgctgggcacgtggcttcatgtcagtaagcaagatgcttcttaataacccaccttctgccccactctattccttatcctgctgcccctgtaggggtcaagggccctccgtctacaccctcttcttctcctccatcctttattcagagtcatctcgcccttccccatgggtgggggaacctgtgtttgtttgtgtgcacatgtaaattttaaatattttaagcagaaagtccttacctcctgtaacacatcaataaagtacaatcattgtgagccctttcaaaaaaaaaaaaaaaaa

SEQ ID NO: 30777 - DNA, 3755 bp, Homo Sapiens
ggcgcttccggcagcggcggcggtggtgaaggccgatgctgtgggggtgggcgtggagagaattcttctgtgggtcctctggtgttgagtggtcggcttggtgtggtgtgcggaggagctccaggcccgtcggcgcggagtggtctcacgtgtgaaacatggctacagattggctgggaagtattgtgtccatcaattgtggagatagcttgggtgtctatcagggaagagtgtcagctgtggatcaggtcagccagaccatttctctcacccggcctttccataatggagtgaagtgtcttgttccagaagtcaccttcagggcaggtgacattacggagttaaaaattctggagataccaggacctggagacaaccaacattttggagaccttcatcaaacagaattaggcccctctggtgctggctgccaagtgggcatcaatcagaatggcacaggcaagtttgtcaagaagccagcctcttccagcagtgcccctcagaatatccctaagaggacagatgtgaagagccaggatgttgccgtttccccgcagcagcaacagtgctcaaagagctatgtcgacaggcacatggaatccttgagtcagtccaaaagtttccgtcgtcggcacaactcctggtcatctagtagcaggcacccaaatcaggcaactcccaagaaaagtggtttaaagaatggccagatgaagaataaagatgacgagtgcttcggggatgatattgaggagatcccagacacagattttgattttgaagggaacctggctctttttgacaaggcagctgtgtttgaggagattgatacctatgaaaggagaagtggtacccgttcccggggcatcccaaatgaaaggcccactcggtaccgccatgatgagaacatcttggagtccgagcccattgtctatcgacggatcatagtgccccacaacgtgagcaaggagttctgcacggactctggcctggttgtcccaagtatttcctatgagctgcataaaaagctgttgtccgtggctgagaagcatgggctgacccttgagcggagactggagatgacaggtgtgtgtgccagtcagatggcactgaccctcctcggaggacctaacaggttgaatcccaaaaatgttcaccagaggcctacagtggctctactgtgtggacctcatgtgaagggggctcagggtatcagctgtggaaggcacctagccaaccatgatgtccaggtcatccttttcctgcccaattttgtcaagatgttggaatctatcaccaatgagctgtcgctcttcagcaagacccaaggccaacaagtgtctagcctcaaagatctgcccactagccctgtggacctggtcatcaactgcctggattgccctgagaacgtcttcctgcgcgatcaaccctggtacaaggcagctgtggcctgggccaaccagaaccgggcaccagtactcagcatagaccctcctgtgcatgaagtcgaacagggcattgatgccaaatggtcactggcactgggcctgcctctgccactgggggagcacgcaggccgtatctatttgtgcgacattggcattccccagcaggtcttccaggaggtgggcatcaactaccactcgccctttggctgcaagtttgttatcccactgcactctgcttagagggttcctgcgcaggcaggactctgctgtcccctgctgctcctgataacaaacgccttaaggatatgaagcttcatggaccttgttaaagttttttctcttttgggtttgtttcttctgtgagagaacagaacttacttaaaactgacctgtcacttgctcttagccagggaagtctttcccactgggttccgggctgggtggcaggctgagcgtgcagcaactccaggcatctctaccctcagccccctgcacggccaggtgggcctttgtttacagccgtaggcagctctcaagactgtgtttcaggtttacagccactgggcctgggcacacacattgaagagtgggccaggtcctgtctgggggcctgtacctgctctatttcagagcttgtggctttgtgtctcccctgctttccccacgcagacagcccttcctctgtagaaccagctgcacggcagctgtccaccagagggcagacctgcactctccattcatgtccagggctgtgacagaccaggccttcccctagccccacaagttgatttggggggttttgacccttactcctgagctgatccaagttttatgctgatttttccaaggatctctccctccttttccctccatcactcagaggtagggaagggggcggcattaggatggtgttactgtattgggattttatgttgttctgtcgtcttcagcacaggtagtataaggttatattactgtagaaccacagtgcccatcttgccagcagtgcccgcccccaccctcaaagctgagcaggttgagcctttgcctagtctggggccagacccctcagatggggatatccctgggggagcctggtgctgaaccagaagaggcttcctggtgcttctgtcctaggccaccactcctccagccctttgcccgcacatacatgccccacctactctttcatcccctctgcccttcccctgaaacggtcctttgcagctgtcatcccagagcaggcagatgggctcccgtgcttgagctccaccccagctcttacatcatctgggctttgaaccttttacatttgtccagtctagatgagtaggcttggggccagcaccctgtctcaaagatggcaaaatgaggctagttctggatgagctagctggtgtgggttccaaccataggaacacactgatgctcaaatcctaaggtgccaagctctaggccctggaggctggtagaacaggatctatgcctggaatcctggcagggattcctgtcaaggacttgtgtttaagcctgcttcagggcttcaggctgcttctgctctgtgtctgcccaggctggctgagcgggtggatgggtggacagaagggctcaccaaggattgtggacatagggtaggccctggtaccacgggtttcaggctgttatcacttcccttgtaggaacatagccagaagcagatgagccagggtagagggctggcccctcctctcatcttcccttcagtcttaaattgtctccagcgatgggaagaggccagggactgtaacccttgtgctgtgtattctctgagcctctgctcactctcagggccaagcagctcccaagccggggccctctcttggccaaaatctgaggagcagtctaggttacaggctttttggtaggtaggttctggctgcctgttaatgcagttaggccccctgattaggtacagtgagaaacaagctagaacaaccctggcccagaagactgtccactccagcaagatccagggatgatagccttgcagggccactgggagtttgtgcccaagcttctccctcttctctccccagggggcactgggactggtccctgccctcatccttagcctgggccttccccagaggtattaaagagaagtatgattcctctgtcttcagttcttttcaggggcatcctgcccatagtacccagttcccaaggggcccccagtcacgtggtgaagcctagcactcatgcagctcttagggaaccaaaaaccagcactgaaataaagctgaatgactgactgaaaaaaaaaaaaaaaaa

SEQ ID NO: 30778 - DNA, 2486 bp, Homo Sapiens
acactgcctcggttcggcaagtgggtcagttggctggggctcacttggcaacgggacgcgggaacgaggggcgcggacgcaggcccgggaggacgcggcggcgggaacctgggggcgcagggctagggcagcgggcccgacccgcacggctttcctggaaagcgctgcccctcgccgcggcgatgacctcgctgtggagagaaatcctcttggagtcgctgctgggatgtgtttcttggtctctctaccatgacctgggaccgatgatctattactttcctttgcaaacactagaactcactgggcttgaaggttttagtatagcatttctttctccaatattcctaacaattactcctttctggaaattggttaacaagaagtggatgctaaccctgctgaggataatcactattggcagcatagcctccttccaggctccaaatgccaaacttcgactgatggttcttgcgcttggggtgtcttcctcactgatagtgcaagctgtgacttggtggtcaggaagtcatttgcaaaggtacctcagaatttggggattcattttaggacagattgttcttgttgttctacgcatatggtatacttcactaaacccaatctggagttatcagatgtccaacaaagtgatactgacattaagtgccatagccacacttgatcgtattggcacagatggtgactgcagtaaacctgaagaaaagaagactggtgaggtagccacggggatggcctctagacccaactggctgctggcaggggctgcttttggtagccttgtgttcctcacccactgggtttttggagaagtctctcttgtttccagatgggcagtgagtgggcatccacatccagggccagatcctaacccatttggaggtgcagtactgctgtgcttggcaagtggattgatgcttccatcttgtttgtggtttcgtggtactggtttgatctggtgggttacaggaacagcttcagctgcggggctcctttacctgcacacatgggcagctgctgtgtctggctgtgtcttcgccatctttactgcatccatgtggccccaaacacttggacaccttattaactcagggacaaaccctgggaaaaccatgaccattgccatgatattttatcttctagaaatatttttctgtgcctggtgcacagcttttaagtttgtcccaggaggtgtctacgctagagaaagatcagatgtgcttttggggacaatgatgttaattatcgggctgaatatgctatttggtcctaagaaaaaccttgatttgcttcttcaaacaaaaaacagttctaaagtgcttttcagaaagagtgaaaaatacatgaaactttttctgtggctgcttgttggtgtgggattgttgggattaggactacggcataaagcctatgagagaaaactgggcaaagtggcaccaaccaaagaggtctctgctgccatctggcctttcaggtttggatatgacaatgaagggtggtctagtctagaaagatcagctcacctgctcaatgaaacaggtgcagatttcataacaattttggagagtgatgcttctaagccctatatggggaacaatgacttaaccatgtggctaggggaaaagttgggtttctatacagactttggtccaagcacaaggtatcacacttgggggattatggctttgtcaagatacccaattgtgaaatctgagcatcaccttcttccgtcaccagagggcgagatcgcaccagccatcacattgaccgttaacatttcgggcaagctggtggattttgtcgtgacacactttgggaaccacgaagatgacctcgacaggaaactgcaggctattgctgtttcaaaactactgaaaagtagctctaatcaagtgatatttctgggatatatcacttcagcacctggctccagagattatctacagctcactgaacatggcaatgtgaaggatatcgacagcactgatcatgacagatggtgtgaatacattatgtatcgagggctgatcaggttgggttatgcaagaatctcccatgctgaactgagtgattcagaaattcagatggcaaaatttaggatccctgatgaccccactaattatagagacaaccagaaagtggtcatagaccacagagaagtttctgagaaaattcattttaatcccagatttggatcctacaaagaaggacacaattatgaaaacaaccataattttcatatgaatactcccaaatactttttatgaaacatttaaaacaagaagttattggctgggaaaatctaagaaaaaaagtatgtaagataaaaagaagagattaatgaaagtgggaaaatacacatgaagaacctcaacttaaaaaacacatggtatctatgcagtgggaaattacctccatttgtaaactatgttgcttaataaaaacatttctctaaaaaaaaaaaaaaaaaa

SEQ ID NO: 30779 - DNA, 5879 bp, Homo Sapiens
cgccagggctgcgtaggcttgtggcgcgcccgcggagaggccggggctctgacgcccgctctgcggcttcggtgtttgaacaggccacagtccaggagcgcttacattcaggagctccgcgtagcacctgcccaaccaaactcagccctccgttaagatcctggttccatgccgcagtaggacagcaggcccaagtctgcacatcccagtgatgcaccatgccaatagtggataagttgaaggaggccctgaaacccggccgcaaggactcggctgatgatggagaactggggaagcttcttgcctcctctgccaagaaggtccttttacagaaaatcgagttcgagccagccagcaagagcttctcctaccagctggaggccttaaagagcaaatatgtgttgctcaaccccaaaacagagggagctagtcgccacaagagtggagatgacccaccggccaggagacagggcagtgagcacacgtatgagagctgtggtgacggagtcccagccccgcagaaagtgcttttccccacggagcgactgtctctgaggtgggagcgggtcttccgcgtgggcgcaggactccacaaccttggcaacacctgctttctcaatgccaccatccagtgcttgacctacacaccacctctagccaactacctgctctccaaggagcatgctcgcagctgccaccagggaagcttctgcatgctgtgtgtcatgcagaaccacattgtccaggccttcgccaacagcggcaacgccatcaagcccgtctccttcatccgagacctgaaaaagatcgcccgacacttccgctttgggaaccaggaggacgcgcatgagttcctgcggtacaccatcgacgccatgcagaaagcctgcctgaatggctgtgccaagttggatcgtcaaacgcaggctactaccttggtccatcaaatttttggagggtatctcagatcacgcgtgaagtgctccgtgtgcaagagcgtctcggacacctacgacccctacttggacgtcgcgctggagatccggcaagctgcgaatattgtgcgtgctctggaactttttgtgaaagcagatgtcctgagtggagagaatgcctacatgtgtgctaaatgcaagaagaaggttccagccagcaagcgcttcaccatccacagaacatccaacgtcttaaccctttccctcaagcgttttgccaacttcagcggggggaagatcaccaaggatgtaggctatccggaattcctcaacatacgtccgtatatgtcccagaataatggtgatcctgtcatgtatggactctatgctgtcctggtgcactcgggctacagctgccatgccgggcactattactgctacgtgaaggcaagcaatggacagtggtaccagatgaatgattccttggtccattccagcaacgtcaaggtggttctgaaccagcaggcctacgtgctgttctatctgcgaattccaggctctaagaaaagtcccgagggcctcatctccaggacaggctcctcctcccttcccggccgcccgagtgtgattccagatcactccaagaagaacatcggcaatgggattatttcctccccactgactggaaagcgacaagactctgggacgatgaagaagccgcacaccactgaagagattggtgtgcccatatccaggaatggctccaccctgggcctgaagtcccagaacggctgcattcctccaaagctgccctcggggtccccttcccccaaactctcccagacacccacacacatgccaaccatcctagacgaccctggaaagaaggtgaagaagccagctcctccacagcacttttcccccagaactgctcaggggctgcctgggaccagcaactcgaatagcagcagatctgggagccaaaggcagggctcctgggacagcagggatgttgtcctctctacctcacctaagctcctggctacagccactgccaacgggcatgggctgaaggggaacgacgagagcgctggcctcgacaggaggggctccagcagctccagcccagagcactcggccagcagcgactccaccaaggccccccagacccccaggagtggagcggcccatctctgcgattctcaggaaacgaactgttccaccgctggccactccaaaacgccgccaagtggagcagattctaagacggtgaagctgaagtcccctgtcctgagcaacaccaccactgagcctgcaagcaccatgtctcctccaccagccaaaaaactggccctttctgccaagaaggccagcaccctgtggagggcgaccggcaatgacctccgtccacctcccccctcaccatcctccgacctcacccaccccatgaaaacctctcaccccgtcgttgcctccacttggcccgtccatagagccagggctgtgtcacctgctccccaatcatccagccgcctgcaaccccccttcagcccccaccccacattgctgtccagtacccccaagcccccagggacgtcagaaccacggagctgctcctccatctcgacggcgctgcctcaggtcaacgaggaccttgtgtcccttccacaccagttgccagaggccagtgagcccccccggagcccctctgagaagaggaaaaagacctttgtgggagagccgcagaggctgggctcagagacgtgcctcccacagcacatcagggaggccactgcggctccccacgggaagaggaagaggaagaagaagaagcgcccggaggacacagctgccagcgccctgcaggaggggcagacacagagacagcctgggagccccatgtacaggagggagggccaggcacagctgcccgctgtcagacggcaggaagatggcacacagccacaggtgaatggccagcaggtgggatgtgttacggacggccaccacgcgagcagcaggaagcggaggaggaaaggagcagaaggtcttggtgaagaaggcggcctgcaccaggacccacttcggcacagctgctctcccatgggtgatggtgatccagaggccatggaagagtctccaaggaaaaagaaaaaaagaaagcaggagacacagcgggcagtagaagaggatgggcatctcaaatgcccaaggagtgccaagccccaagatgctgttgtccccgagtccagcagctgcgcaccatccgcgaatggctggtgtcctggggaccgcatggggctgagccaggcccctcctgtgtcttggaatggagagcgggagtctgatgtggtccaggaactgctcaaatactcatctgataaagcttacgggagaaaagttctgacctgggatggcaagatgtcggcggtcagtcaggatgctattgaagacagcagacaggcccggactgagaccgtggttgatgactgggacgaagagtttgaccgagggaaggaaaagaaaattaaaaaatttaagagagagaagaggagaaacttcaacgccttccagaaacttcagactcgacggaacttctggtctgtgactcacccagcaaaggctgccagcctcagctatcgccgctgactgtgcccctgtggaaggaggtcggttccgagggggtgggtgtaagggtgaggtgggggtgtgtgtgccgtgtatgtgtgtaggggtgtggtggggtgtggcgtgtgtgtatgatgtatgtgggctgtgtatctggcacatgtgtgttgggtggtgtgtgtggtgtgggcgcgtctgtggtgtgtgtcctagtcacttggagaagggtgtgtgtgggatgcgtgtgtataagggggtgtgtgtgggatgcgtgtgtataagggggtgtgtgtagtgtgtgttgggtgtggggtgtgtacacctggcatctgtggcatgtgttctggtcacttggagaagggcatgtgtggggtgtgtgtgggatgtgggttgtgtgtatatctggcatgtgtcccagtcacttgcagaagggtgacttcttgccagccgcatcgagatgccatgcattgggttcctaggttggactcatacccgagggtggcagtgggaagattcgggtctcgtttctctctgtcaggactaccgtggtttgttctgcagcctcctggagacaaggcgtcccttcccgggagctgtcggtctggatctgagggagctctctgtgtgggctctgctgtgctgggagcctgtcacggtaggagctctcccggtaccagtgtccacagaccgcccaacatagaggctttgaggcttctctagatcggaacctctttggtgacattcccgaccagccctgcaagagaaacgacagtgtgtgtgtgagcagaggtggctgcacacctgctggacatctttgccaggctgtgccttctcatgtttcatagacagtggtctgtgctggcagaggctgctgcccctggttggggctatcaggagagtgggggatggtggccacatgtcctccaggtggtctcccggtgcatagctggtggctctgggcaagccatcccttgcttctcggggctgacgccaccgttgtgtccgagcccgccctcccctgcttcctcagcgggaccccttcatctgttggccttacctgtcctcagaaaggaagaggtgaccccacccagccacctctcccttttatggaactcgagagggtggccctactgtgcaccccttccttgtgagtagctctcaactgtcctggagagcagaggctatttggggtcggaggagccctcgatacctgcgaatacatctgctttccaggctgctgtttattctgagacgactgtgctgtagcttcccttgcagctgcaataacccgcaggtcttcactgaggtggaggctttggggtagaattctccatttattttactacttaatacaaaacatttatttttgaccagtcctgtggcttccattagcaatatgtttcctttcccaaatatgcaaatagtggctttgtttgctcaattttgtgagtgctttggaatttaaatgattgtataactcaagaagattacttttctatgttgctcaagctgtgcctgccaacttgtaacttaataaatacaggaaatcctcagagaaggtgatattttcaggaaaaagacaaatgccctcatagtagtgggaagtgtgaaggtgaccgtgaacatccttcctcatcgggtctgtccccgtcatttcctcccggagtcgtcgcaggtggagatggacaacgtggtgttggacttagacctccttcagtgtggctctgctgggccagaggcatcctgctgtcccgggtggctgcctcgctgtctgcaccccctctccctggggcagctttgcttcctgcccctgtgctcggggcctgggtggttactggcgtgtagatggaattgcttttttaatatgggaagatacatttatttttttccatgtgggtgggtgtctctttttggattttcttctgtttttacgtttctcttcttagaagggtgggagagaatcaagctcctgtggccacctgtgtcccagcagcagtgagtggagctgctcagggtgccctctcctgcggaccagtctctgaatgttcaaagatgagggcctggcttccgtgctctggctttgtaacttatctggaagggaaagcacatgccttcacgggcaggatgatcaagcggtgctgattcacgagagtggaagcctccagagcttggggctttctggctgctcttcattgacctgtgtgttcccagcacacgaacagcgcccctaacggagatttgttcagcgactgaatatacacctgtaaacgagtagcatgtatacattgattttgattacaaatggttctgtattat

SEQ ID NO: 30780 - DNA, 5879 bp, Homo Sapiens; identical to SEQ ID NO: 30779

SEQ ID NO: 30781 - DNA, 1921 bp, Homo Sapiens
ctgtatggccacaccctcacccctgagcagcccggggggccacagcaagaggtacacatgctgtggacaccagcacccccagacctgacccttggggaaggtgaggaggctaggacgtgggacttcctgacagcagtgggcggcagccaggctgaggctcaggcctgcctcactgaggccctgcagctgcaggccaggggagctctgtatacggctcacgcacaggcctgggcccagctctgggtagaatgtggcttggacgtggtggggcccctgcagctgcgccaggccctgcgtggctccctctactacctgctcagtgccctgccccagcccaaggccccaggatacatctgccatggcctcagtcctgggggcctctccaatgggagccgtgaggaatgctactggggccacgtcttctgggaccaggacctctggatgttcccgagtatcctgatgttccacccagaagccgccagggccatcctggagtaccgcatccgcacgctggacggggccctggagaacgcccagaacctgggctaccagggagccaagtttgcctgggagagtgcagactccggcctagaggtttgccctgaggacatttacggagtccaggaggtccacgtcaacggggccgtggtgttggccttcgagctgtactaccataccacccaggacctgcagctatttcgagaggctggtggctgggacgtggtcagggctgtggccgagttttggtgcagtcgtgttgagtggagccccagggaggaaaagtaccacctgaggggagtcatgtcccccgacgagtaccactcaggggtcaacaactctgtgtacaccaacgtcctggtccagaacagcctgcgctttgctgctgccctggcccaggacctgggtcttcccatccccagccagtggctggcggtggctgacaagatcaaggtaccctttgacgtggagcagaacttccacccgaagttccagctccgagttccctgggaggactttttcagatgttagggacccgctccagagccccctctgggtcaccctgggttcctccagccaggctctcagggaaggtccatgctgcttggcctgagttcaaggctttctgcctgtagcctggactcccgtggacccccgtgggcaggtggcttccccgtggcatctccacaccgcctctgcctgcccctgtggactgatgctatcgcgcacggtcccacgaccccaccccgagctcctgaagccggggtctgagcctgcatcacctctggcctctcatcccccactctcctgagagcagtggtcacagcggccggccgctctgctgagaaggcagagaggcaggctcaggcctcagcgtggacagcagggataaggggcacgaaggacggggactcggccccttcagaattcctcaggactctcaggtgcagctttgccaaaaaggaacttttcatgtcatgcagttgaggggacttagtctcaatcccaggctcctcttgactctgggcagctttaatcaggttgggcagcctctgctacagcgtggagtgggatggctctcttccctcagccacgccgcttgtgaggacagaggtgggggagtgggaagtgggaagtcaccagagaacaggagagggatttgagggcgagaccccagcgctctccacggaccagccagagggactggagccaggtgtgcatgggtccaaggccctggccctgcccagcctctgtcttgggagctcagccccagggttcggtcgtcagcagtttcccaagaacaagatgtgatggcatctgctgctgaaaccctgatgaggaccaggccccctgcaccgctgtcagcctgaggaattaaagctttggtgctgggaagagcaaaaaaaaaaaaaaaaaaaaaaaa

SEQ ID NO: 30782 - DNA, 2068 bp, Homo Sapiens
aaactgccgcgccgccctgctccgggtttgtcttcctccctccgtttctccttccgctgtatctagcatttcggttcctggaaaggttaccggagctgcgattggggctgggaccaaagttgagtcctggaaagggagcctggagagcggcggtgctgggaggcccggccagctcgatcgcaggcttccacctggcggccaatgcttgtttgctactgatgggtgtgagcaagttagatattctataccggagacttctcctaacaaaactttttatcagaggatggggaaggccagaagatctcaaaagactctttgaattcagaaagatgattggaaatcgggaaagatgccagaatctggtttcaagcgattatccagtacacattgataagattgaagagcaatcagattgtaagatcctagatggacactttgtttcccccatggctcactatgtgcctgatatcatgccaattgaatctgttattgcaaggttccaatttattgtgcctaaagaatggaacagcaaatatagacctgtatgcattcatcttgctggaacaggagatcatcattactggaggcgacgaacactaatggcccgtcctatgattaaagaagcccgaatggcttctttattgttagaaaacccttattatggctgcaggaaacccaaggaccaagtatggcttccttagcggtatccaactggcctaagcccatgccattgattccatgcctgtcttggtccacagcatctggggtcttcactacgggtgtgttgagtaaaccaattaattggagggagctggaaaagcaatattatacccagacagtttatgaagaagaaattattcacatgcttgaatactgtggaacagattctttcaaaatgggacaagagtttgtgaaacacttcactagcagtgcagacaagctaactaaccttaatctggtttccagaactttaaatttagatatatcaaaccaagttgtatcccaaaaacctgctgactgccataattctagcaaaacatctgtcagtgcgacatcagaaggactcttattgcaagatacctctaagatgaagcgcttcaatcaaacactttcaaccaacaaaagtggttatacaagtcgcaaccctcagtcataccacctacttagtaaagaacaaagcagaaacagtcttcggaaagagtctttaatatttatgaaaggagtcatggatgaatgtactcatgtagcaaatttctcagtcccagttgatccaagcctcattatagtggttcaagccaaagaagatgcctatattccacgaacaggagttcgaagtttacaagaaatttggcctggttgtgaaatccgatacttagaagggggtcatattagtgcttatctttttaaacaaggactcttcaggtaagacggctggtctaaacatgtattcgttcatttgttgtttgttttctggattttttgcttcaacaaatgtaaaagatcacatatttttatagtctgtttcaatctttgaattccctcctcacctcccacaaatctcacagagttacttttccctctttcctagaatttgatcttcttattttcttctagagaactaagcatgatgcatattataggcatgctttatcgtgtggctttcccctcttcaaatattaatggccaggtattttaggatgtgagaaggaagatcatggcttgttaaagttgctttggtgcatcaagagttttttcactctattctgatgttttttcagaatggcctgaacatctgtggaataatttagcaatgtttttcagttagcaagtgaatattgaaccttaaataagaagtgcttttaatgtgaacaaccttatatgactccactattttagttagaacttataaaaacttttatgctggctgggcgcggtggcttacgcctgtaatcccagcactttgggaggcggaggcgggtgtatcacgaggtcaggagatcaaggccatcctggctaacacggtgaaaccccgtctctagtaaaaatacaaaaaaaaaaaaaaaaaaaa

SEQ ID NO: 30783 - DNA, 1005 bp, Homo Sapiens
atggtagagttcgcgcccttgtttatgccgtgggagcgcaggctgcagacacttgctgtcctacagtttgtcttctccttcttggcactggccgagatctgcactgtgggcttcatagccctcctgtttacaagattctggctcctcactgtcctgtatgcggcctggtggtatctggaccgagacaagccacggcaggggggccggcacatccaggccatcaggtgctggactatatggaagtacatgaaggactatttccccatctcgctggtcaagactgctgagctggacccctctcggaactacattgcgggcttccacccccatggagtcctggcagtcggagcctttgccaacctgtgcactgagagcacaggcttctcttcgatcttccccggtatccgcccccatctgatgatgctgaccttgtggttccgggcccccttcttcagagattacatcatgtctgcagggttggtcacatcagaaaaggagagtgctgctcacattctgaacaggaagggtggcggaaacttgctgggcatcattgtagggggtgcccaggaggccctggatgccaggcctggatccttcacgctgttactgcggaaccgaaagggcttcgtcaggctcgccctgacacacggggcacccctggtgccaatcttctccttcggggagaatgacctatttgaccagattcccaactcttctggctcctggttacgctatatccagaatcggttgcagaagatcatgggcatctccctcccactctttcatggccgtggtgtcttccagtacagctttggtttaataccctaccgccggcccatcaccactgtggtggggaagcccatcgaggtacagaagacgctgcatccctcggaggaggaggtgaaccagctgcaccagcgttatatcaaagagctgtgcaacctcttcgaggcccacaaacttaagttcaacatccctgctgaccagcacttggagttctgctga

SEQ ID NO: 30784 - DNA, 4022 bp, Homo Sapiens
aaggcgcatcatggcggctggccgggcccaggtcccttcctccgaacaagcctggcttgaggatgctcaggtcttcatccaaaagaccctgtgtccagctgtcaaggagcctaatgtccagttgactccattggtaattgattgtgtgaagactgtctggttgtcccagggaaggaaccaaggttctacactgcccctcagctatagcttcgtctcagtacaggacctcaagactcaccagcgtctcccatgctgcagccacctgtcgtggagcagtagtgcataccaggcctgggcccaagaggctggaccaaatgggaaccccctgccccgagagcagctgttacttttagggacactaacagacctatcggcagacttggaacaagagtgcaggaacggaagcctctatgtgagagataacactggcgtcctgagctgtgagctcatagacctggacctttcttggttgggccatctttttctgttcccccgttggagttacctccctcctgccaggtggaattcctcaggggaagggcacttggagctgtgggatgcccctgtgccagtgtttcctttgaccatcagtcctggccccgtcacgcctatccctgtcctctacccagagagtgcttcctgcctgctcaggctcagaaacaagctcagaggtgtgcagcgaaacctggctgggagtctagttcgattgagtgctctggtgaaaagtaaacagaaagcttacttcatcctgtctcttggtagatcacacccagctgtcacccacgtgtccatcatcgtgcaggtccctgcccagctggtgtggcacagagcccttcggcctggtacagcctatgtgctgacagaactgcgagtgtccaagatccgtggtcagcgccagcatgtttggatgaccagtcagtcctcccgtctgttgctgctgaaaccagaatgtgtgcaggagctggaactggagctggaaggacccctcttagaggctgatcccaagccactccccatgcccagcaactcggaggacaagaaggatccagaaagtcttgtccggtattctagactcctatcctattcgggagcagtcactggcgtgttgaatgagcccgctggcctctatgagctggatgggcagctggggctttgccttgcctaccagcagttccgtggccttaggcgggtgatgcgacctggagtgtgtctgcagctccaggatgttcacctgctccagtcagtgggaggggggacaagaaggccagtgctcgccccctgcctccgtggcgccgttctgcttcaaagcttctctcgtcagaagcctggggctcactcatcccgtcaagcctacggggcctccctgtacgagcagctggtgtgggaacgtcagttaggacttcccctctacctgtgggctaccaaggccctggaggagctggcctgcaagctgtgtccccatgtgctgagacaccaccagttcctgcaacattcctctcctgggagccccagcctgggactgcaactcctggctcctaccctggatcttctagctccgccaggcagccctgttcggaatgcacacaatgagatccttgaagagccacatcactgtcccctccagaaatacactcggctgcagactccctcctccttccccactctggccaccctgaaagaagaaggacagcgtaaggcctgggcctcctttgaccctaaggcccttctgcccctcccggaggcctcctacctgcccagctgccaactcaatcgccgcctggcttggtcctggctctgtctgctgccctctgccttctgcccagcccaggttttacttggggttctggtggcttcatctcataaaggttgtctgcaacttcgggaccaaagtggttccctgccctgcctgctcctggccaagcactctcaacccctcagtgacccacggctgataggctgcctggtgcgggcagagaggtttcagttgatcgtagagagggacgtgagaagcatcttcccttcctggaaggagctgagcatgccaggcttcatccagaagcagcaggccagagtctatgtccagttctttctggctgatgccctgatcctgcctgtgcccagaccctgccttcattcagcaacaccctcaacacctcagacagatcccaccggcccagagggaccccacctaggacagagccggctcttcttgctctgccacaaggaggccctcatgaagcgtaatttttgtgtccccccaggagcaagtccagaggtgcccaagcccgccctcagtttctatgtgttggggagctggcttgggggcacccagaggaaggagggtactggatgggggctgcccgagccccagggaaatgacgacaatgatcagaaggttcacctcattttctttggctcttcagtccgctggtttgagttcttgcacccgggacaggtgtaccgactcgtagctcctggccccgctacaccaatgttgtttgaaaaggatggttcatcctgcatatctcggcgtcctctggagttggctggctgtgcatcctgcctcactgtccaggacaactggactctggagcttgaaagctcccaggatatccaagatgtgctggatgcaaacaagtcattgcctgaatcctcactgaccgacctgctcagtgacaatttcacagattccttggtgtctttctccgctgagattttgtcacggacactatgtgaaccccttgtggcgtctctctggatgaaactggggaacacgggggccatgagaaggtgtgtgaagctaacagtcgctcttgagactgctgaatgtgaattcccccctcacctggatgtatatatagaagacccacacttgcctccctcactaggactacttccaggagcccgggtccacttcagccagttggagaaaagggtttccagatctcacaatgtttattgttgtttccggtcatccacttatgtgcaggtcctgagttttccccctgagaccaccatcagcgttcccctgccccacatctacctggctgaacttctgcagggtggtcagtccccattccaggccactgcctcttgccatatcgtctctgtcttcagccttcagctcttctgggtgtgtgcttattgtaccagcatctgccggcagggaaagtgcactcgcctgggctccacttgccctacgcagacagctataagccaggccatcatcaggctcctggtggaggatgggactgccgaagccgtggtgacctgtaggaatcaccatgtggcagcagcactagggctgtgtcctagagagtgggcctccctcctagatttcgtccaagtgccaggcagagtggtcttgcagtttgcagggcctggagcccaacttgagtcttcagccagggttgacgagcccatgaccatgttcctctggacactttgtactagcccctctgtcctccgtcctattgtgctttcttttgagctggaaaggaaaccgtcgaagatcgtcccattagaacctcctcggctacagcgattccagtgtggagagctccctttcctgactcacgtgaaccccaggctccgattgtcctgcctttctatccgagagtcagagtactccagctctctggggatccttgcttcctcctgttaactgaactgcaaggatggcctgagagtccttccttgctgaaaacctgaaggcctaggtcctggctcctctccctacttgttctgtgattgaaccaaggactccagattcacaaactgctactccactataatttcccttctttggtgttctggtgccagcctgccttggcaaaattgtggcaacaggaaatcatggccctattaatatgtcctctgattgggacaaggcacctgcattcacaggcggccctgagcacctgggttctgactttgtcacaggagctgagggaacaaaagacttgctcgctgtggggtgatggtgacaggcctattgacctgcaatgaagccctctggtgtc

SEQ ID NO: 30785 - DNA, 2553 bp, Homo Sapiens
gtagggcggatctcgcagctacggcgttcttttaggggtggagccggcaggaaatttaaactgaagccgcggccgaaaacgccaagagattgatgctgtagctgccctgagataaccaggactgtggaatcgggaagagctcatggagctcgcgaatgtaatacggaggcctctgaggaaggagtacggaggccgagaaggagccggcatttgatgagcgaaccgggaaagggagacgattgcctcgagctggagagttccatggctgagagtaggctccgggccccggacctaggagtttccaggtgtctaggaaaatgccagaagaactcaccaggtgccaggaagcatcccttttccggaaagtccttttacttggatctgcctgctggcaagaatctccagtttttgacgggggccattcagcaactgggtggggtaattgagggttttctgagcaaagaagtaagttacatcgtgtccagccgcagagaagtaaaggcagagagcagtgggaaaagccatagaggctgccctagccctagccccagtgaggtcagagtggaaacatcggccatggttgatccaaaaggcagccaccccaggccttcacggaaacccgttgactcggtgcctctaagcagagggaaggagctgctgcagaaggctatcagaaaccaggtgagctggggcaagatgggacagagccggtggtctccagcatagggagggatttcactcttcttcccaggttcttctgaagcacccacacaaaatgcacactctgcgatatgtagtattgtcattatttccttcttctacatcaggtagtggaggctcagacaagttatttagccattcacctagagagtaagtgttgaagccagagccacctccaactctggagcctaccaagagaactgtggggatgtgggatgtggcgggacagggttgctgggtacagaagccagacttcttttacaagtaactctaggctgggtgtggtggctcacgcctataatcccagcactttgggaggctgaggtgggtggaccacttgaggccaggagttcaagaccagcttggccaacatggcgaaaccccatctctaccgaaaaattagcagggtgtggtggcacgcacctgtagtccccgctacgcaggtggctgaagcagaagaatcacttgaacctgagaggtggaggttgcagtgagccgagattgtgccactgcactccagcctgggcgatagagctagactctgtctcaaaaaaaaaacaaaaaacaagtaactctttattccttgtgtgaaaatccagggctgttaaagtttagtggcaggaggaggagttaaggtgatcttgtgagaagagtcatgctggtgacatcaggaggggtacatggctgtgatgggggaggtggtgctgctggactgagccagtggagggggaagatctgcagctagcatagtttcatgctcagtgaggatgatggtcaccgtgtttgttgtgtacttactgtgctgagagctttcctcgcagaggccctcccaacgaacagctctctcagaagcatctgttccttcctggtcacgaggtggccagagcacaatgtataggcagaccagtggtccttcctctcccaatgtggccatgtggaggacaggatgtcttcctgggggttgggatggactctctgggcactgtactctctctcctacctgcctccctgcagtccctcccatggatgactcaggcctcccagaagcaatttctatctgtccccttcactttcaggccttggggagtctctgctcctacctgactctgtgttgtaatttcaggggagcatcagtggaggaggcagtgggggcagcagcagcctcctgaccaatgcccgctcttggggagtgaggattctgcacgtggatggtaccctttctgtgctgggctcctgtggagggagaattggtgactttgaccaggagtgtcagcttttagaaggatcatggtcatgtgagcttctggtcaccggaagccagaaatactcagctgccatgttgatccacaaaggtgggaggatgtggggaagggggaaagcggtgaggacgcagagtgcaggctgtggcctcggcatcccgcaggaggtccctagaacatgccgtttcatgtcacctgctacagctctcccccagctagtatgatgatcctgttttacaaatgcagaaatgatcttaatattcatgaccactggccaggcgaggtggctcacacctgtaatcccagcactttgggaggccaaggcgggtggatcacaaggtcaagagttcgagaccagcctgaccaacgtggtgaaaccccgtctctactaaaaatagaagcattagccgagcctggtggtgcgtgcctgtaatcccagctactcaggaggctgaggcaggagaatcacttgaacccaggaggcagaggttgcagtcagccaagatcatgctactgcactccagcctgggtgacagagcgagactccgtctcaaaaaaaaaaaacgacaaatat

SEQ ID NO: 30786 - DNA, 3209 bp, Homo Sapiens
gttcttcccgccgcctgacctggcccgcccgcctttccagtctggccgggcgggggcctgaagcacggcggctcgggccgtgggaccgtgttcacaccctttccagaaattcttggctggtaaccgcgaaaccgactggagcaggagctgggagaactggagaaaactgctctaatctcacttgactccagctaggagctgatgctgcatcgtaataacatttgcagagcgctttcacaggcgctggagtgacttgtctgagattcctccagaactgagccctttgttggaaccataccccagcccatggtcccatgactaggtggatagtactccttgtacctcctgcaacccagaaccctggctgaccactttgaaggaggatgctccagcaggtcaatggccacaatccggggtctgatggccaagccagggagtacctcagagaagacctgcaggagttcctgggtggggaggtcctgctgtacaaactggatgacctcaccagggtgaatcctgtgacactagagacagtcctgaggtgcctgcaggcccggtacatggcagacacattctacaccaatgctggctgcaccctggtagccttgaaccccttcaagcctgttcctcagctctactcgcccgagctaatgagagagtaccatgctgcgcctcagccccagaaactgaagccccatgtgttcactgtgggtgaacagacctacaggaatgtcaagagcctgattgaaccagtcaaccagtctattgttgtcagtggagagagtggtgctggaaagacatggacgtctcgctgcctaatgaagttctatgctgtggtggccacctcacctgcatcttgggagagccacaagattgcagagaggatagaacagaggatcctgaactccaaccctgtcatggaagcttttgggaatgcgtgtacactgaggaataacaacagcagtcgctttgggaagttcatccagctccagctgaacagggctcagcaaatgactggagccgcagtccagacctacctcctagagaaaactcgagtggcctgccaggcttccagtgagaggaacttccacatcttctatcagatttgcaaaggagccagtgaggacgagaggctccagtggcaccttcctgagggagctgccttctcctggctgcccaacccagagaggagcttagaagaggattgttttgaggtgaccagagaggccatgctccatttgggcattgacacccctacccagaacaacatctttaaggtcctagctggactgctgcaccttggcaatatccagtttgctgcctccgaggatgaagcccagccctgccagccgatggatgatgccaagtactctgtcaggacggcagcctcgctgctggggctcccagaggacgtgctgctggagatggtgcagattagaaccatcagggcaggcagacagcagcaggtgttccggaagccctgcgcccgagccgagtgtgacacccgtagagactgcctggccaaactgatctatgcgcggttgtttgactggctggtatcagtgatcaacagcagcatctgtgcagacaccgactcgtggaccactttcataggcctgctggatgtgtatggatttgaatcatttcctgacaacagtctggaacagttgtgcatcaactacgccaatgagaagctgcagctggaggcctgtggcctcgtggagaccatccatatcagtgctgctggcttccccatccgggtctctcaccgaaactttgtagaacgatacaagttactaagaaggcttcatccttgcacatcctctggccccgacagcccatatcctgccaaagggctccctgaatggtgtccacacagcgaggaagccacgcttgaacctctcatccaggacattctccacactctgccggtcctaactcaggcagcagccataactggtgactcggctgaggccatgccagcccccatgcactgtggcaggaccaaggtgttcatgactgactctatgctggagcttctggaatgtgggcgtgcccgggtgctggagcagtgtgcccgctgcatccagggtggctggaggcgacaccggcaccgagagcaggagcggcagtggcgggccgtcatgctcatccaggcagccattcgttcctggttaactcggaaacacatccagaggctgcatgcagctgccacagtcatcaagcgtgcatggcagaagtggagaatcagaatggcctgccttgctgctaaagagctggatggtgtggaagaaaaacacttctctcaagctccctgttccctgagcacctcgccgctgcagaccaggctcctggaggcaataatccgcctctggcccctgggactggtcctggccaatacggctatgggtgtaggcagctttcagaggaaattagtggtctgggcttgcctccagctccccaggggcagccccagtagctacactgtccagacagcacaagaccaggctggtgtcacgtccatccgagcgctgcctcagggatcgataaagtttcactgcagaaagtctccactgcggtatgctgacatctgccctgaaccttcaccctacagcattacaggctttaatcagattctgctggaaagacacaggctgatccacgtgacctcttctgccttcactgggctggggtgatccttggtgcctttgtttccacaaggccttttcctgccccctgccttgccaaagacatttaatcagcacacagctgccagactattcccacagtgctccaaatgcacatgaacaacagtgacggctccagccttcgacccagagccccgtgcccagtgcgtcagtgggcctggggttccaggctacatcaagcactgatggtgtcagggctggtagttaccaaatcagggttaagaaacatcagggccacatttcactaccttcacagatcaaactcagcagcagtcatgactgtctgtcactacactggggatcccaattccacataagcacttttggaagaaaacagccaaagttggcctaaaattggcgctggaatttgggctgggaaaaatcttgtggttatttcctttaaaaaggaacaaaactttagtatttaattagttgatttatttaatgtaatttcaaacaattaaattatgaataatgcaatgtaaaaaaaaaaaaaaaaaa

SEQ ID NO: 30787 - DNA, 1643 bp, Homo Sapiens
gccctctggcggctccggaccacaggccgagttactctgattaccgccatgctccaagacccgcactgacagtccccacgtgagggaccgcggtgggagtcctaaatgggggaggaggggacgggcggcactgtgcatctgctgtgcctcgcggcctccagcggggtccccctattctgcaggagcagtcgcggcggcgcccccgcccgtcagcagctcccgttctctgtcatcggttccctcaatggagtccacatgtttgggcagaatctggaggtgcagctgagctctgcgaggaccgagaacacgactgtggtgtggaaaagcttccatgacagcatcaccctcattgttctgtcatctgaggtgggcatctctgagctgaggctggagagactactccaaatggtgtttggagccatggtccttcttgtgggacttgaagaactgaccaatatccgcaacgtggagagactgaagaaggacttgagggccagttattgcctcatcgacagcttcctgggggactcggagctcatcggggacctgacccagtgtgtggactgcgtgattcctccagaggggtccctcttgcaggaagccctctccgggttcgctgaggccgcgggcacgaccttcgtcagtctggtggtgtccggccgggtggtggcagcaacagagggttggtggcggctggggacgcccgaggccgtgctgctcccctggctggtggggtccctgccgccgcagaccgctcgcgactacccggtgtacctgccgcacgggagccccacggtcccacaccggctcctgaccctgactctgctgccgagcctggagctgtgtctactctgcgggccgagcccacccctcagccagttgtatccacagcttctggagcgctggtggcagccactgctggacccgttgcgggcctgtctgccgttgggaccccgggcgctgcccagtggcttcccccttcacacagacatcctcgggctgctgctcctccacctggaactgaagcgctgcctcttcaccgtggagcccttgggggataaagagccttcaccagaacagcgccggcgcctcctccgaaacttctataccctggtcacctccacgcacttcccaccagagccagggccaccagagaagacagaagatgaggtctaccaggcccagctgcccagagcttgctacctggtgttggggactgaggaaccaggcacaggagtgcgtctggtggccttgcagctggggcttcggcggctgctgctgctgctgtctccccagagtcccacccatgggctgcgaagcctggccacccacactctgcatgccctcaccccacttctttgactacctagcagtgggtgatggacacagacatggggctgttagcgtctctctgtttattcgctcacaataatacacagcccctggatggggagggggtaggaggggctacaacagggtggggtgggaggggaggagacatccacttccctggcccctctcccctctgtgcttgggggggaaagggagggagggggactccccctaaccccccagaatgtaaacagcagcagatgaacaaaaataaaaatacaaaaggccgaaaaaaaaaaaaaaaaaaaaaa

SEQ ID NO: 30788 - DNA, 4534 bp, Homo Sapiens
ggcccggcccctcgaggcaccgcctttcaattagcactcgctgattggtcgctgctcgcgcggtctcctgggtgacgggaacgcggtagcctgcttggtggagaccgggtgcgcctgcgtacttcatagttcgcgtagcggctcgagcgtggagatgaagcgtattttctcactgctagaaaagacttggcttggcgcaccaatacagtttgcctggaaaaaaacatcaggaaactaccttgcagtaacaggagctgattatattgtgaaaatctttgatcgccatggtcaaaaaagaagtgaaattaacttacctggtaactgtgttgccatggattgggataaagatggagatgtcctagcagtgattgctgagaaatctagctgcatttatctttgggatgccaacacaaataagaccagccagttagacaatggcatgagggatcaaatgtctttccttctttggtcaaaagttggaagtttcctggctgttggaactgttaaaggaaatttgcttatttataatcatcagacatctcgaaagattcctgtccttggaaaacatactaagagaatcacttgtggatgttggaatgcagaaaatctgcttgctttaggtggtgaagataaaatgattacagttagtaatcaggaaggtgacacgataagacagacacaagtgagatcagagcctagcaacatgcagtttttcttgatgaagatggatgaccgaacctctgctgctgaaagcatgataagtgtggtgcttggcaagaaaactttgttttttttaaatctgaatgaaccagataacccagctgatcttgaatttcagcaggactttggcaacattgtctgctataattggtatggtgatggccgcatcatgattggtttttcatgtggacattttgtggtcatttctactcatactggagagcttggtcaagagatatttcaggctcgtaaccataaagataatctaaccagcattgcagtatcacagactcttaacaaagttgctacatgtggagataactgcattaaaatccaagacttggttgacttaaaagacatgtatgttatactcaacctggatgaggaaaataaaggattgggtaccttgtcctggactgatgatggccagttgctagcactctctacccaaaggggctcacttcatgttttcctgaccaagcttcccatacttggggatgcctgcagcacaaggattgcctatctcacctccctccttgaagtcaccgtagccaaccctgttgaaggagagctaccaatcacagtttctgttgatgtggaacccaactttgtggcagtaggtctttatcatctggctgtaggaatgaataatcgagcttggttttatgtccttggagaaaatgctgtgaaaaaattgaaagatatggagtatctgggaacagtagccagtatttgccttcattctgactatgctgctgcactttttgaaggcaaagtccagttacatttgatagaaagcgaaatcttggatgctcaagaagaacgtgagactcggcttttcccagcagtggatgataagtgccgtatcttatgccatgccttaactagtgatttcctcatctatggtacagatactggtgtcgttcagtatttctacattgaagactggcaattcgttaatgattatcgacatcctgtcagtgtgaaaaagatttttcccgacccaaatgggaccagattagttttcattgatgaaaaaagtgatggatttgtttactgtccagtcaatgacgctacctatgagattccagatttttcaccaaccattaaaggtgttctttgggaaaactggccaatggataaaggtgtatttattgcttatgatgatgataaggtgtacacttatgtctttcacaaggacactatacaaggagccaaggttattttggctggtagcaccaaagttccttttgctcataaacctttgctgctatataatggagagctgacctgccaaacacagagtggaaaagtaaacaacatctaccttagcacccatggctttctcagcaacttaaaagatacggggcctgacgaactgagaccaatgctggcacagaatttaatgctaaagaggttttctgatgcttgggaaatgtgcaggattctgaatgatgaggctgcctggaatgagttggccagagcttgtctacatcacatggaagtggagtttgcaatccgtgtttatcggagaattggaaatgttggcatagtgatgtccttggaacaaataaagggaatagaggactacaatcttttggcaggacaccttgccatgtttaccaacgattataacctggctcaggacttgtaccttgcatccagctgtcctattgctgccctggagatgagaagggatttacagcattgggacagtgctctacaactggcaaagcatttggccccagaccagataccttttatatcaaaagaatatgctattcagcttgaattcgcgggtgattatgtaaatgctttggctcattatgagaaaggaataacaggtgataataaggaacatgatgaagcttgtctggctggagtggcccagatgtccataagaatgggagacatacgtcgaggggttaaccaagccctcaagcatcccagcagggtccttaaaagagactgtggagccatattggagaatatgaagcaattttcagaagcggcccaactgtatgaaaaaggtctctactacgataaagcagcatctgtttacatccgctctaagaattgggcaaaagttggtgatcttctgccccacgtttcttctcctaagatccatttgcagtatgccaaagccaaggaagcagatggaagatacaaagaagctgttgtagcttatgaaaatgcaaaacagtggcaaagtgtaatccgcatctatctggatcacctcaataatcctgaaaaagctgtcaatattgttagagagacccagtctctggatggagccaaaatggtagccaggttttttctacagcttggtgactatgggtctgccatccagtttcttgtcatgtccaaatgcaacaatgaagctttcacactggctcagcaacacaacaaaatggaaatctatgcagatattattggttctgaagacactactaatgaagactatcaaagcattgccttatactttgaaggagaaaagagatatcttcaggctggaaaattcttcttgctgtgtggccaatattcacgagcacttaaacacttcctgaaatgcccaagctcggaagataatgtggcaatagaaatggcaattgaaactgttggtcaggccaaagatgaactgctgaccaatcagctgatagaccatctcctgggggagaacgatggcatgcctaaggatgccaagtacctgttccgcttgtacatggctctgaagcaataccgagaagctgcccagactgccatcatcattgccagagaagagcagtctgcaggcaactaccggaatgcacacgatgttctcttcagtatgtatgcagaactgaaatcccagaagatcaaaattccctccgagatggccaccaacctcatgattctgcacagctatatactagtaaagattcatgttaaaaatggagatcacatgaaaggggctcgcatgctcattcgggtggccaacaacatcagcaaatttccatcacacattgtacccatcctgacgtcaactgtgattgagtgtcacagggcaggcctgaagaactctgctttcagcttcgcagctatgttgatgaggcctgaataccgcagcaaaatagatgccaaatacaaaaagaagatcgagggaatggtcaggagacccgatatatctgagatagaagaggccacgactccatgtccattctgcaaatttcttctcccagagtgtgaactcctctgtcctggatgtaaaaacagtatcccatattgcattgcaacaggtcgacacatgttgaaagatgactggacggtgtgtccacattgtgacttccctgctctatactcagaattgaagatcatgctaaacactgaaagcacatgtcctatgtgttcagaaagattaaacgctgctcagctgaaaaagatttcagactgtacccagtacctgcgaacggaggaggaactgtgattggcacgtgcagatacaatgctcctgagaagacagcattttccacaggaggctgtttcctcccctggtggatttaagagacggtcctttctggatacagagaaatgaaacaacggtgacctctccaggtcggcactttccacttctgtacggtggcaaaacgatgacatgtaaccttgctgtttattgtactttgtatattatttcctcttcaaagtctttcttacacactctatcctctgcactgttaatagtaacctatgacataattgtaaatattcagctttttgctaacttttgtattttgaaaaactttaaaataaaattgttgactagaaaaaaaaaaaaaaa

SEQ ID NO: 30789 - DNA, 7752 bp, Homo Sapiens
gatggctgcagaggaaggggtcgcgagtgctgcttccgccggcggtagctggggcaccgcggccatggggcgggttctaccgatgctgttggtgccagtccccgccgaggcgatggggcagctcggctcccgggcgcagctgcgcacacagccggaggctctggggagcctgacggctgcgggcagcctccaagtgctttctttgacgcctggcagccggggcgggggtcgctgctgcctggagggccccttctggcactttctatgggaggattctcgtaacagcagcacaccaactgaaaagcccaaactgctcgctcttggtgaaaattatgaactgcttatctatgaatttaatttgaaagatggaagatgtgatgcaaccattttgtatagctgtagtagggaggcattgcaaaagctcattgacgatcaagatatcagtatttccttattgtctttgagaatcctgtcatttcacaataacacatcattactgttcatcaacaaatgtgtcatcctacatattatatttcctgaaagagatgctgcaattagagtactcaactgtttcacacttcccttgcctgcacaggcagtggacatgattattgacacgcagctctgcagaggaattctttttgttttgagtagtttaggctggatctacatttttgatgttgtggatggtacatatgtagctcatgtggatttagcacttcacaaagaagacatgtgtaatgagcagcaacaggagccagccaagatttcttcatttacttcactgaaagtttctcaagacctcgatgttgcagtgattgtcagctcctccaactccgcagttgctcttaacttaaatttgtatttcaggcaacacccaggacacctactgtgtgaaagaatactagaagatcttcctattcaaggacctaagggcgtagatgaagatgatcctgttaactctgcctacaacatgaaactggccaagttttccttccaaattgataggtcttggaaagcccagctatcatcattgaatgaaacaataaagaactccaaactggaggtttcctgttgtgctccatggttccaggatattttgcatttggagtcacctgaatctggtaaccacagtacaagtgtgcagagctgggccttcattccacaggacataatgcatgggcaatataatgttctacagaaagatcatgccaagaccagtgatccaggaagatcatggaaaataatgcacatcagtgaacaagaggaacccatagagcttaaatgtgtgtctgtgacaggattcactgcactgtttacttgggaagtggaaaggatgggctataccattaccctctgggatttggagacccagggcatgcagtgttcttcccttggcacaaagtgtattcctgtagacagtagtggagaccagcagctgtgctttgttttgacagagaatggactctctctgattttgtttggtttgactcaagaagagtttttaaacagactcatgatccatggaagtgccagcactgtggacactctttgtcatctcaatggctggggaaggtgctcaattcccatacatgcactagaggccgggatagaaaatcgtcagctggacacagtaaatttctttttgaagagcaaggaaaatctttttaatccatcctcaaaatcttctgtatctgatcagtttgatcacttgtcatcccatttatatttaagaaatgtggaagagctgataccagcattggatttactttgctcggcaattagagaaagttattctgaaccccaaagcaaacacttttcagaacaattgcttaatcttacactgtctttccttaacaaccaaataaaggagcttttcattcacactgaagaactagatgaacatctgcaaaaaggagtgaacattttgactagctacattaatgaacttcgaaccttcatgataaagtttccttggaagctaacagatgctatagatgaatatgatgtacatgaaaatgtccccaaagtaaaggagagcaatatatggaagaaactcagctttgaggaagttattgccagcgccattttaaacaacaaaataccagaggcacagactttcttcaggattgatagtcattctgctcaaaaacttgaggagcttattggcataggcctaaatttggtctttgacaatttaaaaaagaacaatataaaggaagcctctgaacttttgaagaatatggggtttgatgtaaaaggccaattgctcaagatctgcttctatacaactaataaaaatatacgtgactttttggttgaaattttaaaagaaaaaaattatttttctgaaaaagagaaaagaactatagacttcgtgcatcaagttgagaagctttatttgggacatttccaagaaaatatgcaaatccagtcatttcccaggtactggataaaggaacaagattttttcaagcacaagtctgttttggactcattcctgaaatatgattgtaaagatgaatttaacaaacaggaccatagaattgtgttaaattgggctctgtggtgggatcaactaacacaagaatccatccttctccccaggataagtccagaagaatacaaatcatattcccctgaagccctctggagatacctcacagctcgccatgattggttaaacattatcttatggattggagaatttcaaacccagcatagttatgcttcacttcagcagaacaaatggccccttctgactgttgatgttattaaccagaatacttcctgtaacaactacatgaggaatgaaattttagataagctggccaggaatggggtttttttggcatctgaactggaagactttgaatgcttcctcctaagactgagccgtattggaggtgtaatacaggataccctccctgttcaaaactacaagaccaaagaaggttgggatttccattctcaattcattctctattgtttggagcacagtctgcagcatcttctttatgtctaccttgactgttacaaacttagtcctgaaaattgtccctttttggaaaaaaaagagttacatgaagcacacccttggtttgaatttttagttcagtgtcgacaagttgccagtaacttaacagatcccaaactgatcttccaggctagccttgcaaatgctcagattttgattcccaccaatcaggccagtgtaagcagtatgctattggaaggacataccctcctggcccttgctactacaatgtattctcctgggggtgtcagtcaggttgttcagaatgaagaaaatgaaaactgtttgaagaaagtggatccccagctattgaagatggcattaactccttaccccaagctaaaaactgctctcttcccacagtgcactcctcctagtgtcctgccatctgatattacaatctaccaccttattcagtcattatcaccctttgatcctagcagattgtttggctggcagtctgctaacacactagctataggagatgcatggagtcatctcccacatttctctagccctgacctggttaataaatatgctatagtggaacgtctgaattttgcttattatttacataatgggcggccatcatttgcatttggtacttttctggtccaggaattaatcaagagcaagactcccaagcagctgatccagcaagtaggcaatgaagcctatgttatagggctctcctccttccacataccttcaataggagctgcatgtgtttgtttcttagaattgcttggccttgacagcctcaagctcagagttgatatgaaagtggccaatataattttgagctacaagtgcagaaatgaagatgctcagtacagctttatcagagagtctgtagccgaaaaactatctaaactagctgatggtgaaaagacaaccacagaagaattgcttgttctcttagaagaaggtacatggaacagcattcagcaacaggaaataaagaggttatccagtgaatctagcagccaatgggcattagtggtgcagttctgcaggctacacaatatgaaactaagcatatcttaccttagagaatgtgccaaagcaaatgattggctgcagttcattattcacagccaactccacaactaccacccagcagaggtgaaatcccttatccagtacttcagcccagtcattcaagaccacttaaggctggcttttgagaacttgccctcagtgcccacctccaaaatggacagcgatcaagtctgcaataagtgcccccaggaacttcaaggaagcaaacaagagatgaccgatttatttgaaattctgctccaatgctcagaggagccagactcctggcactggcttctggttgaagcagtgaaacaacaggcccctatcctcagtgttctggcctcatgtctccagggtgccagtgccatttcttgtctctgtgtttggatcatcacttctgtggaggacaatgttgcaactgaagcaatgggacacattcaggactcaacagaggaccatacctggaaccttgaggatctttcagtcatctggagaacattattaacaagacaaaagagcaaaactctcatcagaggtttccagcttttctttaaggattccccgttactactggtgatggagatgtatgaactgtgtatgttcttcaggaattataaagaagctgaagctaaacttctggagtttcagaagagccttgaaacgcttaacacagcagccacaaaggtccaccctgtcatccctgccatgtggctggaggatcaggtgtgtttccttttgaagcttatgctacagcagtgtaagacccagtatgagctggggaagcttttacagctctttgttgaaagagagcatctcttctctgatggtccagatgtgaaaaagctttgcatcctttgccagattttgaaggatacatccatagccattaatcatacaattattaccagctacagcattgagaatcttcagcatgaatgtagatctattttggaaagactgcagacagatggacaattcgctttggccaggagggtagcagaattagctgagttacctgtggacaacttggttattaaagagataacacaggaaatgcagaccctaaaacacattgaacagtggtcactaaaacaagcaagaattgacttctggaaaaaatgccatgagaattttaagaaaaattcaatttcaagcaaagcagcttcttcctttttctcaacccaggcccatgtggcatgtgagcacccaactggatggagcagcatggaggagcgccatctgctgctcaccttggcagggcactggcttgcccaggaggacgtggtgcccttggataagctggaggagctggagaagcagatctggctgtgccgcatcacccagcacactcttggaagaaatcaggaggaaacagagcccagattttctcgacagatctcaactagtggtgaactttcctttgatagtttagccagtgagttttccttctccaagttggctgctctgaacacatcaaaatacttagaacttaacagccttccatccaaagagacatgcgagaatagattggattggaaagagcaggagtcactaaactttttgattgggcgcctactggatgatggctgtgtgcatgaagcaagtagagtatgccggtattttcatttttataatccagatgtcgccttggtattgcactgcagagcactggcctcaggggaagctagtatggaggatctgcacccagagatccatgctctcctacaaagtgctgagctgcttgaggaagaagcacccgacattcccctaaggagagtccacagcacttcaagtctggatagtcagaagtttgtgacagtgccctccagtaatgaagtggtaactaacctggaagtgctgacaagcaaatgcctccatgggaagaactactgtcgacaggtcctctgtctgtatgatcttgccaaggagttgggctgttcctacacagatgttgctgctcaggatggtgaagccatgctccggaaaatcttggcctctcagcagcctgaccgatgcaaacgagcccaggccttcatcagcacacagggccttaagccagatactgtggctgaactcgtggcagaagaggtgacacgggagctgcttacttcatcacagggaacaggacataagcagatgttcaacccaacagaggaaagccagacatttcttcagctgaccactctgtgtcaagaccgcacattggtaggcatgaagttgttggataagatttcctccgttccccatggggaactgtcttgcaccacagagctcctgatcctggcccatcattgcttcaccctgacgtgccacatggagggcatcatccgagtcctacaggccgcccacatgctcacagataaccacctggcccccagtgaggagtatgggctggtggtacggctcctcactggcattggaaggtacaacgagatgacatacatatttgatttgctgcataaaaagcactactttgaagtgctaatgaggaagaagttggatccgagtggtaccctgaaaacagccctgctggactacatcaaacgctgccgtcctggagacagtgaaaagcacaatatgattgccctgtgcttcagcatgtgccgggagattggcgagaaccacgaggcagctgcccgcatccaactgaaattgattgagtctcagccctgggaggacagcctcaaggatgggcaccagctgaaacaactgctgctgaaggccctgactctgatgttggatgcagcagagagttatgccaaggactcctgtgtgcgacaggcccagcactgtcagcggctcaccaagttgataactctgcagattcactttctgaacactggccagaacacaatgctcatcaacttgggccgccacaagctgatggactgtattctggccctacctcggttctaccaggcttctattgtggctgaggcctacgattttgttccagattgggctgaaattttataccagcaagtgattcttaaaggagactttaattacttggaagaatttaagcagcaaaggttattaaagtccagtatatttgaagagatttccaaaaaatataaacaacatcagcctactgacatggtcatggaaaacctgaagaaattactcacatattgtgaagatgtttacctgtattacaagttggcatacgaacacaagttttatgaaattgtaaatgtgcttctgaaggaccctcagacaggttgctgtctaaaggacatgctagcaggttagatgatttcataggtgtctgttttcttgtactgttagcagattctgacagatgtgatgagaagaagaatgcattggagatctttgctaaagttgaacaatcccggtactgtaccatatcagtcctttgtgggtagtaggtagcaagtaagaaacttttcaggaggaaattcctatttaaaatagattgattttagatgattgttcatccacaccattttatatagatactagtattaagatcaaaagcttcctcttcctcaggacagcttctactttagatgatccaataatgattaaagaatacctgtacctgcagattccagtttcaaagaaatttaattattatttacacagttaaggaacaggtgatacattttcatttgttagaaactgatctttctgtaataaaatagattttc

SEQ ID NO: 30790 - DNA, 1990 bp, Homo Sapiens; identical to SEQ ID NO: 26419

SEQ ID NO: 30791 - DNA, 2051 bp, Homo Sapiens
tggggtgtcgctccgggctggtggcggggccactgccccgcttgggggaagccgagcgatggtttgtgggcgccagttgtctggcgccgggagtgagaccctaaaacaaagaagaacacaaatcatgtcccgaggacttccaaagcagaaaccgatagaaggtgttaaacaagttatagttgtggcttctggaaagggtggagtcggaaaatctactacagcagtgaatcttgcacttgcactagcagcgaacgattcgtccaaggccattggtttgctagatgtggatgtgtatggaccttcagttccaaagatgatgaatctgaaaggaaatccggaattatcacagagcaacctaatgaggcctctcttgaattatggtattgcttgtatgtctatgggctttctggttgaagaaagtgaaccagtagtttggagaggccttatggtaatgtcggccattgagaaattgttgaggcaggtagattggggtcaactggactacttagttgtagacatgccaccaggaactggagatgtgcagttatcagtctcacagaatattcctataacaggtgctgtgattgtctccacgccccaggacatcgcattgatggatgcacacaagggtgctgagatgtttcgcagagtccacgtgcccgtccttggccttgtccaaaacatgagtgttttccagtgtccaaaatgtaaacacaaaactcatatttttggtgctgatggtgcaaggaaactagcacagacccttggtcttgaagttctaggagacattcccttacaccttaatataagggaagcttcagatacaggccagccaattgtgttttcacagcctgaaagtgatgaggccaaagcttacttgaggattgctgtggaagtggtaagaagattgccatcaccttcagaatgattccccaagtgtcctggaaatttgcctggtactgacattaagaggacctttggaaatcagcaatgtggtgatggaacctacagaaataatagaaatcataactgttttatttctaaggaaagaatgtcttcatatttgacttgctaagctaaggttcacaaaactttgatgtatcaatgttaactgctatatttaggaattttttgaaagctggtgtgtaccacctgcaaagaactgcattttattttattgaattacccctttagaaatcatgagtttatgatgttacaagtccattttgggagagaactgtacactttttgcaggaccacagaattagtaatttaaatgatatactaaatttgtgtatgggcataagtattacgccttcccaccaggcaatttggactgtctttgaatcctgtctttggtactgtcttggacatgttcttaatatgaacctctgcttcttcatctggatcacactataccccagacttaatgaatttcagtctccaggagtggagcctgaacataatgtatttttagtaagaccatgatgatgttgatgatgattctggtaatcatggcagtaagaataatagctaacatttaacaagttaattataattgttcttccatttgtgtgagtgggtactattatctccattttacagataagtaatttgagatataatttgaaggcactcaaccttgagtgtcttgctgagggttactgtatctagcaggtgatggagcttggatttgaacttgagtaattcgatattagattcatctttttgtacaccaatgtgcttttgttaattaaaaaaagtcggtggtggctaggcgtggtggctcacgcctgtaatcccagcactttgggaggttgaggtgggtggatcatgaggtcaggagttcaagaccagcctgaccaacatggtgaaaccccgtctctactaaaaatacaaaaattagctgggtgtggtggcatacgcctgtaatcccagctactcgggaggctgaggcaggagaatcatttcaacccgggaggctgaggttgcagtgagtggagattgtaccactgcactccagcctggtcaatggagtgcgactccatctc

SEQ ID NO: 30792 - DNA, 3067 bp, Homo Sapiens
aattaaattatgagaattaaaaagacaacattgagcagagatgaaaaaggaagggaggaaaaggtggaaaagaaaagaagacaagaagcgagtagtggtctctaacttgctctttgaaggatggtctcacaaagagaaccccaacagacatcatcgtgggaatcaaatcaagaccagcaagtacaccgtgttgtccttcgtccccaaaaacatttttgagcagctacaccggtttgccaatctctattttgtgggcattgcggttctgaattttatccctgtggtcaatgctttccagcctgaggtgagcatgataccaatctgtgttatcctggcagtcactgccatcaaggacgcttgggaagacctccggaggtacaaatcggataaagtcatcaataaccgagagtgcctcatctacagcagaaaagagcagacctatgtgcagaagtgctggaaggatgtgcgtgtgggagacttcatccaaatgaaatgcaatgagattgtcccagcagacatactcctccttttttcctctgaccccaatgggatatgccatctggaaactgccagcttggatggagagacaaacctcaagcaaagacgtgtcgtgaagggcttctcacagcaggaggtacagttcgaaccagagcttttccacaataccatcgtgtgtgagaaacccaacaaccacctcaacaaatttaagggttatatggagcatcctgaccagaccaggactggctttggctgtgagagtcttctgcttcgaggctgcaccatcagaaacaccgagatggctgttggcattgtcatctatgcaggccatgagacgaaagccatgctgaacaacagtggcccccggtacaaacgcagcaagattgagcggcgcatgaatatagacatcttcttctgcattgggatcctcatcctcatgtgccttattggagctgtaggtcacagcatctggaatgggacctttgaagaacaccctcccttcgatgtgccagatgccaatggcagcttccttcccagtgcccttgggggcttctacatgttcctcacaatgatcatcctgctccaggtgctgatccccatctctttgtatgtctccattgagctggtgaagctcgggcaagtgttcttcttgagcaatgaccttgacctgtatgatgaagagaccgatttatccattcaatgtcgagccctcaacatcgcagaggacttgggccagatccagtacatcttctccgataagacggggaccctgacagagaacaagatggtgttccgacgttgcaccatcatgggcagcgagtattctcaccaagaaaatggtatagaagctcccaagggctccatccctctttctaaaaggaaataccctgctctcctaagaaacgaggagataaaagacattctcctggctctcttagaggctgtgtggcatttccacaagttgcttcctgtatccctgtggtcttccttgtcacagatcagggctgttccaattacttgtaaactttcatttgtttacaaaggttagaagttatcccatatgtggttccccttcagctgatctttgtctggtgccagacaaagcactttatgagacgagttttttatctgtcagcaatggattggagacatttcccaattgtgtgccagtcacacaaccaaggcttaggaatttctcaggccaccttacctgacatgtcagggcaggtctgtgtctaggtgcatggtcagatttaatacatccagaagatgtcttctattctaacagatctcttagcttgtcactgaggcaaagttttgatttaggagatagggctataaaatgcctggactgttaccttgcatggactgaatatgactcataaaactgatctgattccttcagccatcatctgcccaacttggttcccctccccacccccccacaacacacacacacactttctaagaaaagaaaagaaattcttttttttcaatactttaagttctgggatacatgtgcagaatgtgcaggtttgttacataggtatacatgtgtcatggtggtttgcagcacccaccaacccatcatctaccttaggtatttctcctaatgctatccctcccctagcccccaaccccccgatgggctccagtgtgtgatgttcccctccatgtccatgtgttctcattgttcaattcccacttatgagtgagaacatgcagtatttggttttctgttcttgtgttagtttgctgatggtttcctgttcatccgtgtccctgcaaaggacatgaactcatccttttttatggctgcataatattccatggtgtatatgtgccacattttctttatccagtctatcgctgatgggcactggggttggttccaagtctttgctattgtgaacagtgctgcaataaacttacatgtgcatgtgtctttagtagaatgatttataatcctttgggtatatacccagtaatgggattgctggtcaaatggtatttctggttctagatccttgaggaatctttgtcttccacaatggttgaactaatttgtactcccaccaacagtgtaaaagtattcctgtttctctacatcctcttcagcatctgttgtgtcctgacattttaatgatcactattctcactggcgtgagatgttatctcattgtggttttgatttgcatttctctaatgaccagtaatgatgagctttttttcatatgtttgttggctgcataaatgtcttcttttgagaagtgtctgttcatatccttcacccattttttgaagaaaacaaactcttaagagagcagtattcattcttttgagtgtgagggatggagaaagagaaagatggagagagtattataagcagctgtatcccctttgccatggtgatagcagaccattcacatgggagcttctggtctctttgtaataataataagagccacattaccagtacttagagtatgctagttattttaacacattgtatcattaaatcttcaaaacatccctatgagttagaaacctaaaaaaaaaaaaaaaaaaa

SEQ ID NO: 30793 - DNA, 2620 bp, Homo Sapiens; identical to SEQ ID NO: 23651

SEQ ID NO: 30794 - DNA, 6072 bp, Homo Sapiens
cagccgcgtcccccagccccggcctcccgcggacccatgcccgcccgtatcggctactacgagatcgaccgcaccatcggcaagggcaacttcgcggtggtcaagcgggccacgcacctcgtcaccaaggccaaggttgctatcaagatcatagataagacccagctggatgaagaaaacttgaagaagattttccgggaagttcaaattatgaagatgctttgccacccccatatcatcaggctctaccaggttatggagacagaacggatgatttatctggtgacagaatatgctagtggaggggaaatatttgaccacctggtggcccatggtagaatggcagaaaaggaggcacgtcggaagttcaaacagatcgtcacagctgtctatttttgtcactgtcggaacattgttcatcgtgatttaaaagctgaaaatttacttctggatgccaatctgaatatcaaaatagcagattttggtttcagtaacctcttcactcctgggcagctgctgaagacctggtgtggcagccctccctatgctgcacctgaactctttgaaggaaaagaatatgatgggcccaaagtggacatctggagccttggagttgtcctctacgtgcttgtgtgcggtgccctgccatttgatggaagcacactgcagaatctgcgggcccgcgtgctgagtggaaagttccgcatcccattttttatgtccacagaatgtgagcatttgatccgccatatgttggtgttagatcccaataagcgcctctccatggagcagatctgcaagcacaagtggatgaagctaggggacgccgatcccaactttgacaggttaatagctgaatgccaacaactaaaggaagaaagacaggtggaccccctgaatgaggatgtcctcttggccatggaggacatgggactggacaaagaacagacactgcagtcattaagatcagatgcctatgatcactatagtgcaatctacagcctgctgtgtgatcgacataagagacataaaaccctgcgtctcggagcacttcctagcatgccccgagccctggcctttcaagcaccagtcaatatccaggcggagcaggcaggtactgctatgaacatcagcgttccccaggtgcagctgatcaacccagagaaccaaattgtggagccggatgggacactgaatttggacagtgatgagggtgaagagccttcccctgaagcattggtgcgctatttgtcaatgaggaggcacacagtgggtgtggctgacccacgcacggaagttatggaagatctgcagaagctcctacctggctttcctggagtcaacccccaggctccattcctgcaggtggcccctaatgtgaacttcatgcacaacctgttgcctatgcaaaacttgcaaccaaccgggcaacttgagtacaaggagcagtctctcctacagccgcccacgctacagctgttgaatggaatgggcccccttggccggagggcatcagatggaggagccaacatccaactgcatgcccagcagctgctgaagcgcccacggggaccctctccgcttgtcaccatgacaccagcagtgccagcagttacccctgtggacgaggagagctcagacggggagccagaccaggaagctgtgcagagctctacctacaaggactccaacactctgcacctccctacggagcgtttctcccctgtgcgccggttctcagatggggctgcgagcatccaggccttcaaagctcacctggaaaaaatgggcaacaacagcagcatcaaacagctgcagcaggagtgtgagcagctgcagaagatgtacggggggcagattgatgaaagaaccctggagaagacccagcagcagcatatgttataccagcaggagcagcaccatcaaattctccagcaacaaattcaagactctatctgtcctcctcagccatctccacctcttcaggctgcatgtgaaaatcagccagccctccttacccatcagctccagaggttaaggattcagccttcaagcccaccccccaaccaccccaacaaccatctcttcaggcagcccagtaatagtcctccccccatgagcagtgccatgatccagcctcacggggctgcatcttcttcccagtttcaaggcttaccttcccgcagtgcaatctttcagcagcaacctgagaactgttcctctcctcccaacgtggcactaacctgcttgggtatgcagcagcctgctcagtcacagcaggtcaccatccaagtccaagagcctgttgacatgctcagcaacatgccaggcacagctgcaggctccagtgggcgcggcatctccatcagccccagtgctggtcagatgcagatgcagcaccgtaccaacctgatggccaccctcagctatgggcaccgtcccttgtccaagcagctgagtgctgacagtgcagaggctcacagcttgaacgtgaatcggttctcccctgctaactacgaccaggcgcatttacacccccatctgttttcggaccagtcccggggttcccccagcagctacagcccttcaacaggagtggggttctctccaacccaagccctgaaagtccctccacttgaccaattccccaccttccctcccagtgcacatcagcagccgccacactataccacgtcggcactacagcaggccctgctgtctcccacgccgccagactatacaagacaccagcaggtaccccacatccttcaaggactgctttctccccggcattcgctcaccggccactcggacatccggctgcccccaacagagtttgcacagctcattaaaaggcagcagcaacaacggcagcagcagcagcaacagcagcaacagcaagaataccaggaactgttcaggcacatgaaccaaggggatgcggggagtctggctcccagccttgggggacagagcatgacagagcgccaggctttatcttatcaaaatgctgactcttatcaccatcacaccagcccccagcatctgctacaaatcagggcacaagaatgtgtctcacaggcttcctcacccaccccgccccacgggtatgctcaccagccggcactgatgcattcagagagcatggaggaggactgctcgtgtgagggggccaaggatggcttccaagacagtaagagttcaagtacattgaccaaaggttgccatgacagccctctgctcttgagtaccggtggacctggggaccctgaatctttgctaggaactgtgagtcatgcccaagaattggggatacatccctatggtcatcagccaactgctgcattcagtaaaaataaggtgcccagcagagagcctgtcatagggaactgcatggatagaagttctccaggacaagcagtggagctgccggatcacaatgggctcgggtacccagcacgcccctccgtccatgagcaccacaggccccgggccctccagagacaccacacgatccagaacagcgacgatgcttatgtacagctggataacttgccaggaatgagtctcgtggctgggaaagcacttagctctgcccggatgtcggatgcagttctcagtcagtcttcgctcatgggcagccagcagtttcaggatggggaaaatgaggaatgtggggcaagcctgggaggtcatgagcacccagacctgagtgatggcagccagcatttaaactcctcttgctatccatctacgtgtattacagacattctgctcagctacaagcaccccgaagtctccttcagcatggagcaggcaggcgtgtaacaagaaacagagagttttgtgtacagcttgggaatgaaaaggttgattgtaaacccacagtatctagcagcgttgtgccaaattgcccttgtgtttctctccacccaaaatatcacagctgctttcctcacatttggttcatccgtgtgctgttcttttgggttctgagagggttttgccatgtttgcttgtatgaccaagtcaccaaggaaataaacaggaaggaaatccatgttctccatcttttgtgaaagtatatttgagttggtggttttttgttttgtttgggggtttgtgttttgttttgtttttggtatgttttcttccagaggtgatatactttcttttttttcttcctttcttttttttctttcgttccttttttgaaacaggagagcaaagcagttagagttcagaggccagcggcctcagggccactccctccctagccttcatcagcagagcaccctccatccccctgcattgctcttctgtgaaagcaaatactaaaggatgccatcctctggaatcctaatggcaggcaaagggagagaggaagggtgacggcttctggcacttagaaaacaaaaagaacaaaaaaagagaaacccccaagcctggaacgcagagaggtctttactgctgggatccacggaaaacatgtctgtcctagccaagatcatatgaagagtttggcacggaggctgagaatgacctggcatagatggtttgccagttaggatgtctcaatttgagcctttgcttttggtggataactcagctcccctcttgtaacctggaaagttggttgcctttatcatcctgctggttttatccatggactgaacacccaacagcagtgcactatgctttctatggcatctttcattctcattttatattgtgctataaaaaggattgtttctccatatatatattatatatgtgtgtatatatataatataatatatgtgtatatatatattatatatataatatataatataatatattatatatatattatatatataatatatatataaaatatatatatatatgctctcctctttcagcctctttgtcacagggaagaagtgtaggaggttgccttgggccctgcctctctcctaacctcctcttccccactgggtaccctcagcccctatattttaattcttgatcatgtagaaattgtttttggtaaatgttgatattattgttattatcattattaataaataaagagaaaaggaatttttgtttaaatgagaaatgtttaaccagattctgttctatttgaattgtgacttgcaccttttgttcaaagtatttcctttaggcattgtaattgtgaacagctcttacttgtgccagtgacagatgcagtggtctcctttccccagttgaagcagtgcatacgcagtagctattatttgtgttatctttatttctcttcattgttagaaaccaaagtcttctctgctggctggggctgagagagggtctgggttatctccttctgatcttcaaaacaagagagagaccttgaatacactgactcttccaccctttttttttctgggaaaggagagcaagaggtcccgagtcccctcctagtctttcatcctgaatttgcacagaggaaagcgggtgcccggcatggccatcctgatgttgctggcgggatccccatgcaccttgtccttctccactgatactggcagctcggctcctggacccaagatcccttgagtggaattctgcagtgcaagagcccttcgtgggagctgtcccatgtttccatggtccccagtctcccctccacttggtggggtcaccaactactcaccagaagggggcttaccaagaaagccctaaaaagctgttgacttatctgcgcttgttccaactcttatgcccccaacctgccctaccaccaccacgcgctcagcctgatgtgtttacatggtactgtatgtatgggagagcagactgcaccctccagcaacaacagatgaaagccagtgagcctactaaccgtgccatcttgcaaactacactttaaaaaaaactcattgctttgtattgtagtaaccaatatgtgcagtatacgttgaatgtatatgaacatactttcctatttctgttctttgaaaatgtcagaaatatttttttctttctcattttatgttgaactaaaaaggattaaaaaaaaaatctccagactcaagttgctaaaaa

SEQ ID NO: 30795 - DNA, 2527 bp, Homo Sapiens
acttctggggcagccgtgagcagcgggcacacgggcagccacgaaagcagcagcgagggtggtgcaaacacctcataactacaccgaatccagtagcgcctggcgcccccggcgcgcaaggccgcctctactccgcctcatctttgtcccaagtcctttcacagcctgccttcctcaaacggcccgatgcgcccccgtctttgccggagtaagcagaccgccagcagccggcccgcaggtcagtcgaccctctctggatgcaggtcgccgggaaaacccggagcggagcatccctcgggccgggaaacgccctcggcgcgcacccactggcgcgcatgctcagtccgcgcggcggctgcgagtaggaagctccgcgcggcggcgggggcggcgacggcgactggcgggtgggagtggaggcaccggctggcgggcgggggtacagggacggggcaggggctcccgctccaggttccttgaagcacttccgaccgcgaagcccggcgcgagaagcgagctaacccaagagccaacaacgagcgcggagagggcagcggactgagcggagccgccggccagagcgggctcggagcccgggtctccgccgctcgggacccggctaggcggcggcgggggcggcgatgttccactgcatccccctgtggcggtgcaaccgtcatgtggagagcatcgacaagcgccactgctcgctggtctacgtccccgaggagatctaccgctatgcccggagcctggaggagctgctgctggacgccaaccagctccgcgagctgcccgagcaatttttccagctagtcaaattacgaaagcttggacttagtgataatgaaattcagcggctccctccagaaatagcaaacttcatgcagctggtggaactagatgtgtctcgaaatgagattcctgaaattccagaaagcatttcattctgtaaagcactgcaggtagctgacttcagcggaaacccactgactaggttgccagaaagctttcctgaattacagaatttaacatgtctttctgtaaatgacatctcactacagtctctacctgaaaatattggcaatctttataacctggcttcactggaactgagagagaatcttcttacatatcttcctgactctcttacccagctgcgaagactagaagaacttgatttaggaaacaatgaaatatataatttgaatcaattggagccctcttacatctaaaagatctctggttggatggaaatcaactgtcagaattacctcaggaaataggaaatctgaagaacctgctgtgtttagatgtctctgaaaacaggttggaaagacttcctgaagaaatcagtggcctgacttcattaacggatttagtcatttcccagaacttattagaaacgattccggatggcattggaaaactaaagaaactgtcaatcttgaaggtggatcagaatagactcacacagttgcctgaagcagttggggaatgtgaaagtctcactgagttagttcttacagaaaatcagctcctgaccctgcctaaaagcattggaaaactaaagaagttgagcaacttgaatgcagacagaaataaattagtgtccttaccaaaagaggtatgtgcttttagagaaatcacatgataataattatgaagaaataataataatacataagggatcaaaaatgtcaaatgctttgaaaagacgcatgtgttgttttttaaaggtgtgaactctaaatctgtgagtatagagccaactggaggaattatgtcaaagaatgatcatcagtaacattaaggagagttggaaaaggtgaatttataggattttaaatgggagaaagaaagagattgacattttgggtttgatatacagagaatggtgacaccattggcagaaattgataatttgggagtttgacagaggaagtggatgcctttgggtttgatttttgaatttaatgtgaaattaagctccatcccataagcaattggaattataaaaattgatcttgatgcaaccatatttctgggcagagatttacattgggccatgctcatgtcttggatgaggttgaacaaactgttcacaaaggcatacacatagaggaaggtgaatgggaagctaaagccagcttcctaggactttttttttggttagtagtctaagcacgagaaaatgagacatcaccatctgttgtggagagtagctgtatggactgagaggcatttaaattctggcaagggaggtggaaatgctgacaatgaggaggaagcttatagtgggtcaaacaaggaggtgtctagtgtgttgtttaaaaagaaggcttacaattagccaggcgtggtggcgggcgcctgtagtcccagctactcgggaggctgaggcaagagaattgcctgaacccgggaggctaaggttgcagtgagccgagaccacgccactgcactccagcccgggtgacagagcgagactctatctcaaaaaaaaaaaaaaaaaaaaaaaaaaatg

SEQ ID NO: 30796 - DNA, 6263 bp, Homo Sapiens; identical to SEQ ID NO: 22307

SEQ ID NO: 30797 - DNA, 2770 bp, Homo Sapiens
gtgcttgcggcaaccctgtaaccgccggtgcgcaagttggaggggcaaggggctgccgtgtcctggtctggaggcggcccaggctgccttggtgattctggcttcgcggcctcatggcttgcggccggtttgcgcaacggcctgcgaaccaccaggcgcgtccccgccggcttgggtccgccccgaagcccagtccctcggcctggcccgctatgccctgcacactggcggagtctggcgtggcgcagcccggcgtggggttcggccccgccaggtggtcagcccttcctcggagtccaggtggctgggggcgcttcggagagtggccaggggcccccaaacccggggccgcagagcagtaccagtccgtggcctgttaggaaccaggctacagagcaggagttgccaaaacaaaggggatttggtgatggaggctttgttagaaggaatacaaaatcgagggcatggtgggggatttttgacatcttgtgaagcagaactacaggagctcatgaaacagattgacataatggtggctcataaaaaatctgaatgggaaggacgtacacatgctctagaaacttgcttgaaaatccgtgaacaggaacttaagagtcttaggagtcagttggatgtgacacataaggaggttggaatgttgcatcagcaggtagaagaacatgaaaaaatcaagcaagagatgaccatggaatataagcaggagttgaagaaactacatgaagaattatgcatactgaagagaagctatgaaaagcttcagaaaaagcaaatgagggaattcagaggaaataccaaaaatcacagggaagatcggtctgaaattgagaggttaactgcaaaaatagaggaattccgtcagaaatcgctggactgggagaagcaacgcttgatttatcagcaacaggtatcttcactggaggcacaaaggaaggctctggctgaacaatcagagataattcaggctcagcttgtcaatcggaaacagaaattagagtctgtggaactttctagccaatcagaaattcaacacttaagcagtaaactggagcgggctaatgacactatctgtgccaatgagttggaaatagagcgcctcaccatgagggtcaatgacttggttggaaccagtatgactgtcctacaggagcagcagcaaaaagaagaaaaattgagggaatctgaaaaactattagaggctctgcaggaagaaaagagagaattgaaggcagctcttcagtctcaagaaaatctcatacatgaggccagaatacaaaaggagaagttacaagaaaaagtaaaggcaactaacactcaacatgctgtagaagctataaggccacgggaagaatctctggcagaaaagaagtacacctctcaagggcagggggacttagacagtgtgctctcccagttgaattttacccatactagtgaggaccttctgcaggcagaggtgacttgtcttgaaggcagtttggaatctgtgagtgcaacgtgtaaacagctgagccaagaactaatggaaaaatatgaagaactgaagaggatggaagcacataacaatgaatacaaagcagagattaagaagttgaaagaacagattttacagggtgaacaaagttacagttctgcactagaaggaatgaagatggaaatctcccatctaactcaggagttacatcagcgagatatcactattgcttccaccaaaggttcttcctcagacatggaaaagcgactcagagcagagatgcaaaaggcagaagacaaagcagtagagcataaggagattttggatcagctggagtcactcaaattagaaaatcgtcatctttctgaaatggtgatgaaattggaattgggtttacatgaggcaaaagagatttcactagcagacctccaggagaattatattgaggcattaaataaattagtgtctgaaaatcaacaactacagaaagatttgatgaataccaaatctcagctggagatttctactcagatgtgcaaaaaacaaaatgacaggatctttaaaccaacacacagcagaacaactgagttcaagaatacagagttcaagccaacccatggccagcacagacatgatggaataaagactgagcactacaaaacagatcttcattctccaagaggacaagcgtcggatagtataaaccccatgtctagggtgctaagccccctgagtcctcaaatcagcccttgcagctccaccaggtctttgacttcctactctctatgtaaaactcattctttgccttcagcgctagatacaaatgaagccaatttttctgacactatgtctgagagtatgaatgaccaagaagagtttatatcttcgtgttccttgcctgtatctccccttggttcaatagctaccagatttttggaagaggaggaactgaggtctcatcacattctagagcgcttggatgcccatattgaagaactaaaaagagagagtgaaaagacagtgagacaattcacagccttaaagtagcctcttaaaaaaatcacaatcttggaaataaaaataaacaccaaagagttactgtcatctgaagtagcagctctttaaaaacatgaagagataaaattataaaaatgatacatctaaagcagtggtgaagaaagctgaaaaactgatacttttgataggcattttctctgcactggtttgtttaaaggacttcttccagcaataagttgaaagaataaaccactttgctag

SEQ ID NO: 30798 - DNA, 2875 bp, Homo Sapiens
agaactagtccgctcggcgcccagagcctcgcattacttcccctagctccgccaagcctcgctgcatacgcgcccgcgcgcagtccgccgtcgcgcccctatgacgtcacccacgcgccaccgcttccgggctggggactgggggcggggccgcgcggagggcaagccgggggcggggccggggccagagcagatctccgggcctccgcggccatagctgactgtgccgtcccttcccctcacccgctccacgccctcctgggccgagtggagttgggtggtgtcgggagcctctccctgaggggcaccgcggcttcaggagctgggcctccagtgcggcgcgatgtcaggcgcggtgacagctctgtgagtccgaggccgcggccgtggcgctgggcggctgcggggcctgaccggtccgctcatggtgccgccacgacgccatcgcggggcaggaaggccaggggtgctgagttcttcacctccttttagactgagatctgccaagttttccggcattgctcttgaggatctcagaagggctcttaagacaagactgcaaatggtgtgtgtatttgtcatgaaccgaatgaattcccagaacagtggtttcactcagcgcaggcgaatggctcttgggattgttattcttctgcttgttgatgtgatatgggttgcttcctctgaacttacttcgtatgtttttacccagtacaacaaaccattcttcagcacctttgcaaaaacatctatgtttgttttgtaccttttgggctttattatttggaagccatggagacaacagtgtacaagaggacttcgcggaaagcatgctgctttttttgcagatgctgaaggttactttgctgcttgcacaacagatacaactatgaatagttctttgagtgaacctctgtatgtgcctgtgaaattccatgatcttccaagtgaaaaacctgagagcacaaacattgatactgaaaaaacccccaaaaagtctcgtgtgaggttcagtaatatcatggagattcgacagcttccgtcaagtcatgcattggaagcaaagttgtctcgcatgtcatatcctgtgaaagaacaagaatccatactgaaaactgtggggaaacttactgcaactcaagtagcgaaaattagcttttttttttgctttgtgtggtttttggcaaatttgtcatatcaagaagcactttcagacacacaagttgctatagttaatattttatcttcaacttccggactttttaccttaatccttgctgcagtatttccaagtaacagtggagatagatttaccctttctaaactattagctgtaattttaagcattggaggcgttgtactggtaaacctggcagggtctgaaaaacctgctggaagagacacagtaggttccatttggtctcttgctggagccatgctctatgctgtctatattgttatgattaagagaaaagtagatagagaagacaagttggatattccaatgttctttggttttgtaggtttgtttaatctgctgctcttatggccaggtttctttttacttcattatactggatttgaggacttcgagtttcccaataaagtagtattaatgtgcattatcattaatggccttattggaacagtactctcagagttcctgtggttgtggggctgctttcttacctcatcattgataggcacacttgcactaagccttacaatacctctgtccataatagctgacatgtgtatgcaaaaggtgcagttttcttggttattttttgcaggagctatccctgtatttttttcattttttattgtaactctcctatgccattataataattgggatcctgtgatggtgggaatcagaagaatatttgcttttatatgcagaaaacatcgaattcagagagttccagaagacagcgaacagtgtgagagtctcatttctatgcacagtgtttctcaggaggatggagctagttagctgtctgttgtctgtagcccagcttgataatggaactatacagcgaagagacaatctctggcaagtttttgtagaaaaaatgtttcagtgcctagtctgaaaaataacagtttgagttctttgaaactctaaaatatatttttctcatacctgttttcttcattttcataatgaagcactttgctatgtagctgtgtacatatcactacagttataggaagtttcagtctacagtccatccaaaggaccaacctgccttacacatctcaaggaattcagctgttgaaatcatttgaactaatcaaggaataaatcctaatgttctgggactttattttcacatgttaaatgctggaatatattatgaaaatgttttcaagaaatcacttaagtgttcatagaccagtatttctgacaggtaaaatgctaaaataagctacctgtaataagtgtggattatatttttgggttttgtagaatattgcaaattaaccacacaaaaaatgtttaatttatgcaacaagcatgtttgtgcaaatttcatgggactttaaaaagaataagtatttgagaaaatatctggttcacttacactacatttactgtattattcttttatagcattaggtgccttgtattttaaatctgtgacaaaccatggcaaatttttaaaggggaagtattattataaaatgaagaaatatgtatttctaaaggctatattgctgtaaacttaattgataaagctctgtttaatttagagttttgaagaaatagtctcccttcaattaagaaattttcataatggaatgatttaaattgaagtgacaaagagtattattaaaatacaatgtttatacgtgtaaaaaaaaaaaaaaa

SEQ ID NO: 30799 - DNA, 3045 bp, Homo Sapiens
ggtttgcaggcggaggctacagctagggctgctcagtaactgccccaaccactaccacgtccccaagtgcaacgggacccacggaactacagggtcctgctgagctcaggagctgcacggaatggtggcagtcaccttgccagtgcagcaggcatggatcagactgcaagctaggggcacgaggcatcagttgggaagaggggacgcacagctaggcttgaggcctcttcatcgggatgtccccaggccccccagcccaggcccagcataaaggccgtgttggggggcccccctgacccaaggggggcttcatgcgccacgtgcaggcggagccgtctccatcctcagagccggaggctggcccttcacagcctccagtcaggcagggggccctccagggtggcctgctcatgggctacagcccagcagggggggcgacatcccccggggtctaccaggtatccatcttttcccctccggctggtacctctgagcctcatagggccctgaaacgacaagccccatccactgagggtccccgggagctgaagagaggccctgggctgggggccagagagggactaccccctgaagaaccatctactgtggggctcttaggcccagagggaccggggctgggactaggtgtggccagccagcatttctcccaccgtggcctctgtgttgtggaacagagaagtagtgtcacctcatcttggacttcaggggcctggagtcccccctgccccccatcaaatgcttcctgcaatactttgcacaccagagactgggcctccccagatccagggggacaggggtccctgggggagtccccagggccagcccctccaggccagctgcacacacttgacactgatttgcacagtcttgcacaaatagggggtaagagcccagtggctggggtgggcaatgggggtagcctctggcctagggagtcccctggcactgccaatgggcacagtcccgagcacacaccccctggccctggacccccaggcccctgccccaccaagcgaaggctgcttcctgctggagaagccccagatgtcagctctgaggaagaggggccagcccctcggaggcgccggggatccctgggccaccctactgctgccaacagttctgatgccaaagccacacccttctggagccacctgctgcctgggcccaaagagcctgttttggacccaacagactgcggtcccatggggcggaggctgaaaggagcccgtcgcctgaagctgagcccccttcgaagcctccggaaggggccaggcctgctgagcccccccagtgcctcccctgttcctacccctgctgtcagccgtaccctgctgggcaactttgaggaatcattgctgcgaggacgttttgcaccatctggccacattgagggcttcacagcagaaattggagctagtgggtcatactgcccccagcacgtcacgctgcctgtcactgtcacattctttgatgtttctgagcaaaatgccccggctcccttcctgggcatcgtggatctgaaccccttggggaggaagggttacagcgtgcccaaggtgggcaccgtccaagtgaccttatttaaccccaaccagactgtggtaaagatgttccttgtgacctttgacttctcggacatgcctgctgcccacatgaccttcctgcgccatcgcctctttttggtgcctgtgggtgaggagggaaatgctaaccccacccaccgcctcctctgctacttgctgcacctcaggttccggagctcccgctcaggccgcttaagcctgcatggagatatccgcctgcttttttcccgccggagcctggagctggacacagggctcccctacgaactgcaggctgtgaccgaggcccctcataatccacgttattcacctttgccctgattgccagcactctgaacccatgcgggctaatgacctgcccatcctgctccatcttagagaacatatatggagagacagcaagagacccttcaggcttgaattaaagccctcaccatgctcacgcccaaatggattatttgggtgtttaaagcttctgattcttactacaccctgccctacttcgggtactccatgtgcctgtcccctcccttgggtttcccaggccagcttaggtagtagggaggaactggagctaccctgagattttctcaagttcccaggcaagttatgccagcgttgcctccctgtcctgggcaggggccacttgttattttatttatttttaatttataatttattcaaattggattgccttggtaacctcccacacctgataattggcatcactcctccccgcttcccactctcagatattgctccaacctcaggagttgaagaggcttatgcggtgggggcaggaggagaactgctttccctcagctgagggaagaggggctattccagagggactgagtcagtagccaaagactcagcttcccctgtccttccccagtcccttcacttcccctaccctctgacctatctctgaaagccaagttatgcgtatgtgtgtgtgcacaagcttgtctttgtgtggtatgtgtgtgtgagtgtgcatgtatgcacacacacaggggttaaccacccctcacctagggctccagactccagttgtccctctcctcctacctgtgtctccttgttttggggtcctgactgaagaaggtgtccagggggcagagtcagggccaagcactggggtgcctcctctcacctggccagactctgacccacctacctcagctggggtgaggggcacccctcaaactcagtcatgtggttccaaactaccccattccccactccagactctgacccagcctcagtcctaactcctggggctgggctgaggggaacaagcatttgctgaaacttgaaaaaacaaagcaaatcaaaaacaggaaaaaattgtacctggtacttttttttagaaaaaaagattaaaaaagaaagaataaattcttgtttggaaacttgaaaaaaaaaaaaaaaaaaa

SEQ ID NO: 30800 - DNA, 2943 bp, Homo Sapiens; identical to SEQ ID NO: 25394

SEQ ID NO: 30801 - DNA, 3584 bp, Homo Sapiens
ctcgccggagtagaccgggctgggattggtgtgaggaggggccagagcccgcgggcgtcccgggccgaggcgcgggagaggcggtggacaccgagaagcccgccggcggcttgcaattccctcacccggcgcgcgcctttcgcagagggaaggagcaagagggcccctacctcatcgtgcgcgggtggggtcggcgcttgtcgcgtgtggcgcgcagtggggcgggcggcgggaggggggtggcagtggagggagcgagaggtgcaggggtgactttgttggcagcaggactagctggagagctagacctggaagcgcatccggggaggacttgcggggcagaggagggcgtgggcgtgtctggtatgggatgcagtggaaaggagggggccctcctgagtagatctgtgggtgattccttcgaggacgcctcgtcttcccgtctgcccttttatttgtcagcgagggagtccccatggtctctgttcaagttctggagactttctctttgggtgggcttaatcacctgctactaaatcgtagaactgcccagggccctttctaatattggtcacaaacgtgaggagtatgtcagaaaacagaaaaccgctgctgggctttgtaagcaaactcactagtgggactgcacttgggaactcaggcaagactcactgccccctgtgcttggggcttttcaaagcccccaggctcttgccttgtttgcatacagtttgcaccacgtgtctggagcagctggagcccttctcagtagtggacatccgagggggagactctgacacaagctctgaggggtcaatattccaggaactcaagccacgaagtctgcagtcgcagatcggcatcctttgtcctgtatgtgatgctcaggtggacctgcccatgggtggagtgaaggctttaaccatagaccacctggccgtgaatgatgtgatgctggagagcctacgtggggaaggccagggcctggtgtgtgacctgtgcaacgacagggaagtagagaagaggtgtcagacctgcaaagccaacctctgccacttctgctgccaggctcataggcggcagaagaaaacgacttaccacaccatggtggacctaaaagacttgaaaggctacagccggattgggaagcccatcctgtgtcctgttcaccctgcagaggaactgaggctgttctgtgagttctgtgaccggcccgtgtgccaggattgtgtggtgggggagcatcgggaacacccctgtgacttcaccagcaatgtcatccacaagcatggggactctgtgtgggagctcctcaaaggtactcagccccacgtggaggccctggaggaagccctggctcagatccacataataaacagtgccctccagaagcgagtggaggcagtggcagctgatgtccggacattctcggagggctacattaaggccattgaggagcatcgggacaagctgctgaagcagctggaagacatacgggcccagaaggaaaattccctgcagctgcagaaggcccagctggaacagttactggcagacatgcggactggagtggagttcaccgagcacttgctgaccagcggctcagacttggagatcctcatcaccaagagggtggtggtagaacggctcaggaagctgaacaaagttcaatatagcacccgtcctggagtaaatgataagatacgcttctgtcctcaggagaaagcaggccagtgccgtggctatgaaatttatggtacgattaataccaaagaggttgatccagccaaatgtgtcctacaaggagaagacctccacagagcccgggagaaacagacggcctctttcaccctgctttgtaaggatgccgcaggagaaatcatgggcaggggaggagacaacgttcaagttgccgttgtccctaaagataagaaagacagcccagtcagaacaatggtccaggataacaaggatgggacatactacatttcctacacccccaaggaacctggcgtctatactgtgtgggtctgcatcaaagaacagcatgtgcagggctcgccattcactgtgacggtgaggagaaagcaccgcccacactcaggcgtgtttcactgctgcaccttctgctccagcgggggccagaaaaccgctcgctgcgcctgtggaggcaccatgccaggtgggtacctaggctgtggccatggacacaaaggccacccaggtcatccccactggtcatgctgtggaaaatttaatgagaaatctgaatgcacatggacaggtgggcagagcgcaccgaggagtctacttaggactgtggctctctgatgggtttgtgctcagccttttaaagctgcaggcagcaccacttgagatttccagaggacccagaccttcgttcattctaaagagactgatagaattaaaaacaaagtgccttatcttgcactggagttcaagtgctcttttgttagttattcactgattgtacttgtggatggttgagcacaaaaaaccacctctacatttctcttaaaggtaggttggcaacgttctttttctaccacaggatactccttttcattttgtacagtatggaggtatctattccattggcactgaagggtctaggtagtttagttcctttctgatataaccctttttttttcttttttttttttttttaaagacagagtctcactctgtcacccaggctggagtgcagtggcatgatctcggctcactgcaacctctgcctcccggttcaaatgattctcgtgccttggtgtcccgagtagctgggattacaggttcccccccaccttcccccacacccagctaatttttgtgtttttagtagagacggggtttcaccatgttggccaggctggtctcaaactcctgacctcgtgatccacctgcctcggcctcccaaagtgctggggttacaagcatgagccaccacacctggcctattatgacctttttcatttttctctgagctacacattatttagatatttcccctagagattagaaacctcctttcatcctgtccactttttgttagcatactttcattggatttactggtacatgttttgtgatcatgataatgtgatcttgttttggtggtgtccccctactccgtctctatgccatgacagccttctgccccaaagcctggaagattactctttggtcaagggcatacaaatagaaagttaataaaggggaatggtgttgaaatagaacctcatacatttattacagttctacttatacagaaaatctagacaccttcatccttctcacagctctgttttttagtagagtagtctttagagtagtcttcactgttatctatatacctagaaagttaactgggagctttgactcttactgtgccttcactcatagtgtgccttcttagctgctggagaatttggggagaggatgtacacagcactggtgcctcagccctgccaaggtcttcactgtatatattttgtgtgttcttctgaaactcttgatttcttatatggcaataaactcagcatgtattaaaaaaaaaaaaaaaa

SEQ ID NO: 30802 - DNA, 3834 bp, Homo Sapiens
acagagagattggtgtttttgtgaggcagtgagacctaaggtaacctttatcaaaaggatggagttgggaaaaggaaaactactcaggactggactgaatgcgttgcatcaagcagtgcatccgatccatggccttgcctggaccgatgggaatcaagttgtcctaactgatttgcggcttcacagtggagaggtcaagtttggggactccaaagtcattggacagtttgaatgtgtctgtgggttgtcctgggccccacctgttgcagatgatacacctgttctactcgctgtccagcatgagaagcatgtcactgtgtggcagctgtgtcccagccctatggagtcaagcaaatggctgacgtctcagacttgtgagattagaggatcactacctatccttccccagggctgtgtgtggcacccaaaatgtgctattctgactgtgttgactgctcaggatgtctccattttccctaatgttcactctgatgattcccaggtaaaggcagacatcaacacccagggccgcattcactgtgcatgttggacccaggatggcctgaggctggtggtggcagtaggcagcagcctgcattcttatatttgggacagcgctcagaagactcttcacaggtgctcctcctgcctggtgtttgatgtggacagccacgtctgctccatcacagcaactgtggactcacaggttgctatagctactgagcttccattggataagatctgtggcttaaatgcatctgaaacctttaatatcccacctaacagtaaagacatgactccgtatgctttaccagttattggtgaagtacgctctatggataaagaggcaactgattctgaaacaaattctgaagtatcagtttcttcttcctatttagaacctctggatctaactcacatacatttcaatcaacataagtctgagggtaattctcttatttgtctaagaaaaaaggactacttgacaggaactggccaagattcttcacatttggtccttgtgacctttaagaaggcagttaccatgacgagaaaagtcactattccaggcattctggttcctgatctgatagcatttaatcttaaagcccacgtagtggcagtggcttccaacacttgtaatataattttgatctactctgtcattccatcttcagtcccaaacatccagcaaattcgattagagaacactgaaagaccaaaagggatatgtttcttgacagaccaactattactaattttggtaggaaaacaaaaactcactgatacaacatttcttccttcttcaaagtctgatcagtatgccattagcttgattgttagagaaataatgttggaagaagaaccttcaataacatcaggtgaaagccagactacctactctactttcagtgctccgttaaataaagcaaatagaaaaaagttaattgaaagtctttccccagatttttgtcaccaaaacaaagggctgttgctgacagttaataccagtagtcagaatggaaggcctggaagaacacttattaaagaaatccagagtcctctgtctagtatctgtgatggctccatagctctagatgctgagcctgttacccagccagcatcgctgcccagacacagcagcacaccagaccacaccagcacactggagcctcctcgtttgcctcaaagaaagaacttacaaagtgaaaaggaaacttatcagctgtctaaggaggtggaaattttatctaggaacctggttgaaatgcaacggtgtctttctgaacttacaaaccgtctgcataatgggaagaaatcctcttcagtgtatccactctctcaagatcttccttatgttcacatcatttaccagaaaccttattatctaggtcctgttgttgaaaaaagagcggtgcttctctgtgatggtaaactaaggctcagtacagttcagcagacttttggcctttctctcattgaaatgctacatgattcccactggattcttctctctgctgacagtgagggctttatcccgttaaccttcacagccacacaggaaataatcataagagatggcagcctgtccaggtcagatgtcttcagagactctttttctcacagtccaggtgctgtttcttctcttaaagtctttacaggccttgctgcccccagtttagataccactggctgttgtaaccatgtagatggcatggcttgatatctgcagtgtccttgctgtgtagctcttcagatgagaccattacaaacaaggcctgcttgacactggacactcgccaatgagactcccactgcactcaggcgaagcgcttgccatggtcggctctcctggtttccccctgtttcccctgagctgaggctcgctgctgtgtagcagagctcagtctttattagatggctccgaaagtggtgtttatgtattcatgactgtgtggttttgactaagggcagaattctcagaacaaaacaatattatggtgccatatggatggtgttttatggtttctctgaggctttgtgtcccttgtccaaagctgcattgaagctgtcttaggagcacttaaaagataccttggcattgttataggtctttttcttggcttcaagaggaggttgaggagtctgctggggggcatgtgctctagcatattaacctcaaaccagcaagaattagcagagctccaaggaggaccagagacccactggcttctgctctcaggaacaggaagtggctctgatgttgcctggacctcccagaatttaaaccaaaccctcttgcttccttaacaaattctggctgacgaaggtccaggtactcttaaaaactggccctgggaaaattttgaatgaaatttcaagggaatttgtcccctctgggttccacttgaggttgtgccgatgctgctaccacactgtcgagcccaggtaagtcctactgcaggattttgtgctgtggccactcatgagtgtccctgaaataactttttttttttttaaatccagttttgggatcacgcaactttcctatttttctcccagtagtcagctcccttagttaacttgtcactttaatttgatatttttattttctctccttttaagtcttagagaccagcagagaatctgtgagagaaagtatttcaggaagttagaaattcaaccgaatctgaggtagtcctaaaaagtgccattttgtttcacttatgggctaaagtaccagcttagtcaggtaagagccctgacccacttcagatggtaacaccacttctcactgccttcagatggaatcacagatttcagtcacggcgcataacaaattgatcagtgagtggctaggcatctgcagataaattgtttcagccatagaagctccattagcacatatgcttccttttccccccttcctttaaaatcatctggaaagaaactattttgtgcccttggggactcctgtctgtctgttacagtttaccaagatggagctgggttaggaaagaagtgagggcccattttgtggttcaagtgcactagacagctgctggggtaggaagcacaggcaatgtctgcaatcagctgtgggagagcggtgactgagaacagtctgaggcctggctccacttggaagtatctggggtgcgatgaaatcacaattatcttgaagcctaaagagggaactacaagactgttaactaagatcaatgtgggcacctaaaagggtatgttaaaatcaccatttctcaggtcaaaatactgtgaaataaaaatggaaacggaaaaaaaaaaaaaaaaaaaaaaaaaaaaaaaaaaaaa

SEQ ID NO: 30803 - DNA, 2315 bp, Homo Sapiens
ccgcgccgcatggaggccggctgaggagcgccgctgcctcgcctcggtacgccgcgcggcgcggacggcgcgctccccacaggtgcaggaagccgccgcccagccatggacggggaggagcagcagccaccgcacgaggccaacgtggaacctgttgtgccgtcagaggcttcagagccggtgcccagggtgctttctggagacccccagaacctgtccgacgtggacgccttcaacctgctcctggagatgaagctgaagcggcggcgtcagcggcccaacctgccgcgcactgtgacccagttggtggctgaggacgggagcagggtgtacgtggtggggacagcccacttcagcgacgacagcaagagggacgttgtgaagaccatccgggaggtgcagcctgacgtggtggtcgtggagctctgccaatatcgtgtgtccatgctgaagatggacgagagcacgctgctgcgggaggcccaggagctcagcctggagaagctgcagcaggccgtgaggcagaacgggctcatgtcggggctgatgcagatgctgctgctgaaggtgtctgcacacatcaccgagcagctgggcatggccccaggtggcgagttcagggaggccttcaaggaggccagcaaggtgcctttctgcaagttccacctgggtgaccgacccatccccgtcaccttcaagagggccatcgcagcgctctccttctggcagaaggtcaggctggcttggggcctgtgcttcctgtcagaccccatcagcaaggatgacgtggaacgctgcaagcagaaggacctactggagcagatgatggccgagatgattggcgagttcccagacctgcaccgcaccatcgtctcggagcgcgacgtctacctaacctacatgctgcgccaggccgcgcggcgcctcgagctgcctcgggcctctgacgccgagcccaggaagtgcgtcccctccgtggtcgtgggcgtcgtgggcatgggccacgtgcctggcatcgagaagaactggagcaccgacctcaacatccaggagatcatgaccgtgcccccgccgtccgtctccggcagagtgtctcggttggccgtgaaggccgccttcttcggcctgctgggctacagcctgtactggatgggccgccgcaccgcgagcctggtcctgtcgctgcccgccgcgcagtactgcctgcagagggtgaccgaggcccggcacaagtaggagactgctccccgcccgctcgggcccctgaggagccagtgcccccgcggcacttctgggtgccaggtgcatcctagcccgcccgaggcccctgccaccccccatgggggtctgggcccggcctcgcctgccctcctgggccagtcacccctcccccagcccacccaaataaaggattatttaactgtctgagctcaggcctcccggcagcccctcccctcccacactgcaggggccgttccccagcttctggacaagacacccagctccgagggggcaggggcttataggaggggccgaggcgtgcgctgccctctcagccctggtggcaggcgggggacaatggccactgtccctacctcactgtgccttcctgtgctccggccacaggagcgtcggcccaggggcggctcctgggggctccagggcaggcgagactgggaaaggcccagccctggagctccagccgaccccaccgtgcccctggcatcctggccctggccgccacctccctggcaccgtctgcctgcagggattctgtgtttttggcttttttaatgtcttaaaatcttttactcaggtaattttaatttcagagagaaaaactgaagtaaatgtcaaaaaacaccagccttaaatccaaagggagagaattcgtgttcttgggtctgtcccgagtgggctcgcgtgcagccaaacatcagctctgggtccaggcgtggcctcagctgggagcctgtgtcctgagcccccggagcgaaggggtgcctggggcatcttggccctctctgggcagacaatgtgtgcacctatgtggaaggccaaggacatgggctgtggccaggcctgtcccgctcaggccccctgcccggcggccgtctgtgtgcggggcctccctcctggctgtccaggacacagcccgtgcagccccagcctggacccaggccatctctggttgtgtctgtgccgactcggtgttgaatcaaatcaggtgtgcgtcaggagccggctgtgtccttcctgccacactcggggattcattccttagaaactgaaataaattctaattttggaaactc

SEQ ID NO: 30804 - DNA, 1796 bp, Homo Sapiens
tgcagccgcgctcacctccgcggtccgccccggcgccccgggacccgttagtgcccagcctgcgggccgaccgcgaccaccgcccggcgcgagcctgcccccagctctgccgacacttgacccagaccagtcccaacgcccagtgcggccgcccggggagccgcgggagaggcggcggcggggggaggagggagaggagggccgagccggcggcacgggaggcccggttttgaagccgcttctctgcccgagttaggtttcgcccagcgcaatttctttctctatgtactttgcgaataagtttcggagcatcggttaacagcctatgggtgaaatttggctttcattcatgaatgagaaattattcttgacagaagtattttaaaagaaaaatctttacgatggcctcagcagtacttagttctgttcccaccaccgcttctcgttttgccctgttacaagtggatagtggcagtggctctgattctgaacctggaaaaggtaaaggtcgaaatactggaaagtctcaaactttaggaagcaagtcaactacaaatgagaaaaaaagagagaaaagaagaaaaaagaaggaacagcaacagagtgaagcaaatgagctcaggaatcttgcttttaagaaaattccccagaaatcctcccatgctgtttgtaacgctcaacatgatcttccattgtcaaacccagtacagaaggattcacgagaagaaaattggcaagagtggagacaaagagatgagcagctgacatctgaaatgtttgaagcagatcttgagaaggcattgttactaagtaaactagaatatgaagagcacaaaaaggagtatgaagatgctgaaaatacttcaactcagtccaaagttatgaataaaaaagataaaagaaagaatcatcagggaaaagacagacctctcacagtatcactaaaagattttcattcggaagatcacattagtaaaaagactgaggaattgagttcttctcagactttatcacatgatggaggattcttcaatagactggaagatgatgttcataaaattcttattagagaaaaacgaagagaacagcttacagaatataatggaacagataattgtacagctcatgaacacaaccaggaagtggttctgaaagatggaagaattgaaagactaaagttagagcttgaaaggaaagatgctgaaatccagaagctgaaaaatgtaatcactcaatgggaggcaaagtataaggaagtaaaggcaagaaatgcacaattattgaaaatgcttcaggaaggtgaaatgaaagataaggcagaaatacttctgcaagttgatgaatcacaaagtatcaagaatgagctcactattcaggtgacttcacttcatgctgcattagaacaagaaagatctaaagtgaaagtattacaagcagagttagccaaataccagggtggcagaaaagggaaaagaaactctgaatccgaccagtgtaggtgattacattagcctttgaagtcaacacaaagtttaaaacttccaggattttgcaaagttgtatatatttaatgctgtgcaactgctaaactatgcagtttttcttgaaggaactaaaagcaactagctccctaatggtctataattttatttcttttggcttaaagtgaaaaagaagaaatagagaattccagcagaattcagtggttgtctactatccatacttcttatcactttagtttttcatcagtcaataaaattaatttactcttccactaaaaaaaaaaaaaaaaaaaa

SEQ ID NO: 30805 - DNA, 3997 bp, Homo Sapiens
ctggccccaaggtccgatcgcccaggggaggagcagcaccgggaccccgcgtcggctgggcgccccacaagggaagccagtcttaatatgatggaaacatctctgaacttctaaaagaccaaggttggcgttttagctctattaattttacttcgtcttggccagaattcacaatgacaacagtgacagtgaccacagaaattcccccaagggataagatggaagataattctgccttgtatgagtctacgtccgctcacattattgaagaaaccgagtatgtgaaaaagattcgaactactctgcaaaagatcaggacccagatgtttaaagatgaaataagacatgacagtacaaatcacaaactagatgcaaagcactgtggaaaccttcaacagggctctgattctgaaatggatccttcttgttgcagtttggatttgcttatgaaaaagataaaaggaaaagacctacagctcttagaaatgaacaaagagaatgaagtattgaaaatcaagctgcaagcctccagagaagcaggagcagcagctctgagaaacgtggcccagagattatttgaaaactaccaaacgcaatctgaagaagtgagaaagaagcaggaggacagtaaacaattactccaggttaacaagcttgaaaaagaacagaaattgaaacaacatgttgaaaatctgaatcaagttgctgaaaaacttgaagaaaaacacagtcaaattacagaattggagaaccttgtacagagaatggaaaaggaaaagagaacactactagaaagaaaactgtctttggaaaacaagctactgcaactcaaatccagtgctacatatggaaaaagttgccaggatcttcagagggagatttccattctccaggagcagatctctcatctgcagtttgtgattcactcccaacatcagaacctgcgcagtgtcatccaggagatggaaggattaaaaaataatttaaaagaacaagacaaaagaattgaaaatctcagagaaaaggttaacatacttgaagcccagaataaagaactaaaaacccaggtagcactttcatctgaaactcctaggacaaaggtatctaaggctgtctctacaagtgaattgaagaccgaaggtgtttccccttatttaatgttgattaggttacggaaatgaactggctggatgaagatctgatttagaaagactgcgtgagtcttatttattctctgaaacacagcccaagtttcatgttaaaatggcaaaatgccattatttaaatggaacttattacataccaatggctttgcaagaagatgacatttcagaagatcaaacaaatctatatttaatggatggactcttcaaaacttaccaaatagttgaagaaaccaggtgccttctcatgatggaagacagattctgctttaaattaaaaaaaaaaaaaatctgaatcttgttttcagatttttttttctactgggattgttttaagattgtcaattctgacttttttatagtggtttttaagagtataaatagaagggagagtgtatatgtgtatgaatgaacatacatttcctgcatatatatgtatgaagggcatgtatatgtatgaatgagcaaacatatttgaaagttaacttttggatgataggaaagatcgtacagtgacataagttcatctcctgatccattgtttgtgggagaattatacttgactgaattatgggcaggagaaagagcagattccttttagctaattccccaacccatatgcccctctgaagttgagaatcatggctgcctcaccacacatcagagaatgactgttcttcttagttctgggattaaaaattggtttctagaggtaacctgtacacacaaacgcacagggatgcacatggtttcctctgcctttgtgactaattttcttcttgatagttattaatagtatctaaataaaatattggggggatagaaaaataatgctgttagctcatacttccatgaaaatgtatatattataggctcaaaggaataatgactgctgtctgcagccagaaagaatctgaatttatgaattggaaagatatatatagtgtatttgtgaaagtttgcttaaattctgatacatgccttctttgtaggtggagtttgtgattgcagtgaatagaacaaattctgacttgcagaaatgcagacatacagtcaggaaagaacaaacttcaattaaatgtataatgagagaccttggtccccctaaaggatgaatttcctttaggcctttgatcttcctctctagtgtataactttaaatatttgctcagaaaagatgctgactctttcattatggaatgtgaaatatcagtgttgtctataaatatttgaaggtatataaaaatgagatgatgtaatgtatttataaatttatccaagtactgtaatccttgaattgttgtgtaactgtgtgtgagttttatgcttcatggtatttttggaaacatttttattgcttgcttattttgaaggtatatttatctgttaacatttagggcatagttaccttataccagcaacaagtctaagcactttacttgtattaatttattttatcttccccaaggccctcagaagcagattattcctgttttacagagaaagatactgagagtggttgagtaatttgcccagctgctaactgtgaagcaaaaatttgaaccttttgacttggctattgatattcattctacttgctcacatggtggtctaagaaatttcccagctatagaaatctctctatttttgccactttaatcaacacatagcttcctggatgactgcctgtgttattttgtggatgacagtaagaaacaacaaatactgataaaatcaatattttgctgaaatgagttgatctttcaccagctggactaccattgtgagaactcagttcagacaaacttccctgctaaaaatctgtttatcatacatttattatttatgactttatgtcacattgaagaatttcttcatgatacattttcaggcacacttgtaggaaaattaggatcatgagtcctgctttaagtatttgcagtgtagtaagagaatccatcttttactaggagaccagattccttttatacctcattcatcatgctggattgtaataaatttcagattttggaatgggcttatttaactgacctaacaatcttgatgatttccattagaataacttattctaaggtcaaaagtggaaagacactgttggtttttattttgatttcactatactcatttttgaacatggaaatacagtggtgaaaccacctatgcaaaaatgataacagtgaggaaattatgacagtgaaagagatctgacctaactatctatcttgcctcgaaactgcccttggtcgttcctgagtgtgggccaagctaactttgggagaaatttactttataggttaaattataatagcccttcccaaaactaaacgattctcctgcctcagcctcccgagtagctgtctttataataccatcagccttatcatttattcgtcatgtatggattgtttcctatatccactatcataaaattatcatttgaaatatttttttatgaaaaaaaaaacacttctcagtgaaaaaacaagattacaagggggaataatatttattcagctaaaatagtacttcacaggaaatataggaaaagaaacactagttcagttttattccaaataatgtacttctaattatactcttgaatttattggataagaaggtctgaggtgggtctgaaattcatacatgaagtcaggaaaagaaaagaaacttagttctaccttgattacatatgttgttacaaattatcattataaaatgtttaaacaattagtatagtatatcttttgaataattgcttataatatgccttaccataaagaaaattgatgctaaaaaaaaaaaaaaaaaaaaaa

SEQ ID NO: 30806 - DNA, 2805 bp, Homo Sapiens
atggtccgaggggggcggggctgacgtcgcgctgggaatgccctggccgagacactgaggcagggtagagagcgcttgcgggcgccgggcggagctgctgcggatcaggacccgagccgattcccgatcccgacccagatcctaacccgcgcccccgccccgccgccgccgccatgtacgacgcagagcgcggctggagcttgtccttcgcgggctgcggcttcctgggcttctaccacgtcggggcgacccgctgcctgagcgagcacgccccgcacctcctccgcgacgcgcgcatgttgttcggcgcttcggccggggcgttgcactgcgtcggcgtcctctccggtatcccgctggagcagactctgcaggtcctctcagatcttgtgcggaaggccaggagtcggaacattggcatcttccatccatccttcaacttaagcaagttcctccgacagggtctctgcaaatgcctcccggccaatgtccaccagctcatctccggcaaaataggcatctctcttaccagagtgtctgatggggaaaacgttctggtgtctgactttcggtccaaagacgaagtcgtggatgccttggtatgttcctgcttcatccccttctacagtggccttatccctccttccttcagaggcgtgcgatatgtggatggaggagtgagtgacaacgtacccttcattgatgccaaaacaaccatcaccgtgtcccccttctatggggagtacgacatctgccctaaagtcaagtccacgaactttcttcatgtggacatcaccaagctcagtctacgcctctgcacagggaacctctaccttctctcgagagcttttgtccccccggatctcaaggtgctgggagagatatgccttcgaggatatttggatgcattcaggttcttggaagagaagggcatctgcaacaggccccagccaggcctgaagtcatcctcagaagggatggatcctgaggtcgccatgcccagctgggcaaacatgagtctggattcttccccggagtcggctgccttggctgtgaggctggagggagatgagctgctagaccacctgcgtctcagcatcctgccctgggatgagagcatcctggacaccctctcgcccaggctcgctacagcactgagtgaagaaatgaaagacaaaggtggatacatgagcaagatttgcaacttgctacccattaggataatgtcttatgtaatgctgccctgtaccctgcctgtggaatctgccattgcgattgtccagagactggtgacatggcttccagatatgcccgacgatgtcctgtggttgcagtgggtgacctcacaggtgttcactcgagtgctgatgtgtctgctccccgcctccaggtcccaaatgccagtgagcagccaacaggcctccccatgcacacctgagcaggactggccctgctggactccctgctcccccaagggctgtccagcagagaccaaagcagaggccaccccgcggtccatcctcaggtccagcctgaacttcttcttgggcaataaagtacctgctggtgctgaggggctctccacctttcccagtttttcactagagaagagtctgtgagtcacttgaggaggcgagtctagcagattctttcagaggtgctaaagtttcccatctttgtgcagctacctccgcattgctgtgtagtgacccctgcctgtgacgtggaggatcccagcctctgagctgagttggttttatgaaaagctaggaagcaacctttcgcctgtgcagcggtccagcacttaactctaatacatcagcatgcgttaattcagctggttgggaaatgacaccaggaagcccagtgcagagggtcccttactgactgtttcgtggccctattaatggtcagactgttccagcatgaggttcttagaatgacaggtgtttggatgggtgggggccttgtgatggggggtaggctggcccatgtgtgatcttgtggggtggagggaagagaatagcatgatcccacttccccatgctgtgggaaggggtgcagttcgtccccaagaacgacactgcctgtcaggtggtctgcaaagatgataaccttgactactaaaaacgtctccatggcgggggtaacaagatgataatctacttaattttagaacacctttttcacctaactaaaataatgtttaaagagttttgtataaaaatgtaaggaagcgttgttacctgttgaattttgtattatgtgaatcagtgagatgttagtagaataagccttaaaaaaaaaaaaatcggttgggtgcagtggcacacggctgtaatcccagcactttgggaggccaaggttggcagatcacctgaggtcaggagttcaagaccagtctggccaacatagcaaaaccctgtctctactaaaaatacaaaaattatctgggcatggtggtgcatgcctgtaatcccagctattcggaaggctgaggcaggagaatcacttgaacccaggaggcggaggttgcggtgagctgagattgcaccatttcattccagcctgggcaacatgagtgaaagtctgactcaaaaaaaaaaaatttaaaaaacaaaataatctagtgtgcagggcattcacctcagccccccaggcaggagccaagcacagcaggagcttccgcctcctctccactggagcacacaacttgaacctggcttattttctgcagggaccagccccacatggtcagtgagtttctccccatgtgtggcgatgagagagtgtagaaataaagac

SEQ ID NO: 30807 - DNA, 3532 bp, Homo Sapiens; identical to SEQ ID NO: 23480

SEQ ID NO: 30808 - DNA, 4127 bp, Homo Sapiens
acactcgctctcgcacactcggtgacacgcccgcgcgcgcgctcacccacacgcccggccgccggcgccctcccagctggtccaccccggcggggcccgcgcccccggcccgcccgcctggcaccgcgccccggggctggggccgagcgaggagcccgcgaggcggcgagagggcgagcgccaggcaggccggcccggggcccccgccccccgcgcccccgcccgatggggaacgctccgtcccaagatccggagcggagcagcccccccatgctgtctgcggacgatgcggagtacccgcgggagtaccggaccctggggggcgggggcggcgggggcagcgggggccggcgcttctccaacgtggggctggtgcacacgtccgagcggcggcacacggtgatcgcggcccagagtctggaggcgctcagcgggctccagaaggcggacgccgaccgcaagcgtgatgccttcatggaccacctgaagagcaagtacccacagcacgccctggccctgcgaggccagcaggacaggatgcgagagcagccaaactactggagtttcaagacccgcagctcacgccacactcagggagcccagcccgggctggcagaccaggcggcaaagctgtcctacgcctccgccgagtcgctggagaccatgtcggaggccgagctgcccctgggcttcagcaggatgaaccgcttccgacagagcctgcctctctcccgctcggccagccagaccaagccgcgctccccaggggtgctgttcctgcagttcggggaggagactcggcgcgtgcacatcacgcacgaggtcagcagcctggacacgctgcacgcactcatcgcgcacatgttcccgcagaagctcaccatgggcatgcttaagtcgcccaataccgccatcctcatcaaagacgaggctcgcaacgtcttctacgagctggaggacgtccgggacatccaggaccgcagtattatcaagatctacagaaaggagcccctctacgctgccttccctggctcacatctcaccaacggggacctccggagagagatggtgtacgcatcgcgggagtcctcgcccacgcggcgcctcaacaacctgtcaccagcgccgcacctggcatccggctcgccgccgcccgggctgccgtcggggctgccgtccgggctgcagtccggttcgccgtcgcgttcgcgcctatcgtacgccggggggcgcccgccttcgtacgccggcagcccggtgcaccacgcggccgagaggctgggaggcgccccggccgcccagggcgtcagccccagccccagcgccatcctggagcggcgcgacgtgaagccggacgaggacctggcgagcaaggcgggcggcatggtgctggtgaaaggcgagggcctctatgctgacccctacgggctgctgcacgagggccgtctgagcctggccgcggccgccggcgacccgttcgcctacccgggcgccggcggcctctacaagcgcggctcggtgcgctcgctcagcacctactcggccgccgcgctgcagtccgatctggaggactccctgtacaaggcggcgggcggcggcggcccgctgtacggcgacggctacggcttccgcctgccgccttcgtcaccgcagaagctggccgacgtggcagcaccccccggaggtcccccgccaccgcacagcccctactcggggccgcccagccgcggctcgccagtgcgccagtccttccgcaaggactcgggctcctcgtccgtctttgccgagagtcctggagggaagacccgcagcgcggggagcgcctcgacggccggagctcccccttcggagctcttccctgggcctggggaacgctcgctggttgggttcgggccgccagtgccagccaaggacacggagaccagggagcgcatggaggccatggagaagcagattgccagcctcacaggcctggtgcagagcgccttactgcgaggctctgagcctgagacccccagcgagaagattgaaggctccaatggagcagccaccccctcagcaccctgtgggtcaggcggccggagcagcggggccaccccggtgtccggcccgcccccgccctcggccagcagcacccccgcaggtcagcctaccgccgttagccggctgcagatgcagcttcacctgcgaggcctgcagaacagcgccagtgacttgcgcggccagctccagcagttgcgcaagctccagctacagaaccaggagtcggtgcgcgcgctgctgaagcgcacggaggcagagctgagcatgcgcgtgtcggaggcggcgcggcggcaggaggacccgctgcagcggcagcgcaccctggtggaagaggaacggctgcgctatctcaacgacgaggagcttattacccagcagctcaatgacctggagaaatcggtggagaagatccagagagacgtgtcccacaaccaccggctggtgcccggccctgagctggaggagaaggcactggtgctgaagcagctcggggagacgctgacagagctcaaggctcacttcccgggcctgcagagcaagatgcgggtggtgctgcgcgtggaggtggaggcggtgaagttcctgaaggaggagccccagcgcctggatgggctcctcaagcgctgccgcggggtcacggacacgctggcccagatccgaaggcaagtggatgagggtgtgtggccaccccccaacaatctcctgagtcagtcccccaagaaggtgacggcagagactgacttcaacaagagcgtggacttcgaaatgccaccccccagccccccgctgaacctgcatgagctgagcgggccagctgaaggagcctctcttacccccaaggggggcaaccccaccaaaggcctggacactcctggcaagagaagcgtggacaaagctgtgtctgttgaggctgcagagcgagactgggaggagaagcgggcagccctgacccagtacagtgccaaggacatcaaccggctgctggaagagacacaggcagagctgctcaaggccatccctgacctggactgtgccagcaaggcccatccaggcccggcccccactccagatcacaagccccccaaggccccccacggccagaaggcagccccccgaacggagcccagtgggaggaggggctcagatgagttgaccgtgccccgataccgcacagagaagccctccaagtcgcccccaccgccccctccccgccggagcttcccctcctcccatggcctgaccaccacacgtaccggagaggtggtggtcaccagcaagaaggactcggccttcatcaagaaggctgagtccgaggagctggaggtgcagaagccccaggtgaagctgcgccgggctgtgtctgaggtggcccgcccagcctccacaccacccatcatggcctcggccatcaaggacgaggatgacgaggatcgcatcatcgcagagctagagagtggcggaggcagtgtaccacccatgaaggtggtgactccgggggcctctcggctgaaggcggcccagggccaggcgggcagccccgacaaaagcaaacatggcaagcagagggccgagtacatgcggatccaggcccagcagcaggccactaaaccatctaaagagatgagcgggtcgaatgagacctcgagcccagtctcagaaaagccctcggcttccagaacctctatccctgtattgacttcctttggggcaaggaattcttccatctccttctagaagcccctcaccccgctgccccgcctgtccccctccctcactcctgccatttctcccctctcttccttcatctccaccccaccccaccctactccccagaccctggggcctggctggggaaggtccgcacctggggagagctgggagctgttgaaggtttggggggaggggaaacgggttgtgtttcttcatttctttttttgtttttgcctttgttggttcatccttgttttctagctttggatcatttttgtaccaaggcgagcaagcctttttgaaaaataacaaaagaggaaaaaaaaaatccctcctggaaaaaaaaaaaaaccctggaaaaaaaaaaaaaaaaa

SEQ ID NO: 30809 - DNA, 2394 bp, Homo Sapiens
gcggccgccccgcccccgctcccgccgccgcccgccagtcagtcagtcagtcagtcagtcagtcagtcagtcagtcactgagcgcgcggcgcgggagctgctggcagtcgctgcgtctctggcgagggagcgccgcgcctggggaggaggcggaggcagcggctggaggagcgcgagcggcggtttccttgcccggggccgcgggaaggccgaccgactgccgcgatggagcagctatcagatgaagaaattgatcatggtgctgaagaagacagtgacaaggaagatcaggacctggacaaaatgtttggagcctggcttggagaactagacaaactcactcagagtttggattctgacaagcccatggaaccagtaaaaagatctcctcttcgccaggaaacaaacatggccaacttttcttaccgcttctccatatacaacttgaatgaagctctgaatcagggagagactgtggatctggatgccttgatggctgatctttgctctatagagcaggagctcagcagcattggttcaggaaacagtaagcgtcaaatcacagaaacgaaagctactcagaaattgcctgttagccgacatacattgaaacatggcaccttgaaaggattatcttcttcatctaataggatagctaaaccttcccatgccagctactccttggacgacgtcactgcacagttagaacaggcctctttgagtatggatgaggctgctcagcaatctgtactagaagatactaaacccttagtaactaatcagcacagaagaaccgcgtcagcaggcacagtgagtgatgctgaagtacactctattagtaattcctcccattccagcatcacttccgcagcctccagcatggactctttggatattgataaagtaacacgccctcaagagctggatttgacacatcaagggcagccaattactgagcatgctatttctctgagatgttccagcaagcaggccaagcgtcatattgacttcacagaagaacaggctgagctgacacctcactcctatctggacagggaaacctcccttcttctgagaaacattgcaggaaaaccttctcatttgctgaccaaggaagaacaggcagcaaaattgaaagctgagaagatcagagttgccctagagaaaattaaagaggcacaagtgaaaaagctggtgatcagagtccacatgtctgatgacagttctaaaacaatgatggtggatgagaggcagacagtaagacaagtactggataacctgatggacaaatcccactgcggttatagtttagactggtcactggtagaaaccgtttctgaattacaaatggagagaatctttgaagaccatgaaaacttggttgaaaatcttcttaattggacaagagatagccaaaacaagcttatatttatggagcgtatagaaaaatatgcacttttcaaaaacccacagaattatcttttggggaaaaaagaaacagctgagatggcagatagaaacaaagaagtcctcttggaggaatgtttttgtggaagttctgtaactgtaccagaaattgaaggagtcctttggttgaaggatgatggcaagaagtcctggaaaaagcgttattttctcttgcgagcatctggtatctactatgttcccaaaggaaaagcaaaggtctctcgggatctggtgtgctttctccagctggatcatgtcaacgtttattatggccaggactatcggaacaaatacaaagcacctacagactattgtctggtgctgaagcatccacaaatccagaagaaatctcaatatatcaaatacctttgttgtgatgatgtgaggacactgcatcagtgggtcaatgggatccgcattgcaaagtatgggaagcagctctatatgaactaccaagaagccttgaagaggacagagtcagcctatgattggacttccttatccagctccagcattaaatcgggatccagttcttccagcatcccagagtctcagtcaaaccactccaatcagtctgatagcggagtttctgacacccagccagcaggacacgtccgttcccagagcattgtgagctccgtattctctgaagcctggaaacgaggcactcagttggaagagtccagcaaggtaacagcttcgttttaatttacattgaaaattctgtggtattcttttgggtttaaattgttgctctcttatgtctttatcggggatcttatttggccttatttcagtctcctttattaattttcaatcttcctaattgtagtgggtaaagacagttcagagagacctgttgatttgacttccccttggaaatgagtattttacaaattggctctaatgacttaaaatctcaaaaaa

SEQ ID NO: 30810 - DNA, 3892 bp, Homo Sapiens
gcaagcggcgatggcggcggcggcgggagctgcagcggcggcggccgccgagggggaggcccccgctgagatgggggcgctgctgctggagaaggaaaccagaggagccaccgagagagttcatggctctttgggggacacccctcgtagtgaagaaaccctgcccaaggccaaccccgactccctggagcctgctggcccctcatctccagcctctgtcactgtcactgttggtgatgagggggctgacacccctgtaggggctacaccactcattggggatgaatctgagaatcttgagggagatggggacctccgtgggggccggatcctgctgggccatgccacaaagtcattcccctcttcccccagcaaggggggttcctgtcctagccgggccaagatgtcaatgacaggggcgggaaaatcacctccatctgtccagagtttggctatgaggctactgagtatgccaggagcccagggagctgcagcagcagggtctgaaccccctccagccaccacgagcccagagggacagcccaaggtccaccgagcccgcaaaaccatgtccaaaccaggaaatggacagcccccggtccctgagaagcggccccctgaaatacagcatttccgcatgagtgatgatgtccactcactgggaaaggtgacctcagatctggccaaaaggaggaagctgaactcaggaggtggcctgtcggaggagttaggttctgcccggcgttcaggagaagtgaccctgacgaaaggggaccccgggtccctggaggagtgggagacggtggtgggtgatgacttcagtctctactatgattcctactctgtggatgagcgcgtggactccgacagcaagtctgaagttgaagctctaactgaacaactaagtgaagaggaggaggaggaagaggaggaagaagaagaagaggaagaggaggaggaagaggaagaagaagaggaagatgaggagtcagggaatcagtcagataggagtggttccagtggccggcgcaaggccaagaagaaatggcgaaaagacagcccatgggtgaagccgtctcggaaacggcgcaagcgggagcctccgcgggccaaggagccacgaggagtgtccaatgacacatcttcgctggagacagagcgagggtttgaggagttgcccctgtgcagctgccgcatggaggcacccaagattgaccgcatcagcgagagggcggggcacaagtgcatggccactgagagtgtggacggagagctgtcaggctgcaatgccgccatcctcaagcgggagaccatgaggccatccagccgtgtggccctgatggtgctctgtgagacccaccgcgcccgcatggtcaaacaccactgctgcccgggctgcggctacttctgcacggcgggcaccttcctggagtgccaccctgacttccgtgtggcccaccgcttccacaaggcctgtgtgtctcagctgaatgggatggtcttctgtccccactgtggggaggatgcttctgaagctcaagaggtgaccatcccccggggtgacggggtgaccccaccggccggcactgcagctcctgcacccccacccctgtcccaggatgtccccgggagagcagacacttctcagcccagtgcccggatgcgagggcatggggaaccccggcgcccgccctgcgatcccctggctgacaccattgacagctcagggccctccctgaccctgcccaatgggggctgcctttcagccgtggggctgccactggggccaggccgggaggccctggaaaaggccctggtcatccaggagtcagagaggcggaagaagctccgtttccaccctcggcagttgtacctgtccgtgaagcagggcgagctgcagaaggtgatcctgatgctgttggacaacctggaccccaacttccagagcgaccagcagagcaagcgcacgcccctgcatgcagccgcccagaagggctccgtggagatctgccatgtgctgctgcaggctggagccaacataaatgcagtggacaaacagcagcggacgccactgatggaggccgtggtgaacaaccacctggaggtagcccgttacatggtgcagcgtggtggctgtgtctatagcaaggaggaggacggttccacctgcctccaccacgcagccaaaatcgggaacttggagatggtcagcctgctgctgagcacaggacaggtggacgtcaacgcccaggacagtggggggtggacgcccatcatctgggctgcagagcacaagcacatcgaggtgatccgcatgctactgacgcggggcgccgacgtcaccctcactgacaacgaggagaacatctgcctgcactgggcctccttcacgggcagcgccgccatcgccgaagtccttctgaatgcgcgctgtgacctccatgctgtcaactaccatggggacacccccctgcacatcgcagctcgggagagctaccatgactgcgtgctgttattcctgtcacgtggggccaaccctgagctgcggaacaaagagggggacacagcatgggacctgactcccgagcgctccgacgtgtggtttgcgcttcaactcaaccgcaagctccgacttggggtgggaaatcgggccatccgcacagagaagatcatctgccgggacgtggctcggggctatgagaacgtgcccattccctgtgtcaacggtgtggatggggagccctgccctgaggattacaagtacatctcagagaactgcgagacgtccaccatgaacatcgatcgcaacatcacccacctgcagcactgcacgtgtgtggacgactgctctagctccaactgcctgtgcggccagctcagcatccggtgctggtatgacaaggatgggcgattgctccaggaatttaacaagattgagcctccgctgattttcgagtgtaaccaggcgtgctcatgctggagaaactgcaagaaccgggtcgtacagagtggcatcaaggtgcggctacagctctaccgaacagccaagatgggctggggggtccgcgccctgcagaccatcccacaggggaccttcatctgcgagtatgtcggggagctgatctctgatgctgaggctgatgtgagagaggatgattcttacctcttcgacttagacaacaaggatggagaggtgtactgcatagatgcccgttactatggcaacatcagccgcttcatcaaccacctgtgtgaccccaacatcattcccgtccgggtcttcatgctgcaccaagacctgcgatttccacgcatcgccttcttcagttcccgagacatccggactggggaggagctagggtttgactatggcgaccgcttctgggacatcaaaagcaaatatttcacctgccaatgtggctctgagaagtgcaagcactcagccgaagccattgccctggagcagagccgtctggcccgcctggacccacaccctgagctgctgcccgagctcggctccctgccccctgtcaacacatgagaacggaccacaccctctctccccagcatggatggccacagctcagccgcctcctctgccaccagctgctcgcagcccatgcctgggggtgctgccatcttctctccccaccaccctttcacacattcctgaccagagatcccagccaggccctggaggtctgacagcccctccctcccagagctggttcctccctgggagggcaacttcagggctggccaccccccgtgttccccatcctcagttgaagtttgatgaattgaagtcgggcctctatgccaactggttccttttgttctcaataaatgttgggtttggtaataaaaaaaaaaaaaaaaaaaaaaaaaaaaa

SEQ ID NO: 30811 - DNA, 2559 bp, Homo Sapiens
atgctccccacggaggtcccccaatcccacccgggcccctcagcgttgcttctgctgcagctgttgctgccccccacatctgccttcttccccaacatctggagcctgctggctgcccctggctccatcacccaccaagacctaactgaggaggcagcgctcaacgtcaccctgcagctcttcctggagcagccacccccaggccgcccccctcttcgtcttgaggacttcctgggtcgaacactccttgctgatgacctctttgccgcctactttggacctggttcttctcggcggttccgagcagccttaggtgaggtgtctcgtgccaatgcagcccaggacttcctgccaacttccaggaatgaccccgacctgcactttgatgctgagcgactgggtcagggacgcgcgcgcctggtaggggctctgcgggagaccgtggtggcagccagggcccttgaccacaccctggctcgccagcgcctcggggctgcacttcatgccctgcaggatttctacagtcatagcaactgggtggagctgggcgagcagcagccacaccctcacctcctctggccaaggcaggagctccagaacctggcacaagtggccgatcctacctgctccgattgcgaggagttgagctgccccaggaattggctgggcttcacactcctcacctctggctactttggaactcatcccccgaaacctccagggaaatgtagccacgggggccattttgaccggagcagctcccagccaccgaggggaggcatcaacaaggacagcacatccccaggcttctcccctcaccacatgctgcacctccaggctgcaaaactggcccttctagcctccatccaggccttcagccttctgcgaagccgcctgggagacagggatttctccaggctgctggacatcaccccagcctccagcctgagctttgtcctggacaccacgggcagcatgggtgaggagatcaacgctgccaaaatccaggctcgccaccttgtggagcagcggagaggcagccccatggagcctgtccactatgtcctggtgccttttcatgacccagggttcggccctgtctttacaaccagtgaccctgacagcttctggcaacagcttaatgagatccatgccttggggggtggagacgagcctgagatgtgcctgtcagccctgcagctggccctgctgcacacacctccactctcagatatctttgtcttcacggatgcctcccccaaggatgcctttctcaccaaccaggtggaatccctgactcaggagcggcgctgccgggtaacattcctggtgactgaagatacatcaagggttcagggtcgagctcggcgtgagatcttgtcccctctgcgttttgagccatacaaagcagtggccctggcctcaggaggagaggtgatcttcaccaaagaccagcacattcgagacgtggcagccattgttggggagagcatggctgccctggtgactcttcccctggaccctcctgttgtggtgcctgggcagccacttgtgttcagcgtggatgggctgctccagaagatcacagtccggatccacggagacatcagcagcttctggatcaagaaccctgcaggggtctcccagggccaggaggaaggcgggggtcctctaggtcacactcgccgctttgggcagttctggatggtgaccatggatgaccctccacagacaggaacctgggagatccaggtcacagctgaggacacccctggggtgagagtgcaagcccagacctccctggacttcctcttccactttgggatccccatggaggatggaccccaccctggcctctaccccctgactcagccagttgcaggtcttcagacccagctgctggtagaagtgacagggttgggttccagagccaatcctggggatcctcagccgcatttctcccacgtcatccttcgaggggtcccagagggtgccgaactaggccaggtgcccttggagcccgtgggacctccggagcgaggtctcctcgcagcctcgctgtcgcccacgctgctgtccacccctagacccttctccctggagctgattggccaggacgcagcggggcggcgcctgcacagggctgcccctcagcctagcactgtagtccctgtccttctggagcttagtggcccctcgggtttcttggccccgggcagcaaagtcccgctcagtctccgcatcgccagcttctcgggccctcaggatcttgaccttaggactttcgtcaaccccagcttctccctcacctccaacctctccagggctcacctggaactgaatgagtcggcctggggccgcctgtggctggaggtcccagattcagcggccccggattccgtggtgatggtgactgtgactgcagggggacgagaagccaacccagtacccccgactcatgctttcctccggctcctggtatcggccccagccccgcaggtgaggaactactactttccatcacagggaccggcacaccacccctaccggctcatctga

SEQ ID NO: 30812 - DNA, 2261 bp, Homo Sapiens
aacccaagcgggacaaggacttttggggggaggtcaaagggcacgaagttgtgcctacagctgttaccatagtaaccgaggaccggatgtggcgatcttggcggtgcgacagtcctcttctcaggccctctggcccgagagcctgttgactctgtgacacactctgaggagctggttgtggtgttttccagcgagggaagaaaagagtaattttttcaaagcatttatagaaacgcagcaaagggaaggtgtgaggttgccgccatgcctggcagaacggagggaggcagttggctccggaatgcggccgccgcagatgttctccgcaaccttccggaagtggaatggcgggagcctcagcattgctgcccaccgaccccccggaagcggaaacagaatccccgcgtgccccttcctcactaccctccaaatcccgctgcagccattgccgcagacacgatgccgaaacgaaagaagcagaatcatcaccagccaccgacacagcagcagcccccgctgcccgagcgggaagagactggagatgaggaggatgggagtcccatcggaccacccagccttctgggccctccccccatggccaatggaaaacctggcgaccctaagtcagctcttcacagaggtcctccaggatcaaggggaccactgattccaccactgctgagtctcccacctcctccttggggtagaggcccaattcggagagggcttggccccaggtctagcccatatggtcgtggttggtggggagtcaatgcagaacctccttttccggggccaggccatgggggtcccaccaggggaagctttcacaaggaacagagaaaccctcgaaggctcaaaagctggtctcttatcaagaatacctgcccgcccaaggatgacccccaggttatggaagacaaatccgaccgccctgtctgccgacattttgccaaaaagggccactgtcgatatgaggacctctgtgccttctaccatccaggcgtcaatggacctcctctgtgagactgtgccttcccatccaggctggaaggagctctctgtgacctagcggccatttatttctctgtagccctatgatggctactgtgaggctcttctaacaccctcagtcagtgacacacccatcccatccaccacttcccccgtgtggggtccagagtggtgttgcatcactggtgcgcggcatacgcgctttcttctgatccagcctgtagagactcgcctttgggacccatctttgcttcctttcagttgcctcctggatcttctttcccgtcatcaaatgactgctgaacaggaaacctctttggtgctgtttcttgtgcatctgtccacctgttccccagtattgccctcaattcctgagagccctggagcggtttcctaccattcccttcttttagctgcttgttttaagtcctttttatgtgacattccctacccccaatgttgtcagctgcttgtgaaactcagccaggttgtctaacctggggtcaagtttgggtgactggtgcagagttacttcctaaaaggccactctccctgcctttggatttcatagtttctctgtcagtagcatgatccccaccgctatggtctatctatgatcaccgtgctttgtgaaactgtgcatccccttgtagcctttctcagtgtccgtggcatttttgtgacttcccagcactagaataagttttcctgccaaaatgagtgaggcgcttggtgccctctggactttcccacttcccaacatgggagaattgtgaactttccatcagactgcctccctggccctccccattcttctcctgttggttattctgagtctgacacagacccatgacatgtcttataaagcctccaatggctttatcctacctagatcccttccagcccattttaattagactatgtcattgtgaggccaccagtccattcatttgaattctgtgaatctccaccttgcctatctttgggtagaagctggacagtactgttgccctcttccaatcctcttcccctacatccctggcactggttgttttctgtgaaaacagcagtgaacaggttcagttttgaactggccctgaggaaatgggtcaggagttgtattggcaagagggaggggtgagagctgttggagaactgagaatgaggttttttttttttttttctttttaactttttttatattagtaataaatgcagtggaaaccagcattttatttaaaaaaaaa

SEQ ID NO: 30813 - DNA, 1538 bp, Homo Sapiens
gcgggcccgggagcggcgcagcatctgcgggcggcggggtttcgagctcgccgggccgtgtcgcgccatgcccgctggctgagcgccgcagggcctcgtcccgccaggcgtgggggccgcgcgcgcccaggccggggcccggcggccgaccatggtgctgccgcccccggaccggcgccacgtgtgcctgaccacgctggtgatcatgggcagcatggccgtcatggacgcgtacctggtggagcagaaccagggcccgcgcaagatcggcgtgtgcatcatcgtgctggtgggcgacgtgtgcttcctgctggtgctgcgctacgtggccgtgtgggtgggcgccgaggtgcgcacggccaagcgcggctacgccatgatcctgtggttcctttacatcttcgtgctggagatcaagctctacttcatcttccagaactacaaggcggcgcggcgcggcgcggcggaccccgtggcgcgcaaggcgctgacgctgctgctgtctgtgtgtgtgcccggcctgttcctgctgctcgtggcgctggaccgcatggagtacgtgcgcaccttccgcaagcgcgaggacctgcgcggccgcctgttttgggtggcgctggacctgctggacctgctggacatgcaggccagcctgtgggagccgccgcgctccgggctgccgctgtgggccgagggcctcaccttcttctactgctacatgctgctgctggtgctgccgtgcgtggcgctcagcgaggtcagcatgcagggcgagcacatagcgccgcagaagatgatgctgtacccggtgctcagcctcgccaccgtcaatgtggtggccgtgctggcgcgcgccgccaacatggcgctgttccgggacagccgtgtctcggccatcttcgtcggcaaaaacgtggtggcgctcgccaccaaggcctgcaccttcctggagtaccgccgccaggtgcgcgacttcccgccgcctgcgctatcactggagctgcagccgccacccccgcagcgcaactcggtgccgccgccgccgccgccgctgcacggcccgcctgggcgcccccacatgtcctcgcccacgcgtgaccccctggacacgtgacagggcccgcgcggcccccgacacgcccctggggcgcagagacaccgggttggcttggggcgcgcggtttgcatgggatggggtgggggcgggctcccctagggacaggtgcctcgagtgcccgtgcctggggtcccgcggccgcttcttcatctcaggaatctctcggaccgcggatcctcagcccccgctccaccagcccgccccagcgcgtgggtctgtttgggaggcctgggccggagcagagcagaggtgatccggcccctgcctgctgggccgcccgggttggaagggagggcagtgtgggcggagatctgctccttcggtgggggcctctggctcagatttggggccaaggaggcctctgtcattttaaagactcgtgtttacagttttgtatccaaggccaaaaaaaaaaaaaaaaaaa

SEQ ID NO: 30814 - DNA, 6331 bp, Homo Sapiens
gtcccgcagtggctggagccctgggcgctgcaaagcgtgtcccgccgggtccccgagcgtcccgcgccctcgccccgccatgctcctgctgctggggctgtgcctggggctgtccctgtgtgtggggtcgcaggaagaggcgcagagctggggccactcttcggagcaggatggactcagggtcccgaggcaagtcagactgttgcagaggctgaaaaccaaacctttgatgacagaattctcagtgaagtctaccatcatttcccgttatgccttcactacggtttcctgcagaatgctgaacagagcttctgaagaccaggacattgagttccagatgcagattccagctgcagctttcatcaccaacttcactatgcttattggagacaaggtgtatcagggcgaaattacagagagagaaaagaagagtggtgatagggtaaaagagaaaaggaataaaaccacagaagaaaatggagagaaggggactgaaatattcagagcttctgcagtgattcccagcaaggacaaagccgcctttttcctgagttatgaggagcttctgcagaggcgcctgggcaagtacgagcacagcatcagcgtgcggccccagcagctgtccgggaggctgagcgtggacgtgaatatcctggagagcgcgggcatcgcatccctggaggtgctgccgcttcacaacagcaggcagaggggcagtgggcgcggggaagatgattctgggcctcccccatctactgtcattaaccaaaatgaaacatttgccaacataatttttaaacctactgtagtacaacaagccaggattgcccagaatggaattttgggagactttatcattagatatgacgtcaatagagaacagagcattggggacatccaggttctaaatggctattttgtgcactactttgctcctaaagaccttcctcctttacccaagaatgtggtattcgtgcttgacagcagtgcttctatggtgggaaccaaactccggcagaccaaggatgccctcttcacaattctccatgacctccgaccccaggaccgtttcagtatcattggattttccaaccggatcaaagtatggaaggaccacttgatatcagtcactccagacagcatcagggatgggaaagtgtacattcaccatatgtcacccactggaggcacagacatcaacggggccctgcagagggccatcaggctcctcaacaagtacgtggcccacagtggcattggagaccggagcgtgtccctcatcgtcttcctgacggatgggaagcccacggtcggggagacgcacaccctcaagatcctcaacaacacccgagaggccgcccgaggccaagtctgcatcttcaccattggcatcggcaacgacgtggacttcaggctgctggagaaactgtcgctggagaactgtggcctcacacggcgcgtgcacgaggaggaggacgcaggctcgcagctcatcgggttctacgatgaaatcaggaccccgctcctctctgacatccgcatcgattatccccccagctcagtggtgcaggccaccaagaccctgttccccaactacttcaacggctcggagatcatcattgcggggaagctggtggacaggaagctggatcacctgcacgtggaggtcaccgccagcaacagtaagaaattcatcatcctgaagacagatgtgcctgtgcggcctcagaaggcagggaaagatgtcacaggaagccccaggcctggaggcgatggagagggggacaccaaccacatcgagcgtctctggagctacctcaccacaaaggagctgctgagctcctggctgcaaagtgacgatgaaccggagaaggagcggctgcggcagcgggcccaggccctggctgtgagctaccgcttcctcactcccttcacctccatgaagctgagggggccggtcccacgcatggatggcctggaggaggcccacggcatgtcggctgccatgggacccgaaccggtggtgcagagcgtgcgaggagctggcacgcagccaggacctttgctcaagaagccataccagccaagaattaaaatctctaaaacatcagtggatggtgatccccactttgttgtggatttccccctgagcagactcaccgtgtgcttcaacattgatgggcagcccggggacatcctcaggctggtctctgatcacagggactctggtgtcacagtgaacggagagttaattggggcacccgcccctccaaatggccacaagaaacagcgcacttacttgcgcactatcaccatcctcatcaacaagccagagagatcttatctcgagatcacaccgagcagagtcatcttggatggtggggacagactggtgctcccctgcaaccagagtgtggtggtggggagctgggggctggaggtgtccgtgtctgccaacgccaatgtcaccgtcaccatccagggctccatagcctttgtcatcctcatccacctctacaaaaagccggcgcccttccagcgacaccacctgggtttctacattgccaacagcgagggcctttccagcaactgccacggactgctgggtcagttcctgaatcaggatgccagactcacagaagaccctgcagggcccagccagaacctcactcaccctctgctccttcaggtgggagaggggcctgaggccgtcctaacagtgaaaggccaccaagtcccagtggtctggaagcaaaggaagatttacaacggggaagagcagatagactgctggtttgccaggaacaatgccgccaaactgattgacggggagtacaaggattacctggcatcccatccatttgacacagggatggacacttggccggggaatgtccagggagctctgaagctggcagccttaaagatgcaagtgcatgaaggacagtgatgtggggaggccgtggggcagctcttttcatggcttgtacacgcctcagctcctggcaattagctggactccatgacccacccctggtgcagcatagatccgacgtctgtctgggcgaagggtaggggtgggtaggggcgggaagcctgagtgcaaatgtcatttccctctactgcctcttcctgcctctccccaccctgcccacatccacagaggggagagaagggtcatagctaaatgcaacaaagtctgtatcttgtcccaacctgcttttctgttctgttagcatatcataaagtaagcctttctggtgaaggaaggttgctatgaaactttttttcttggtggaaatggacaagtttaggcactctgctttttgccttacactaatgcttagaaagctgtcttttcagtggtgttgcagcccccagatgtgtggccaacctctgctgcaaaggaatctcttgctgagtccaggccaccaatcaggcaaatagcccatacatttgatcgttgtaaaccatgaagtcttttcttgcaagacgtttttcttctgctgtggtatcttgcccttaaaaattagttttcattaaaaagaaatttgattgaaaatagaaacatctacagctcagatactgatctctttctagtgggctttgtaaaccacttgactttgctaatggctattctccaatttgttccaataagctaagggcttttcatacacaggacaactccatgtggttgattttactggcatgtcttggtgacgaagagttggccaagtgaatgatgcatcttttacttggagctctccagcctttgtcatagttcccagaccttttttccttgtggtcatccaggaggtgatcaattacatgtgcacagtgctaggacgggaggcagagccggctcagagcaggtccaccagcccacctatagcaggaagcgtgtcggtgcttaggaaatctaggacttccagcttccctcatgtcagatagaaaaaaagtcaggaaaccagctcgtggacaggggctttggttccaaaacttggacaaacctgatgccttaaggaaaaggttaagatgagagggggcttccagagtcaatgaacgtcacccttcagccgacggataccgggagcgcttgggcaaaacagcagagaaagaaagactgtggtcggggaagtggaatgcttcgatgcaggccagagttcaaggctctggggctggcctcacaagaggcttcttccacggggcttgacaccagagcagcccccgcgtgaaatgagaaggcatgcttagcactgggaggaaaagctgagttaagaaaattctttatcatgtttgccttccctggggaaacattcaggcagtaaaatgacatccacgtgttcctgtcggacgcagcggcttcgggaacaagttagcgctgggggactatctgggctcgtctctctctgcttcgtgaacccaccacaccagggcctgtctgctgtgctatttatttgccttccgtcttcccaacctcagctgcctgtattcatgccagaggtgcaaaggctgccagccagtgctgctgacagatgctttcagactgtagagctcagagaaagggagcggcagctagaggtagccagggagctggccaggctccccggggccttcctattatgtaaatcccagctggacagacagccctggagccaggtggccctgtcccctgtggagcacttggagcagtgatctgttgttccaggtgtaagtctcgacactgcagaaatgaggacgttattaggaaagaccagttcctactgcctgtgttgctactttaagagctgagaaaaacattccaatgagctatccatagctaacttgcttgctcagaaaaacataagtaacaaagttgagctttcatttttaaaaattatattttactttagaaaaatatcaccttttttcttcctcttctttacgtgtagatctttttttttttttcaaatggggtcagtacctgaaagcccgaaaccccataccaagcttatagttaggacctttgcatttgataaaaaaaaatatagtattttctgttgtccagaaaatcttcccagatagggaaactgaggcagagagtgccgtggagtggtttttgccaagtcatacaacatacttaatgcagggctacactgaacctccagaatcattttgtttgctttgaccctgtttcaccatctgggcaatcatttattttccttgagcatttataaaccagggcgagggttgttccaaaatgagtaattgaatgagatgaagaaatatgtcataattagaggagataaatctccttgttatcacaatagttaatgtgtcatgatcactgactaactgggaccttgaacaagtcagcatctctgcctttcaaaatgaaggaacattgttctctatcctcccctgaccccccacggccccatgctaggtgcaccatcttcctccatttgactttttaatgctttacaacttcaggctaaagggaggggatgttgggaggagaaaccatcacaagattccctcggtgccacagctgtgctgaggaggccggggactgggaatcggagtgggcacctctgtgtttctctagggagtaacattcaacatttaattgaatcgtgtatcctgataggtggattaggaacaggattcattcctttaactttaacttttggctaaacgacatgccttggattgagtgtatatgtcttccccaaattcatatgttgaagcttaaatcctgaatgtgatggttcttggaattgggacctttggaaggttattgggtcttgagggcagagccctcacgaatgggattaaggcccttataagaagagacatggggccaggtgcagtggctcacacctgtaatcccaacattttgggaggccgagaagggtggatcatgaggtcaggagatggagaccatcctggccaacatggtgaaacctcgtctctactaaaaatacaaaaattagctgggcgtggtggtgcgtgcctgtagttccagctacttgggaggctgaggcaggagaatcgcttgaaccaggcagtcggaacttgtagtgagccaagatcacgccactgcactccagctggagtgacagagccaaactccgtcaaaaaaaaacaaaacaaaacaaaaaaaagacatgggagagatggtgtttttcctctccaccacctggggatacgatgagaagatggccacctgcaagccaggaagacggccctcaccagacaccatgtctgctggcaccttgatcttggacctcccagcctccagaactgtgagaaataaatgtgttttgtttaagctaaaaaaaaaaaaaaa

SEQ ID NO: 30815 - DNA, 1242 bp, Homo Sapiens
cgtgagtgccgctgacagaagtcaagagaatcggctgggacggggttggggcgacaacgggccgggggggacccgacaggccagagccccttggggaggagcggcggctggaggcgcgaggctcctccggatgcccggagagccgcttgcgacttaactcccgcctctttcccagatgccgcgtcactgctccgccgccggctgctgcacacgggacacgcgcgagacgcgcaaccgcggcatctccttccacagacttcccaagaaggacaacccgaggcgaggcttgtggctggccaactgccagcggctggaccccagcggccagggcctgtgggacccggcatccgagtacatctacttctgctccaaacactttgaggaggactgctttgagctggtgggaatcagtggatatcacaggctaaaggagggggcagtccccaccatatttgagtctttctccaagttgcgccggacaaccaagaccaaaggacacagttacccacctggcccccctgaagtcagccggctcagacgatgcaggaagcgctgctccgagggccgagggcccacaactccattttctccacctccacctgctgatgtcacctgctttcctgtggaagaggcctcagcacctgccactttgccggcctccccagctgggaggctggagcctggccttagcagccccttttcagacctactgggccccttgggtgcccaggcagatgaagcaggctgcagcgcccagccttcaccagagcggcagccctcccctctcgaaccacggccagtctccccctcagcgtatatgctgcgcctgcccccacccgccggagcctacatccagaatgaacacagctaccaggtgggcagcgccttactctggaagcggcgagccgaggcagcccttgatgcccttgacaaggcccagcgccagctgcaggcctgcaagcggcgggagcagcggctgcggttgagactgaccaagctgcagcaggagcgggcacgggagaagcgggcacaggcagatgcccgccagactctgaaggagcatgtgcaggactttgccatgcagctgagcagcagcatggcctgaggggctgctggactgaccgaggggctgcccagcaagactgcagcctcttcctccctcagatcccaccagacccaccaggtgccataataaagcggattctagacggagaaaaaaaaaaaaaaaaaaaaaaaaaaaaa

SEQ ID NO: 30816 - DNA, 1013 bp, Homo Sapiens
ccaagacgagcgcggtcgcggaagtatcgcggcttacatatctcgcagccaggcgggtcctgggagaggcgcgagccaggcctggtcggcgcccgcggagaaaagaagcagtcaagcccatgaactacaaccccggttgccgctttctcctctcctaaccgttaagtgcgctaagggccatggctgaggtgcacgtgatcgggcagatcatgggggccagcggtttctcggaaagtagcctcttctgcaagtggggcattcacacaggggcggcatggaagctcctgtcaggcgtgcgggagggccaaacgcaagtggacaccccgcagataggggacatggcttactggtcccaccccatcgacctgcacttcgccaccaaaggtcttcaaggctggccccggctccatttccaggtgtggtcccaggacagctttggccgctgccagcttgcaggctatggattttgccatgtgcccagtagcccgggcacccaccagctggcctgccccacgtggcggcccctgggcagttggcgagaacagttggcacgggctttcgtgggtggtgggccgcagctgctgcatggggacaccatctacagtggggccgaccgctatcgcctgcacacagctgctggtggcaccgtgcacctggagatcggcctgctgctccgcaacttcgaccgctacggcgtggagtgctgagggactctgcctccaacgtcaccaccatccacaccccggacacccagtgatgggggaggatggcacagtggtcaagagcacagactctagagactgtcagagctgaccccagctaaggcatggcaccgcttctgtcctttctaggacctcggggtccctctgggcccagtttccctatctgtaaattggggacagtaaatgtatggggtcgcagggtgttgagtgacaggaggctgcttagccacatgggaggtgctcagtaaaggagagcaattcttaaaaaaaaaaaaaaaaaaaaaaaaaaaa

SEQ ID NO: 30817 - DNA, 6930 bp, Homo Sapiens
aatgttcttaaattattcctgatttttttttaaccaagctgccaagaaaagaacgtattcccctcttagtcctattctaatttttatgtgagtgaatctaaactgctgaggaaaaccatatgtgattgttaaattatatatatctatatttttactccgcgcaaggcttattcttctacatccatagatgcttgagaagctctgtttttgtcattcatgtacattttcctttggaaaaagaaagcgcctattttactaaccaaagacttgatttttaccctcttcatttttattccctcctaaaaataagcccaattggatccaagtcaatgttttaagagatttttttaagagttgttttttctttcagagaccagaattccaaatcagaacaatttaaggtgataagctgcgatctttgagctagctataaataagacatttcaagcaagcaagcaaacaacttaaatttggggtagaggaaaaaaaaggcgtgagacatcaggttgtcattttttattgtgagattctgctcctaaaaataataaatgggggattacgggtttggagtgctagtgcaaagcaatactgggaataaatctgcttttccagtcagattccatccacatctgcagcctccacaccatcaccaaaatgccacccccagccctgctgcttttataaataataacacagctgccaatggcagcagtgctgggtcagcttggctttttcctgctccagctacccataacattcaggatgagatcttggggtcagaaaaagcaaaaagtcagcaacaggaacagcaagaccccttagaaaagcagcagctttccccaagtccaggtcaggaagctggaatactgcctgaaacagagaaggcaaaatcagaagaaaatcaaggggacaattcttcggaaaatggcaatgggaaggagaaaataaggatcgaatctccagtgttgacagggtttgattatcaagaagccactgggctaggtacttcaacccaacccttgacatctagcgcatcgtctcttactggtttcagtaactggtcagcagcgatagcgccttcctcctctacaataatcaatgaagatgcaagtttctttcaccagggaggggtccctgctgcttcggctaataacggtgctctgttgtttcaaaatttcccccatcatgtcagccctggctttggaggcagcttctctcctcagatcgggcttctctcacagcaccacccacatcaccctcatttccagcatcatcacagccagcatcagcagcaaaggaggtctcctgccagtccccatcccccacccttcacacatagaaatgctgcttttaaccagctgcctcatttggcgaataatcttaacaaacccccctctccgtggagcagctaccagagtccgtcaccaacaccctcctcttcctggagcccgggcggtggtggatatggtggctggggaggttcccaaggccgagatcaccgcagagggctgaatggtggaataacgcccctgaactccatctcgcctttgaagaaaaattttgcaagcaatcatattcagctccagaagtatgctcgccccagctctgcctttgcacctaaatcctggatggaagatagcttgaacagggctgacaacatttttccttttccggatcgccccaggacattcgacatgcactcactggagagttcactcattgacataatgagagctgaaaatgataccattaaaggtcgtctaaactattcatatccaggatccgatagctctctgcttattaatgcaaggacatatgggcgaaggagaggtcagtcttcactgtttccaatggaagatggattcttggatgatggccgtggggatcagcctcttcatagtggcctgggttcacctcactgcttcagtcaccagaatggggaaagagtggaacgatattctcgaaaggtgtttgtaggcggattgcctccagacattgatgaagatgagatcacagctagttttcgtcgctttggccctctgattgtggattggcctcataaagctgagagcaaatcctattttcctcctaaaggctatgcattcctgctgtttcaagatgaaagctctgtgcaggctctcattgatgcatgcattgaagaagatggaaaactctacctttgtgtatcaagtcccactatcaaggataagccagtccagattcggccttggaatctcagtgacagcgactttgtgatggatggttcacagccacttgacccacgaaaaactatatttgttggtggtgttcctcgaccattacgagctgtggagcttgcgatgataatggatcggctatatggaggtgtgtgctacgctgggattgataccgaccctgagctaaaatacccaaaaggagctgggagagttgcgttctctaatcaacagagttacatagctgctatcagtgcccgctttgttcagctgcagcatggagagatagataaacgggtggaagttaagccatatgtcttggatgatcagctgtgtgatgaatgtcagggggcccgttgtggggggaaatttgctccatttttctgtgctaatgttacctgtctgcagtattactgtgaatattgctgggctgctatccattctcgtgctggcagggaattccacaagcccctggtgaaggaaggcggtgaccgccctcggcatatttcattccgctggaactaaaggataactgcagtgctcattttcaggcctcagaataagtgcactcttctgttcattctgaccccttcctcaacctcttcacgctggcatgtccttttgtagcagtctgtaacttaactatagtataatgaaaagaatgacctataatataggtgttttgtagattcttgtgtcactgcaaacaatatgaactcctttttcgtattgccatcgggttgcatggaagttttattctcttgttttgctggaaaccaagaggatccaaacttcctgcaacattttcttagaggagagagagaaatattaaaagagaaatgaaacaatagagtattttgggtttttaattaaattattgttaataatataacatataagaatacttttattaaaataaccatgcaacaataacactatcggtctatctgacagtttttcccccagggaagtgcttttgccttttcctttctatttttttttttttttcatcttttttgtctctctcttttttccatccctttttaatttttttaacagcaatggaggaagttaacaatttttaatggaaagagcatgttagagcaaacaaatgcataagcaagactgagcagcattataattaattttcagggttttgaggctgaacataatttcattatccctcaaaaagttaccaccacatcagaaaaaataaaaaaaaaatagtaaagtaggcagagctaggtttattttctcttaaacaatttttaaaattcagaatgtaaaaattgggtaaatttactactgaggggagtgcacttatttatttaacttacttatctggtcaaagccccaggaaacctaccaaagctagaattaatgacaactggtgggaaacctagcatttcctctcctgaagaataaatgtataaatgttatttttgatgtttatatataaactctatatcctaatttactaatactcatcagatgtcagcctttgctctccattttgacgttaaaaaacaacaacagatctagagatacctcaaggatatcatttttgattttgtgttacagtacacttgtagccaaaactggaagacaaaaccaatatataatttggctgctgattggcttacttttagatttaaagttactttgggtatcctgtaatttagttgtaacatagaaaatgaaaaaacagttaaaaaaagtgaagtagttgcaaagtgttttgcactgttgaactaagtaactgtgtaaatctgtgcaaaggtacgtatgtttatcttactcttcctataaactaaaataacattacagtttccgaatttagcatgggacatagtcagtgtttgaagtgccaacttcatcaagtaatgcatgctttattataaataaaattctagctttgaaaggcgttatgtgttgaacagtatgcttcaggggtaaatttaaaatagtctcttgaagccctagtcatggaagtaacttttattttaattgacattctcttattaaatgccctatccatcattaaaaggtttattatcagtgggcaaaacatgaaataatatgatcgaatggcaatcttgctagttgcgctacctaacagtaccatcttggatccttcaaaaccaaagacttgccccagcactgctgtggaaccacctggcttatgacccctatggatgatctttaggaaaagcagccctttacttttaatacaggctttaatgaactatacctgttaagttccaaaggtcaaaatggaggcatttgctgtctaatattcaaacatagaaagggagctgcttttaaagaattccctgcaaatactgaaagcagtcatgcgaatggagggtgctcttgtgtagctggtcagggacttttttttcttttctcctgaactacatgattctaattggaatgttcatttgcctctttttactcttttaaatgcttgtaggtggcttggggtgtgctatcgtgctgttcctactcagtaaacaggtgtgatgagttaacaagaaataacactgtttgagaactagctttgaataataatttttccctttgtacatgacctgctgaatttcggtacagtgtttttgtagctaacttattttgtcatgcacataatgtatatttgttatgcactacttttgtatatcttgtttttccaacagtgaacatttttaggcacacttttcactgacgggatatctctttatgcaatacctcaatttttcatattgcaaagagtagctttttgtacttttattactgagagatcttcatatacttcattttttaatataaataattttaataaattttattttcttatattctgctttttatacatttcagtgctctgcatacattttaaattatgaatgtcgtgcactggcaatgctattttagagtctgcagagaagagaaagcatgttgcttaaacatccttccccagcaccagctattggtgtacctataatttaagaaatagtctatgtaaagtcacaaattaatgaaaaaaattcgcatgaaaatgacagataacactgtagttcctaaaaaaaaaattaaatgcataagcataaggtagaaattaaaataacaaaattgtccacagcttcttactaagtttttaaaattattcataaaatgcagacatttttggtgaatgtttagccatttttaatattaataaattgatgttaagtgtttgattcagagatgtctgctcttttaaattatatataaggaaaaaaaatagcctgccttgggacaggtgtgtaatgttagtgtgcatgactaatgtaagaaattgttattctactaatatttacttgtgattgtgtgacaagtgtgtttacagattattggttacacttcaatttacagggcataaacaatgattatctattactctgaactttatgattacatgttcttcagattacatgggattgtagttgggagttaccatgtaactcaaacataattaacatgtaattagtttacagattgtagggcatcacttcaattcaccaagcatgtagttctagcgcactagcatggcgccagccatgtacttacaatgtagttacagagtaattacatggtgatttttgcaatgtaaaataaagtgtttctgattattttctatgtaaaggaaccctctcctttccccttctggtccctgcgctttggtataatatatatacttctccatacacagacctctgcagaatgcaaaataaaacttgcagtgaatgaatttagcattttatgagagtgctgttggaaagacttgataattcaccccttttgttttgaagagttgaatcttctgttaaaaggtgatttaaaacttgaatgtgatgaattgtggcaagttaacttcaagttatgtgcaatacttatttcaaacttttgaaagatctttgcagtgtaattctttgtttttaattgcagacatttaaaaatgtcattttctactgttaagagtaatcctctttcttgctggtgtttctaaagaaaagaatcagaaatcaatctttctactaatgtaaatttgagattatttttaaaaatggaataaaagaggttttggtcatttgctttattttattattttaaagctactgtgattgatagcattgtaagaatcgggacaatattgtattcaactgttttattttttatatttttaaaatttaaagtataattagtttttataattttcatcagatttttgttatattttttggaagtgaaacttttagcaagtgggtgtctagtttttactaatccctaattttttttccagtgtattgctcatattatcagaaggaaaagttatttaagtatgtcagttaattgtactacttggctgaatttccatatagtttttactgtgtatggggaggttgtagtatttattatagcattttaaataagggtaattcattttttattaaagtcattttcacgttaagttcctatttttgtatgttctactcttaagttatataacacagttccttttttaaaagagttcatttgttgaagtgctagtgaaaaattaatgttattaaatagtttgcaaatgactatttataccagtatgcatataatttttaaatatttgtaatgtgagatgttgaatgaataaaacttttaactcaaaaaaaaaaaaaaaaaaaaa

SEQ ID NO: 30818 - DNA, 3300 bp, Homo Sapiens
atgcgccgcctgcgctccgccgctcgcgcctcgggctcggctcgggctccgggatgtccgcgctgtgcgaccctcccggggccccagggccacctgggcctgccccggccacccacggtcccgcgcctctcagtgctcaggagctgtcccaggaaatcaaggcttttctgactggcgtagaccccattctgggccaccaactctcagcccgggaacatgctcgctgtggtcttctcctgctccgttctttgccacctgctcgggctgctgtgcttgaccacttgagaggtgtctttgatgagagtgtccgggcccacctggctgccctggatgaaacccctgtggctggtccacctcacctccgtccacctccaccctctcatgtccctgctggtggacctggtctagaggatgtggttcaggaagtgcagcaggtgctgtctgagtttatccgggccaacccaaaggcctgggcacctgtgattagtgcatggtccattgacctcatggggcaactgagcagcacgtactcaggccagcaccagcgtgttccccacgctactggcgctcttaatgaactgctacagctgtggatgggttgtagggccacgcgtacattaatggacatctatgtgcagtgcctctcggctctcattggtagctgcccagatgcgtgtgtggatgccttgctggatacctctgttcagcattctccacactttgactgggttgtggcacatattggctcctcttttcctggcaccatcatttcccgggttctctcctgtggccttaaggacttttgtgtccatggtggggctggaggtggagctggcagtagtggtggaagctcttctcagaccccctctacagaccccttccctggatctcctgccattcctgcggagaaacgggtgcccaagattgcctcagttgtaggcatcctaggtcacctggcctcccgccacggagatagcatccgacgggagctcctgcgaatgttccatgatagcctggcagggggatctggaggccgcagtggggacccctcccttcaggccacggttccgttcctactgcagctggcagtcatgtcaccagctttgctgggcactgtctctggagagcttgtggattgcctcaagcccccagctgtgctgagccagctgcagcaacaccttcaaggattcccccgagaggagctggacaacatgttgaacctggctgtgcacctggtgagccaggcctctggggcaggtgcctaccgcttgctgcagttcctggtggacacagctatgcctgcttcggtcattaccacccagggcctggctgtgccagacaccgtgcgtgaggcttgtgaccggctaatccagctgctgctgctgcacctgcaaaaactggttcatcaccggggagggtctcctggggaaggggtgctaggcccgcccccacctccccgcttggtgccctttttagatgcgctcaaaaaccatgttggagagctgtgtggagagacgttacgattggaacggaagcgcttcctctggcagcaccagctcttgggcctgctgtctgtctatacccggcctagctgtggacctgaggccttgggccatctgctgagccgagcccgaagccctgaagagttgagtttggccacccagttatatgcagggctagtggtcagcctctctggcctcctgcccctggctttccgaagctgtctggctcgggtgcatgcagggacattacagcctcccttcacggcccggttcctgcgcaacttggcactgctagtagggtgggaacagcagggtggcgagggccctgcagccctaggggcgcactttggggaatctgcctcagcccatctgtctgacctggctcctctcctgctacatcctgaggaggaagtagctgaagctgctgcctctctcctggccatttgtccctttccttctgaagccttatccccctcccagctcctgggactggtaagggctggggtgcaccgcttctttgcctctctgaggctgcatggacccccaggtgtggcctcagcctgtcagcttctcacccgcctgtctcagacatccccagctgggctcaaggctgtcctgcagctgctggttgaaggagccttacatcgaggcaacacagaactgtttggtgggcaagtagatggggacaatgagactctctcagttgtttcagcttctttggcttctgcctccctgttggacactaaccggaggcacactgcagctgtgccaggtcctggagggatttggtcagttttccatgctggagtcatcggccgtggcttaaagccacccaagtttgtccagtcacgaaatcagcaggaagtgatctataacacccagagcctcctcagcctcctggttcactgctgcagtgccccagggggcactgaatgtggggaatgctggggggcacccatcttgagtccagaggcagccaaagcagtggcagtgaccttggtggagagtgtgtgtcccgatgcagctggtgcagagctggcctggccccccgaggaacacgcccgggccaccgtggagcgggatctccgcattggccggcgcttccgcgaacagcccctgctctttgagctgttaaagctggtagcagctgcacccccagccctgtgctactgttccgtgctgcttcgggggctgctggccgccctcttgggccattgggaagcctctcgccaccctgacacgacccactccccctggcacctggaggcatcctgcaccttagtggctgtcatggctgagggaagcctcctgcctccggccctgggtaatatgcatgaagtatttagccaactggcacctttcgaggtgcgtctgctgctgctcagtgtctggggttttctccgggagcatgggcccttgcctcagaagttcatcttccaatcagagcggggtcgcttcattcgggacttctccagggagggtggaggtgagggtggaccccatctggctgtgctgcacagtgtcctccaccgcaacatcgaccgcctaggtcttttctctggccgtttccaggcaccttcaccgtccactctccttcgacaggggacgtagccttttcttgctctggaagcccagggaggttgagcagtgagagagggaagggactaacgtgctccggaagggtggaggtttctcttctaagtccttggtctaaagagcgctgtcacttttttctctcccacttttttttttctaaataaaatttgccaacttgagaaaaccaaaaaaaaaaaaaaaa

SEQ ID NO: 30819 - DNA, 3285 bp, Homo Sapiens
atgcgccgcctgcgctccgccgctcgcgcctcgggctcggctcgggctccgggatgtccgcgctgtgcgaccctcccggggccccagggccacctgggcctgccccggccacccacggtcccgcgcctctcagtgctcaggagctgtcccaggaaatcaaggcttttctgactggcgtagaccccattctgggccaccaactctcagcccgggaacatgctcgctgtggtcttctcctgctccgttctttgccacctgctcgggctgctgtgcttgaccacttgagaggtgtctttgatgagagtgtccgggcccacctggctgccctggatgaaacccctgtggctggtccacctcacctccgtccacctccaccctctcatgtccctgctggtggacctggtctagaggatgtggttcaggaagtgcagcaggtgctgtctgagtttatccgggccaacccaaaggcctgggcacctgtgattagtgcatggtccattgacctcatggggcaactgagcagcacgtactcaggccagcaccagcgtgttccccacgctactggcgctcttaatgaactgctacagctgtggatgggttgtagggccacgcgtacattaatggacatctatgtgcagtgcctctcggctctcattggtagctgcccagatgcgtgtgtggatgccttgctggatacctctgttcagcattctccacactttgactgggttgtggcacatattggctcctcttttcctggcaccatcatttcccgggttctctcctgtggccttaaggacttttgtgtccatggtggggctggaggtggagctggcagtagtggtggaagctcttctcagaccccctctacagaccccttccctggatctcctgccattcctgcggagaaacgggtgcccaagattgcctcagttgtaggcatcctaggtcacctggcctcccgccacggagatagcatccgacgggagctcctgcgaatgttccatgatagcctggcagggggatctggaggccgcagtggggacccctcccttcaggccacggttccgttcctactgcagctggcagtcatgtcaccagctttgctgggcactgtctctggagagcttgtggattgcctcaagcccccagctgtgctgagccagctgcagcaacaccttcaaggattcccccgagaggagctggacaacatgttgaacctggctgtgcacctggtgagccaggcctctggggcaggtgcctaccgcttgctgcagttcctggtggacacagctatgcctgcttcggtcattaccacccagggcctggctgtgccagacaccgtgcgtgaggcttgtgaccggctaatccagctgctgctgctgcacctgcaaaaactggttcatcaccggggagggtctcctggggaaggggtgctaggcccgcccccacctccccgcttggtgccctttttagatgcgctcaaaaaccatgttggagagctgtgtggagagacgttacgattggaacggaagcgcttcctctggcagcaccagctcttgggcctgctgtctgtctatacccggcctagctgtggacctgaggccttgggccatctgctgagccgagcccgaagccctgaagagttgagtttggccacccagttatatgcagggctagtggtcagcctctctggcctcctgcccctggctttccgaagctgtctggctcgggtgcatgcagggacattacagcctcccttcacggcccggttcctgcgcaacttggcactgctagtagggtgggaacagcagggtggcgagggccctgcagccctaggggcgcactttggggaatctgcctcagcccatctgtctgacctggctcctctcctgctacatcctgaggaggaagtagctgaagctgctgcctctctcctggccatttgtccctttccttctgaagccttatccccctcccagctcctgggactggtaagggctggggtgcaccgcttctttgcctctctgaggctgcatggacccccaggtgtggcctcagcctgtcagcttctcacccgcctgtctcagacatccccagctgggctcaaggctgtcctgcagctgctggttgaaggagccttacatcgaggcaacacagaactgtttggtgggcaagtagatggggacaatgagactctctcagttgtttcagcttctttggcttctgcctccctgttggacactaaccggaggcacactgcagctgtgccaggtcctggagggatttggtcagttttccatgctggagtcatcggccgtggcttaaagccacccaagtttgtccagtcacgaaatcagcaggaagtgatctataacacccagagcctcctcagcctcctggttcactgctgcagtgccccagggggcactgaatgtggggaatgctggggggcacccatcttgagtccagaggcagccaaagcagtggcagtgaccttggtggagagtgtgtgtcccgatgcagctggtgcagagctggcctggccccccgaggaacacgcccgggccaccgtggagcgggatctccgcattggccggcgcttccgcgaacagcccctgctctttgagctgttaaagctggtagcagctgcacccccagccctgtgctactgttccgtgctgcttcgggggctgctggccgccctcttgggccattgggaagcctctcgccaccctgacacgacccactccccctggcacctggaggcatcctgcaccttagtggctgtcatggctgagggaagcctcctgcctccggccctgggtaatatgcatgaagtatttagccaactggcacctttcgaggtgcgtctgctgctgctcagtgtctggggttttctccgggagcatgggcccttgcctcagaagttcatcttccaatcagagcggggtcgcttcattcgggacttctccagggagggtggaggtgagggtggaccccatctggctgtgctgcacagtgtcctccaccgcaacatcgaccgcctaggtcttttctctggccgtttccaggcaccttcaccgtccactctccttcgacaggggacgtagccttttcttgctctggaagcccagggaggttgagcagtgagagagggaagggactaacgtgctccggaagggtggaggtttctcttctaagtccttggtctaaagagcgctgtcacttttttctctcccacttttttttttctaaataaaatttgccaacttgagaaaacca

SEQ ID NO: 30820 - DNA, 3884 bp, Homo Sapiens; identical to SEQ ID NO: 24758

SEQ ID NO: 30821 - DNA, 4653 bp, Homo Sapiens
actttggctttgacaccgactgcgagcgggagccgtgcggctggtgctgggtctggactggctctggcggatccccgcccgagttgggcgcaggactttttgccggggtaaacgcaactgcggcggcgccgccgcaagccccggtgcagcctcggcggcgggtttcgccgccgctgccgccgcctccgagcagccctgcggcttctattcactctgggagagcgatgctaagtttctcccatagaaagagccgggacacgcagaccgaagcggcgtagtcggcttccagggcctgaccagtgacccacacccgcgcggacgcctaggctggaggcagggggcccgtgctgtcccgggctgggctcaggcttccgagccgcaggtggaagaggaaccggcgccccgcagagcggccgagaggcggccaagtgaaaggtaattttggacacgccaggcatggaagattcggtgtttgtctatagtaacctcttcagtccctgaatcctgcaccttccgtttttctgtgcttgtacggcctactgggcttcctccctagccagagagctcttctgcagtggtgcggccttcccgggagcctgatcctggcggaccatggggagcaccctgggctgccaccgctccatccccagggacccctcggacctgtcccatagccgcaagttcagcgcagcctgtaacttcagcaacattctagtgaatcaggagcggctcaacatcaacactgccacggaggaggagctgatgaccctgcctggggtgacgcgtgccgtggcacgcagcatcgtggagtaccgagagtatatcggtggcttcaagaaggtggaggacctggcattggtcagtggtgtaggcgccaccaagctggagcaggtcaagtttgagatctgtgtgagcagcaagggcagctcagcgcagcactctcccagttccctgcggcgggacctgctagcggagcagcagcctcaccacctggccacagctgtgcccctcaccccacgtgttaacatcaacacagccaccccggcccagctcatgagcgtgcgaggcctctcggagaaaatggccctcagcatcgtggacttccgccgtgagcatgggccctttcgcagcgttgaggacctagtgaggatggatggtatcaatgccgccttcctggacaggatccggcaccaggtgtttgctgagaggtccaggcccccatccacccacacgaacgggggactgaccttcaccgccaagcctcacccgagccccacttccctgagcctgcagagtgaggacctggacctgccgccaggggggcccacccagattatctccactcggccgtccgtggaggcctttggaggcacaagggatgggaggcctgtgctgaggctggccacctggaacttgcagggctgttccgtggagaaggccaacaaccccggggtgcgagaggtggtgtgcatgacactcctggaaaacagcatcaagcttctagctgtgcaagaactgcttgacagagaggccttggaaaagttctgcacggagctaaaccagccgaccctgcccaacatccgcaagtggaaggggccccggggatgctggaaggctgttgttgctgagaagccctcgaatcagctccagaagggagctgggtatgcaggattcctatgggacgcggctgccggcatggagctgagagacgcgggttcacaggagagctcgccaagcaacgggcacgggaagctggcgggccccagcccatacctcgggaggttcaaggtgggaagtcacgacctgacccttgttaaccttcacctggcagccctgaccctcctggggagcgagaatcccagcaagaatcacagtgatggccaccggttggcgagctttgcacagaccctacaggaaaccctgaaaggagaaaaggatgtcattatcttaggggattttggccaagggccagacagcaatgactatgatatcctgaggaaagaaaagttccaccacctgatccccgcgcacaccttcaccaacatcagcaccaagaaccctcaaggctcgaagtctctggacaacatctggatcagtaaaagcttaaagaaggttttcacaggtcactgggctgtggtgagagaaggcctcacgaacccttggattccggataactggtcttggggcggggtggcttctgaacactgcccagtgctagccgagttctacactgaaaaggactggagcaagaaggacgcccctcggaacggcagcggggtggccttggagcgaagtgaagccaacatcaagcacgagcgatgatgacaccaaatccatgtgtccaccctgggacccaggagggcacagccaaggaatgagccctgtggggtgacgcttcagggcagagctgccttttaatttttattctcagagcatcagcacttgaggccttgccccacgccttctctgtggaccattcaggacctccagtgggggtggcgtgccaggcgcgtaccccaccaggtgggcaaagcagaaacctgcggggagcggagacgccttttatctctggatgccacagacctgagcagcattgggctggctgtccgctgctgactggatggcagcacaaagacaatatgagcagagggaggagaagaaggggtgctcaggctgcgggccacagtccagcagcgccagaagcactcatttctgaccaccaggctatgacgttcctgctgcgcattacagaaagcttttaactgtgatcaggcagtctgctcagatacattgagtggcgatttttagttttgttttgaaaaaataaacagattaacctgcctcgctgcagtgagagcatgggacaagtccgccacagccctcccccgcccccttcccccgccccccaacgcgcagtgtgtatttgcaccacggcaggtgcctctgtgtggagctagggtcaagccctgagcagcttcacttcccctgcgccttttatgtccccaccttgaggccttgcagaggcgcctctcaaggccccatcagctcgccgggacctctgtgaagcctctctgtcatctccccttcccagcccctccttcatcccctgcctccttcaccagcctggcttttgcctggagcactatttgtttagttctctttgcaggacaagaattctctcagggtggtatcacctcctccctcctccccactcactccagtttttagcccggagcctcctgtggttgactatcaggaatgtgtgctgtgtcaggatacataggaagttgacctcggggtatcatggagagtgtccctcctagtggctggaggtagggacagttggttgtggggctggagagaggttgtggggaggaagcgaggatgcgtgcctgccactaggcatctgcatccccgagcccaagccaggagggatttcccttaggcaacaccatcccagggagatctgccacaatttgcgtttcacagctaaagacgccgaggcttagagagctcgacctcctcaaggtcacaccactgggtaaatagagggatgcagactcaggttttgctatgtgctcacatttcaactttatgcttaacatgaatggaaaaatatgaaagtaaatagtgaaaaggtgagttatgagcttagattacctagattattccagtatcccatggaagctgaggacttattccgctttccacaccgaacactaaatgtggaccagtatcaagaaccctcctgtccccacgcagtgtaaacccagtggcttctctgacctggagctgatgggccgtgaagggggcccatttttctccaaaggccatccttttggggccacctggctccaaggagcatcgctggtcttggggacgggaagggaaccctcttccaggagctctaagggtacttgggaatcaattgtgtccattctgaggtctctccagtgggagggcggcagctcctgtccctgggttcaggctgtgcttctggaagcatcgaaatgggatgtctgagccttgaggaaaagcagcagggttagcattaaagtcaagaggggcagctcaggatgctaccagggagcacatcgtttctggtgcctcatctaaaggtaaaacctcccctacattcaccagccggatgtcccaaatccctttagccagattgctttttgcaaccaaagctgtggacagaaaagcctccttaagtgagctgaggggacaggaaatccaatcagatgacctttgtgttcgtaatcgggcttgagccagaggctggggagctgagtcccagccaaacctcactggcccgtttgcttttcacgcccagggctcagtggcccaggaagtgtgctgggcagcctgttcttactccagctcaacccattgggtgttggctgtttttggttttagttgttgttttgtattttgttgttttaattaataggctttatttgtaagagcagttttatgtttacagaaaaattaggcacaaagggattcccatatccctcctcttctttgcatatttccccctctaattagcatgttgcattagcatggcactttgttacaactgatgaacttgtattcattattagctacagtgttcatagtttatattaaagttcactctttgtgttgtgc

SEQ ID NO: 30822 - DNA, 3563 bp, Homo Sapiens; identical to SEQ ID NO: 26738

SEQ ID NO: 30823 - DNA, 3563 bp, Homo Sapiens; identical to SEQ ID NO: 26738

SEQ ID NO: 30824 - DNA, 3182 bp, Homo Sapiens
gatgatgtatttccgcttctggtctgcctggtcgtttttggttggatcggcttgttgcggggagggagggggggagattgtttgcagcatagaagctccgcggacgggaaggtaaactgagctccccagagacgctcatcctacagcctcagctcgggcccagccttctctctccagctgccaccacagcctggaggcgcctgcctccaccctcccgaatggtgctcctcctagcaggcctcggtccaggatccaagccccctttgccccctgccttggagctgttgctccgggtttgtcacagtggactccctgtggcgggaagggaagaacttttgcacagacaaggcttcagctctaggaaccccactgacaacttgaatctcaacctctaacctagtgtgaggttcttcctgtgcccaccttttctgccttttgagaagagaaactcttctcctggccatctagagcccaggaagccccaagctggggccctggtcccagcatgtcagtcctctcttgtgcatagggctctgccctccccctgtcagcatggctgagctcagacaggttccaggagggcgggagaccccacagggggagctgcggcctgaagttgtagaggatgaagtccctaggagcccagtcgcagaagagcctggaggaggtggaagcagcagcagtgaggccaaattgtccccaagagaggaggaagaactggatcctagaatacaggaggagttggagcacctgaaccaggccagcgaggagatcaaccaggtggaactacagctggatgaggccaggaccacctatcggaggatcctacaggagtcggcgaggaaactgaatacacagggttcccacttggggagctgcatcgagaaagcccggccctactatgaggctcggcggctggctaaggaggctcagcaggagacacagaaggcagcgctgcggtacgagcgggccgtaagcatgcacaacgctgctcgagaaatggtgtttgtggctgagcagggcgtcatggctgacaagaaccgactggaccccacgtggcaggagatgctgaaccatgctacctgcaaggtgaatgaggcggaggaagagcggcttcgaggtgagcgggagcaccagcgagtgactcggctgtgccaacaggctgaggctcgggtccaagccctgcagaagaccctccggagggccatcggcaagagccgcccctactttgagctcaaggcccagttcagccagatcctggaggagcacaaggccaaggtgacagaactggagcagcaggtagctcaggccaagacgcgctactccgtggcccttcgtaacctggagcagatcagcgagcagattcacgcacggcgccgcgggggtctgcctccccaccccctgggccctcggcgctcctcccccgtgggggccgaggcaggacccgaggacatggaggacggagacagcgggattgagggggccgagggtgcggggctggaggagggcagcagcctggggcccggccccgcccccgacaccgataccctgagtctgctgagcctgcgcacggtggcttcagacctgcagaagtgcgactccgtggagcacttgcgaggcctctcggaccacgtcagtctggacggccaagagctgggaacgcggagtggagggcgccggggcagcgacggcggagcccgtgggggtcggcaccagcgcagcgtcagcctgtagccgaggggccagggttcctggcttgaatctgccaccacgggccggttggggcccacagtcttctcacgccctctcctctggggcctcgtcttcccgaaggtccccttctccagtgcttccctgggagaggccagctgtgttcgagtcctctgtgcctgccctggcgttctcacagcctcccccttcccctcagcaggcggctctctttgccttacccattcagaaggctcgccctcggcgctctgtctgcctctgcctgccagctcatcacgatctgcagggcattgaccctttgctttccctttctgctccctctctttccatctgtttggctttttccctcagggaacttggtctagaaggcactgggaagctcatcagagaaaatgggtgctgggcctgagtactcccgtcggaggggatggacagtcacccctcccgttggtttccagccccgccccccttcccaaggcaactctggagggtaccctaggtatgctgctgagccctgccccccgtcctgctccagcctgcccgtgtgtaacctgtaagatgtactgtgtgcctccggaagacaccacctttcccttcagcattccctttcatgacctgaggcactctgcgatgtgtgccccaaagcagaacttacagggcctgcaggaagctggtgtcagggagagaaacccaaccccactgtcaacatagggagcatcaccaactccagactggctcctgtgggtatggtgtttccgctgggctgggtcctcaacattgccaaggtgctagtgggtccctaagagggcccatgttgggggtgaagtcatgaggtcctgaaggcttaggcccctgtcattcccaccctcactcttgctgcacagttgtgtttactttttctgggtagaggatgctgaactgactcagcaccctcctgcaggacggggttagggaatttggtgctcaattgctctcccttgctcttccccaaactgaaaatacctactgcaggatccctcggggcacactgaagcttggctgccaaccctcttacttcctttgttacagggaggggttggcttggggtgaaaagttctgccctccgcagggagcagctccagctgcctggcagtgctcccagtttgtagggaagccacaccagatctgggtgccttgggagaaccagtccttccttttgacccaccccaggaagatggagtgctcttttctaggcccatgttctgccagcaaccgggatgcgtgggcaactggactctgcacgggggtctacaggttgagggaggttggtcacaatgagaacctcggggtttgaggtggccatgggcagacagccgaaagggagggagggtgtgggtgtgcgtgtgtgcatgtgctggtgtgtaagggggaaagggtctttcctggttttatttaaataaagtagtttatgtaac

SEQ ID NO: 30825 - DNA, 5765 bp, Homo Sapiens
atgggaaggagttggcccggcttgtctctctgtcagtggcggctgctgcctgctctggaggcaggctgggcggtggcggccgagactggcgggggtggacgcccgggccgggctgcgcccgcttcttgcagctgtgaattcctttggacaattgatgatatttatcattgtgcccagtttctacaaataaaagatgggtggattattttctcgatggaggacaaaaccttcaactgtagaagttctagaaagtatagataaggaaattcaagcattggaagaatttagggaaaaaaatcagagattacaaaaattatgggttggaagattaattctgtattcctcagttctctatctgtttacatgcttaattgtatatttgtggtatcttcctgatgaatttacagcaagacttgccatgacactcccattttttgcttttccattgatcatctggagcataagaacagtaattattttcttcttttccaagagaacagaaagaaataatgaagcattggatgatttaaaatcccagaggaaaaaaatacttgaagaagtcatggaaaaagaaacttacaagacggctaaattaattcttgaaaggtttgatccggactcaaagaaagcaaaggagtgtgagccgccatctgctggagcagctgtaactgcaagacctggacaagagattcgtcagcgaactgcagctcaaagaaacctttctccaacaccagcaagccctaaccagggccctcctccacaagttccagtatctcctggaccaccaaaggacagttctgcccctggtggacccccagaaaggactgttactccagccctatcatcaaatgtgttaccaagacatcttggatcccctgctacttcagtgcctggaatgggtcttcatcctccaggtccacctttagcaagacctattctcccccgagaacgaggtgctttggatagaattgttgaatatttggttggtgatggtccacaaaacaggtatgcacttatatgtcagcagtgtttttctcataatggcatggctttgaaggaagaatttgaatacattgcttttcgatgtgcctactgttttttcttgaaccctgcaagaaaaaccagacctcaggctccaagacttcctgagtttagttttgagaagaggcaggtggtggaaggttcaagttcagttggtcccttgccatcaggaagtgtgctttcatcagacaaccagtttaatgaagaatctttagaacacgatgttcttgatgataatacagagcagacagatgacaaaataccagctacagaacagacaaaccaagtgattgaaaaagcatctgactcagaggaaccagaggagaaacaagagactgagaatgaggaagcctcagtgattgaaaccaactccacagttcctggagctgattctattcctgatcctgaactaagtggagaatctttgacggcagagtagtaaatgcttccacgtgccttcaactggatatttatagtcttactgatgtcagttattgctttttcggtggcacttactttttttgcccctctaagggtatgcttgtgtatcatttgaattcagattgcctagctatttgaacatctcaaagttatatatactgggtattaaaattaaaagcaagttatatcagtgaagtaagatccttttgaatgtacaaagacccacactattgagacagcttttagatacttttttgtccattctaaaagtaagcaaacatgattgccttcttgttttctgtatgtataacccgtaaatatccattttgacataggaagaactttggttaagagtaagttctctaattgtgtttgttttaaggaatgaaacttggttaagattttgactacttcattattaaaaattgatagaattttagctcctgagatatttacaactgggagaaatgtctatttaggtgtttacattaagcggtatgaaagttgttaccacataggcactggtacgaattctcaataagaatgcagtggaacagttaagtagaactgtaactacgttggcactggtacgaattctcagtgagaatgcaatgaaacagtcaactgcagtgtttctttttgatgtcttttattttacaactgggccaaaggcacattatgtatataattagtttatatttacacactagcatataggaaatatttctgcacttgaccctatttgaattctgagcattatttataagtataaaatgatgatatataagtgaattttgtgctcttgtttgtattttattaaggaaaatgaaaataatctggcatcagtttcattttgctaaatatctagtcttcttcaaacagtatcttggtgggtgacttggctacctgaaaaatcttaggaggaatagctcacaatacaataaatctgtagattctgcttagagcaaattatggtacttttattcagacttgtttcctttctagttaacagaaatagtgacatttagaggttttaatcagaagttaggtttttctgattcaggaacatcgtaggccagccatttgtaatttttaactttgagaaacaaattttgtgagaataggtagtgggttgctggtagttaattggatttaatatttgtattaaggattaactggaaaaaatgtgtctcagtgctaattcttggacctttaatacagtgtgcttatctgttacggcctccttttatctctcttctccaatattaaaaaaaatggaaatcaaattattatgctgaagggaaaaatatacctgtataagaatggtgtgtttggctaatgtttctaagttgcacacagtttattaacaactgaacaaaacatttttatcatttaaaaatctatttttatgatttaatatctcatatgtgacagtttttttttttttttttttttggaactcaatctgttaacagtctgggacatccggtatagtaaccagagtttttgagcctgccgtattgggcttaaatttcaggtctgtagtcttgggcaagtcacctataaactcactgagattattttttcatctgtaaaatgggaagagttatgtttatttttgaagggtattaggataattaaaaataatgtaatgtgcctagcacactacctgaaaacgatggcatttgttcttattaatgtctttaaaatatgcaaggaccataagtttttcctcttgcagatgaggaaagtaaaaaataatacgaacatgtaattcagcttctcagattcaagccaatgttttttgcatcaacttttctatattgtatgtatgtatataaatacatagattaaggaaataggaaactgaaactctgtggaatataaactttttaaaaataatttcatcaggttttttgtatgttactgacccatatggattttagtaacatcttgcttagtcatgttgttataaaacattcaaattctgatatacattgcttgaaaatgagtgagtacctcagagaaatttgatagactcaaacagatagtatgagaaatatctttgaaagaaatatggaggaaggttaaaaggggattagtaaaattaatgcgataggtaacatgtttgtaaccatatagtatccttttagatacaaaagcttattttcattattattataataaacagttaatggttgaaacttagtaaaatgtcctatttctgattattaagactagtataaatgagaaaatccaagctattaagtaccattagctacagtgatcttagcttccttgcttacaattgttcagtgggtcatctaaattcttctatgtcctgagcatgatctacaaacatggtctagcttctgtctctccgtcttcccgccatcattgtgctgtagccatatggaactcctttcagttctctgaccatgccctttcctgcctcagatttcagcttaaattttgcctcctcagagagatgccttcccaaactccccatctgaagctggcctctgccttttactccctatcatgtcactctctgctcaccatccttatcacaatgtgtatttgatttgtttgctagtttactgtcttcacaacataatgtccgtttgtgcaagggtcttatttttcttattcatgtctgtatctcaagggtctagcacaatgcttgatgcatattgtgtgaataaatactttgttgccaaatccagtgaaaactctcagttcttgtttcactgcttggcagtattgacattgaatattctctgagatactttttttcttttggcttttcatatatcacactattattctcttatttctctggcctcttgctctcaacgtcctgtaagtgttggtgttccttaagttctacctagtgtcatcatttcttcattctgcatattctttccctagggtttcttcccaacaccaaaggacttaccatctgtctctctgaatctcagatctccagctttgatctgtttcctttactttagagctatatatttgcctgcctactggcctgtctctcacaatccatatattcaagaatgaacactatactttgcttcaaaccttcagaacattcaaaccgtttatgtttctcatctaatcaaatagagttactctctaagccagaagctgtaaactcatctcttttccctttattcaagctgtcaatttttgtctcctaaacatcttctagttatattctcatttctctgttcacattgcattaataatgatgataaacatttgcattcttattctgtgccaggcaacatgctaactgctgtatatatattattacatttgtactttggcaagaatcctgtgaagatttttatctttggactactagaagagaaagctgagttgtagagagagtatgtatttaagtccgtttgggctgctataacagaataccacagactgggtaacgtgatgaacaaaaatttatttggctcacagttctggaacctgggaaatccaaaggcatgatgctagcatttggtgagggcctttgtgctttgtcatcccatgccagaaggcagaagggtaagagagggcaagagtgagcaagagatggaagttgcaacctcaagctcttttataatgagcattaatccattcatgagggcttcaccctcatgacctaaacatctccattaggctccaccttccaatgcaacagttagcataagttttcaacacatgctttttgtagcattcaaaccatagcaggaagcaactttgcttaaaattgtatacctggtaagtggaaaaagagggatttgaatataggcaaatgacttcagaggatttactcttaatttctgttgtactgccttctaatcttggcctccatcatttcagattaccaaagctgtctcttaactggtttctttgtctccaaccttgtgcacttgctatctattctgtgtgctgcagcctgagtttttaaaaaacagaaaatgaggggccaggtgtggtggtggctcacgcctgtaatcccagcaagttgggaggctgaggcgggcagatcatctggggtcaggagttcgagaccagcctgaccaacgtggagaaacactatctctactaaaaatacaaaattagccaggcgtggtggtgcatgcctgtaatcctagctactcaggagcctgaggcaggagaattgcttgaacacgggaggcagaggttgcagtgagcagagattgcgccattgtactccagcctgggcaacaagagtgaaactccatctc

SEQ ID NO: 30826 - DNA, 5765 bp, Homo Sapiens; identical to SEQ ID NO: 30825

SEQ ID NO: 30827 - DNA, 1895 bp, Homo Sapiens
cttcatctctccatctctgcgctgctgccggctgcgccatccagcacccagactccagcaccggccgaggacccccactccggctgcagggaccctgtcccagcgagaccgcaggcatgtcatccgaaaagtcaggactcccagactcagtccctcacacttctccgccgcccttcaatgcccctcagcctccagccgaacccccagccccaccgccacaggcagccccttcctcacaccatcaccaccaccactactaccatcagtctggcaccgccaccctcccgcgcttaggggcagggggcctggcctcttccgcggccaccgctcagcgcggtccctcctcctctgccacgctgccgaggcccccccaccacgcccctcccggccctgctgccggggcacccccacccggctgcgctaccttgccccgcatgccacccgacccttacctgcaggagactcgcttcgagggcccacttcccccgccgccgcccgctgccgccgccccgcccccgccggcgccagcccagactgcccaggcccctggcttcgtggtgcccacgcacgcggggactgtgggcacgctgccgctggggggctacgtagcgcccggataccccctgcagctgcagccttgcactgcttacgtgccggtctacccggtgggcacgccatatgcaggcgggaccccggggggaacaggagtgacctccactctccccccgccgccccagggcccagggctggccctactggagccgaggcgcccgccacacgactacatgcccatcgcggtgctgaccaccatctgttgcttctggcctactggcatcattgccatcttcaaggccgtgcaggtgcgcacggccttggcccgcggagacatggtgtcggccgagatcgcttcacgcgaggcccggaacttctccttcatctccctggccgtgggcatcgcggccatggtgctctgtaccatcctcaccgtagtcatcatcatcgccgcgcagcaccacgagaactactgggatccctaaaaacgcccctggtccggccccactctgcgcccctcgatctcccaggctctttctgcagtcataccgcggacccaatgggcgccctgcacacccgtttctggggccgtcagacttggatacatcgtaaactccgcctccacggaacgtctcgccttgcgagcaagctcggaatccagttcctcaggaacccctccaaaacccacacccccagggacgccgctttccgggatcccggccaaacgccggaccctcagtcgctccaggccccctcaccctcaaagtgtagcgcccccaaccgagcaacctcggtttggtccctaaaaccccgcctcctctataagcaccgccccagctctgacaaaaccccgcctccaggtcggcaggctccgccttcttttcttctccgcggggtgattcagtccagtgattgggtttgtggctccaggcctcgcccacagacggacagacccctccctttcttccggcaaaaggaccgagccctggggtagtaaggcccccacactcctgttttttgcaagtacatttttgtccctcctccacccaggtatctgcctattttcttgctaatcccagaacctttccttttgctttttttaaggacatttgggaagttcctggtgtaggacccttctccctgggataagaaacctgcctgtaaacgctctgtaaatactcccttccacccatcccagcccctgggcagccgggcagaagggaatccaggctatggacctcccaagtccccgctccccgctcccctcggcggccccgccttgttctgatctgtgtgtgagtgtgtgtgaacttctgaaagacaatattaaagagacttagttg

SEQ ID NO: 30828 - DNA, 3258 bp, Homo Sapiens
tctcactagcctcagagcactctcagaagttcagaaactaagaccagaaaagagaagatttttagacagctcatgaaacggtctgcgcggggcggccattggcggcggagtgtcacgtgaccgcgggggcgtgccaatgtgcgccctcacgggtgtcaaacccctgtcagagtgtgcgatcaagatcgtgaaacaacgcgatgcaaaaagcgacctactacgacagctcggcgatctacggtggctacccctaccaggcagccaacgggttcgcttataatgccaatcagcagccgtacccggcgtccgccgctttgggcgccgacggcgagtaccaccgacccgcctgctccctccagtctccctccagcgccgggggccaccccaaggcacacgaactgagtgaggcgtgcctgcgcaccctgagcgccccacctagccagcctccaagcctgggagagccgcccctgcacccgccgccgccccaggccgcgccccctgccccacagccgcctcagcccgcacctcagccccctgcacctacccctgccgcgcccccgcctccctcttctgcctcccctcctcagaatgccagcaacaaccctacccctgccaacgcggccaagagccccctgctcaactcacccacagtggccaaacaaatcttcccctggatgaaagagtctcgacaaaacacaaagcagaaaaccagcagctccagctcaggcgaaagctgcgctggcgacaagagcccgccggggcaggcttcgtccaagcgcgcgcgcacggcctacacgagcgcgcagctggtggagctggagaaagagttccacttcaaccgctacctgtgccggccgcgccgggtggagatggccaatctgctgaacctcactgagcgccagatcaagatctggttccagaatcgccgcatgaagtacaaaaaggatcagaagggcaagggcatgctaacgtcatcggggggccagtctccaagtcgcagccccgtgccccccggagccggtggctatctgaactctatgcattcgctggtcaacagcgtcccgtatgagccccagtcgcccccgcccttctccaagcccccccagggtacctacgggctgccccccgcctcctaccctgcgtccctgcccagctgcgcacccccgccacccccacagaagcgctacacggcggcaggggcgggcgcagggggcacccccgactatgacccgcacgctcatggcctgcagggcaacggcagctatgggaccccacacatacagggaagccccgtcttcgtggggggcagctatgtggagcccatgagcaactccgggccagccctctttggtctaactcacctcccccacgctgcctcgggcgccatggactatgggggtgccgggccgctgggcagcggccaccaccacgggccggggcctggggagccgcaccccacctacacggaccttaccggccaccatccttctcagggaagaattcaggaagcacccaagctcacccacctgtgatagtgggcttggggctacgcgccaggagagtctccccccacccaccttttttctttggttgcttttttttttttttttttttaggttcttcctgccctttccttccttccttttctctcttctccgccccgcactccgtttcccggtttcccccctcgttggtaaggcgtttttatagtttatgtgacgtagcaatcttggttgctggaatggctgtatcatagcgatatttatctcttcctgctcctcgataggccactggccctgcaccctttaccttctccactctttgatcagaaacagggtatatgaacaaattttctagtcgagttttcaatgtgaatttgttcttacattatggctcccgaggggaagcgattactttttttaattttaaatttttttttttaattgcacttcttgtaaagagtgagaaaaaaaatcaaaggcgctttgaaacaggggctctctgtgcaaggatgactaagtgtacgtctttccgtgtgtgtatgctggtgaacagtcagatttatttatatttttttgcaagcattgaataatctaagttttaaatattatttatccccatccgttcgtatttatattaaagaattctgtaccctgatggttcagaagggttcttgggccttttgttcaattgtgtattggcgtacttagaattttttttatttgaaagagaaatataattcctttaaacggtaacgatgcaataaaaccagagaagatccagcttttgaaaacagtgatttaggtttgtaacatccggcaaaactgaaaaaaaaaatctgtaaacgcgaaaaatactagatttgttttgagagttcttcattccttgctgctcacattctgagaaacaaaaagaaataaagtttttattctgaataatatccgtgttaagaaggggttctttggccgaagacgtgggtctgcgtggaattcaggccgaggcgagccggcagagcaggccggacgcagcagccctctggctccagcatggggcctggccaggctattcgcctggaagctcggcgaattctcaggatggcggctggggctccaggcggctgcggcagctctggtaacgccgtgcggcgggccagctgggctgcccggttcccagctgctgcggaggcaggctgagggcgcaggggctgccgagtgctgtgcacggaagaaacaaagacatcccggcccaaggcgcagcgggagcgcacaggtgccccgcggcccagccgggggataacgcagggcggtcttctgctccatgctcttcctcgggtcaaagcggaccaactaacgcctaaacctcggtattagccagccgcgcagaggatgccgagcactttccgggagcaatcggactcctggtctcctccggggatgcttcgcggtctgttatcgcgtcaggaggaaagaattgctccaaaaatctgcacgcggagcgaaacagtttgaaagggactgaggctcacccaggtctccagcaaacggaggactgaactggggagagtcaccctgagccagcccttccctggactgccggaatcccagcattagcttcctgctgaatgtagtatttggcattctctgaatttatttcctctccttcccccacccagctttctttttatggccccagggggagggggagagagcaaggagatcggtatctttgtaataaaactgcaattttataaatttttca

SEQ ID NO: 30829 - DNA, 3755 bp, Homo Sapiens
gggcacaggggagactaaaaaggccagggaagttggcctgccggaagttcccagggagaaggcagcgcgttgtacccgagttacctgtagtcaaccacagtctgaaaatattaaggtattttaagacagaaagagagagaggagagaaaccgcattcacaaaaaagaaatcctctttttagaacatctcttggtggtaccatcagaaatgtcttccttaagtggaaaagtccaaaccgttttgggccttgtagagccaagcaaactgggccgtaccctgacccatgaacacctggccatgacctttgactgctgttactgtccacctcccccgtgccaggaagctatttccaaagaacctatcgtgatgaaaaatttatattggattcagaaaaacgcctattcccataaagaaaaccttcaattaaatcaggagacagaagccataaaggaagaactgttgtattttaaagctaatggtggaggggctttggtggaaaacacaaccactgggattagccgagacacacagacgttgaagaggcttgcagaagagactggcgtccatatcatatctggagccgggttttatgtggatgcaactcactcctcagagaccagggccatgtcagtggagcagcttaccgatgtccttatgaatgaaattctccatggagctgatggaaccagtatcaagtgtggcattattggagaaattggttgctcctggcctttgactgagagtgaaagaaaggttctccaggccacagctcatgcccaggctcagcttggttgtcctgttattatccatcctggacggagctccagggcaccatttcagattatccgaatattgcaagaagcaggcgcagacatctccaaaacagtcatgtcacacctggataggactattcttgataagaaagagctcttggagtttgctcaacttggctgctacttggaatatgatctctttggtactgaactacttcattaccaactcggcccagatattgacatgcctgatgataacaaaagaattagaagggtgcgtctcctggtggaagagggctgtgaagatcgaattctggtagcacatgacatacatacgaaaacccggctgatgaaatatggaggtcacggctattctcatatactcaccaatgttgttcctaaaatgttgctgagaggcataactgagaatgtgcttgataagattctaatagagaaccctaagcaatggctaactttcaaataggatggttgcttatgaattcacaccttgagtataaaacttgcagagaacattcagcgatttccagtccactgtgagatattaatcagttacctaggactaatgacagatcatttccttctgatgagaactaggagggtttgccttctctgagaccagctattacaactgtgcctctagggagttactcagcctaattgagccctattattttaacttaacaaaataaatacagaagtacctatttctaaacaatgatttaaagtctatatcccctaagcggagttgttgtttttctccctaatctatcagctgcactacttgagaaaatttaaagtgtttctagttaaattatttccttcttgagcgatctaatgtttcttgtaatattgatgatcctactaattatcctgctgttctttaattaatgcttaatgaataatatggcactgtaaaatagcttctgcaacaagggaagttaaattttgagacttttttccccaaaggatactgactgtaatacaattaccaattcacaatgataaaaatattttgaaaggttaattttatactgtccacctatctatatattcttctactgaaatgattttgatatctttggctttccggtatctatttttgccatacattttgctgttttgcaaagtttgtataagaacacataacactactgaattataaaaattcaatcataaaagtcaaaatatattacataatatagtttaatgaatcattacatttataataacaaaggccacaatttaattaattggtaagatataatgcaaaaaaaaaaagagaaatgtttgccttatgtatattccctttatttcctttaccttttgtttttccttggacctaaacagagaaaataatgcttatgtatctgaagaaaaggtcagatctattggaaatgacagcccgatacttgagcctcctctttaaaaggtatccagccctgatattttgtgtaaataaaatgtttttaaaacctgttagttaaaacacttaggtgatgggcactgctgcttataaattcatcttttggttgaatcctcactatgctatttggtacctaaaaatattctccaaacccttgctgccagttcctctttgataaatatatagttaattcgaaataaaatccattgcaattcatttatgagttatcttacatatcacaaagaccaattagaattagtcattattcttgatgaagagtctgtttttaatcataaaaatcatgacagttactcagacccaggcatttcaacagagctaacaccaccttcagataggcacaccatgcataactcttgggaagttgagctttgctaaataaaagatatttctgctgatcaaagatgatcaagctttctgtgtattggaacagaaagtaacaaagaggaatgagccaggagaacaaactaattcctttaaataaataaaaaaaaaaaatgcaaatgtccttcaccagtaaagcaagcaaatttttaaaatctctgtttttgaaatctactcgtcaaagagttttcagaggcaatgaaaggggaacagatttttcattgtaatagtggaagttgtgtgatagttaggagatatcaacatgcatttttaatcttttccttagatgaaagagatggcttttggcagtgtgttctaaccagaaagaaaggatttgtattactctccaaatctactgtactgtcagcttcactccacctgagaaaaaagaaaaaaaaattgatagctcaaatgcatgtaattcataaacactgcaaaggagagccacttggtgtctgcagtcctcatattaacagtctgtcacagaatgcagttaaagtattgattggcatatggtaatagagcaaccatagccttaacttacagacctgtgaaataaagggcattttgacctaatacaattaattttctggataactcttaaagagaagtcattttaactgtttttgctactccatatattgtcattcaaaatatattttaacccaaaataagttaaataatttgtgcatgtttgtgtgtgtatatatgcatacacttttttatattaaaattttgaggctatacagccactgtgccctgtggaataaagccatatatataaatgttttatatgtatatgttttatacataaataaaacatttcatctaatatatatatgtgtgtgtgagtatatgtgtgcatgtttagcagatatttgtataaaatataaacactctgttgtcatataggctatatgcgaaattgttaattttaaaataacctcaggccacagacttgtagtaatcatttgaaggcctcacctagtgtccccttggtgacgtatgcagcagctcaaattaaacctttgtgcattgggttatgaataatcttttcttccaaagatggcaaaagcctcggtttgatttgatactaaagaataaatttctctgactttcaaaaaaaaaaaaaaaaa

SEQ ID NO: 30830 - DNA, 4064 bp, Homo Sapiens
aagtaaaaaaatggaagggggaaaaggcaaagtattctgccttccaagttagatagctatctttatgaaaggacatatttcaaaggcaatataaagtctttatggtgctcttacctacctatatttgaattgggggatgcttcacctgcttattagtgaaagaagaaagaatacacttagtaaattaaattttttttaaaactttgtctttgctcagaaccagctccacccaaatcactcttcgcagtgaacaaaacccagacttcagtgactttgctgtgggtggaagagggagtagctgatttctttgaagttttctgtcaacaagttggctccagtcagaaaaccaaacttcaggaaccagttgctgtttcttcccatgtcgtgaccatctccagccttcttcctgccactgcctacaattgtagtgtcaccagctttagccatgacagccccagtgtccctacgttcatagccgtctcaacaatggttacagagatgaatcccaatgtggtagtgatctccgtgctggccatccttagcacacttttaattggactgttgcttgttaccctcattattcttaggaaaaagcatctgcagatggctagggagtgtggagctggtacatttgtcaattttgcatccttagagagggatggaaagcttccatacaactggcgtaggagtatatttgctttcttaaccctgctaccctcatgtctttggactgattatcttttggcattttatattaatccttggagtaaaaatggtttaaagaagaggaaactgacaaacccggttcaactggatgactttgatgcctatattaaggatatggccaaagactctgactataaattttctcttcagtttgaggagttgaaattgattggactggatatcccacactttgctgcagatcttccactgaatcgatgtaaaaaccgttacacaaacatcctaccatatgacttcagccgtgtgagattagtctccatgaatgaagaggaaggtgcagactacatcaatgccaactatattcctggatacaactcaccccaggagtatattgccacccaggggccactgcctgaaaccagaaatgacttctggaagatggtcctgcaacaaaagtctcagattattgtcatgctcactcagtgtaatgagaaaaggagggtgaaatgtgaccattactggccattcacggaagaacctatagcctatggagacatcactgtggagatgatttcagaggaagagcaggacgactgggcctgtagacacttccggatcaactatgctgacgagatgcaggatgtgatgcattttaactacactgcatggcctgatcatggtgtgcccacagcaaatgctgcagaaagtatcctgcagtttgtacacatggtccgacagcaagctaccaagagcaaaggtcccatgatcattcactgcagtgctggcgtgggacggacaggaacattcattgccctggacaggctcttgcagcacattcgggatcatgagtttgttgacatcttagggctggtgtcagaaatgaggtcataccggatgtctatggtacagacagaggagcagtacatttttatccatcagtgtgtgcaactgatgtggatgaagaagaagcagcagttctgcatcagtgatgtcatatacgagaatgttagcaagtcctagttcagaatccggagcagtaagtggagaagagctctccacgagtgttcagtcttagaactattagagggggatgtgatggatgggacaaaagacagcagtagccatttgtattgactctgacttcacatgagtatttcttcccagctcctggcctcacatgggtggtcacagggagaaacaagtactgtagcagatctttgagtttcaatgcaccttggttggtgttggcaacaaacaggagcttctgcacatcatgatgactttacctccattccctctacccagaaccctaaattattctgttattggatctgtgcctgtaatatcaggatactaccatccaaatctatctagatatcttgtgcaaatattttattgattacaagggctgtatacggggttacaaaaagacatgagctggattggacactcctaaaaccaaaaacaacagtgacaatagagtctcaggatagcagagtctgaaaataccttggtctcccccattatgtgagcccttatttgagagcttcatgaagacacttgtaacatattcaacgtcctgtactccagttttgactacgagatcagattttggaggtgtaagtaatcttggctgaggtaacagtaatctgcccatttagttcagtaaacagactgtagagtgtctgactatactgggggaagaggagccaatgacagggtagggagatgacagtggtgcatgatgggagaatcatgaaagtctgggaagcatatggaccagtgggaaggataggattagcactgcacctctacatccatcaagagagacagagcgcacaatggagcaggaaggataaaaaataaagaaagacagagacaaacaaatttgctgggagagggaaagacattcagacccacagaaaggaggcagcacacagagaaagatgcacagatcaacccacatctgcatgggttgtgagactgagcatagtgagagcagtggtggagcaatagaagattgctgtgacaccaggctgcttactgtctttctttgtctcattcacaggagaggacatgatgtgcgcccatcctcccttgcttccagattgttttagtgggccctgatggtcatttttctaaacagaggccctgctttgtaatatgtggccaaggagataatttatctcacagaagcaccgggaagacttagccttaaagagcctacagtgtccttttggactctttcacttcgggacatttaataatggaccaaattcaacagaacaccaggaaggtcaagacgctctccaaagggcaggaagtacagcacttccgaagagtttagttggccctttgctggttgggctgagttttttatttttaagtgtttgtttttcagtgcaataatttttgtgtgtgtgtgattcttatcagaaagttgaattgttttctgcctacaccgttcatcagccccataacccaggaaggaacaggcattgttagcatcagattatacctcattattaaaaggaggcatggccacacatgaagaaatggtcattctacttcaaagaaattgagccagcactatctgtactccaacattaccggatctggattggggaggttggtcagggaagagaggggttctacccacagatcaactgtgtaatcttttactattcaagctataattcagcttcaaagtagagtagaaaaaaaattgtcttaactgttctagttcttgatggttttcttccttattaacagttggtgtttcttccttggcccttttggactaatgttactgtccaagttctttctcaagaaaccacatctggttcagaagagtgtcaagttggactctttgaactctgttgctgtctgagcaatcgtggtgcctagactttgcattccttgttctgttgacctgcatacatgtgagagctatttctttaagaactatataggctgtgaaaacgcactttctttcccccaaagagctgggaatttatgaagttatggcaatgaactgcagcatgctgggacaattatttgactacttttttttgtaatattgtcaaatgtctctatggattctgacagagatttctttttgttttgttattcttttggttgtcagtttcattttaacgagtgtaactagtaacattttattctttggattttgtataattacagtacatgattgtgtattgtgacatgaatgctgtcaaaatgacattgatggcattgtgaagcctgttactttgtgtcacttcctgataaataagaggtgatgacatggatatacaacagaaaacactttgagttgaaagtaaacacaagctggctgcttccctgtggcaactgtggct

SEQ ID NO: 30831 - DNA, 3952 bp, Homo Sapiens
attttagacacaagcgagaggatcatggcggatggccccaggtgtaagcgcagaaagcaggcgaacccgcggcgcaataacgttacaaattataatactgtggtagaaacaaattcagattcagatgatgaagacaaactgcatattgtggaagaagaaagtgttacagatgcagctgactgtgaaggtgtaccagaggatgacctgccaacagaccagacagtgttaccagggaggagcagtgaaagagaagggaatgctaagaactgctgggaggatgacagaaaggaagggcaagaaatcctggggcctgaagctcaggcagatgaagcaggatgtacagtaaaagatgatgaatgcgagtcagatgcagaaaatgagcaaaaccatgatcctaatgttgaagagtttctacaacaacaagacactgctgtcatttttcctgaggcacctgaagaggaccagaggcagggcacaccagaagccagtggtcatgatgaaaatggaacaccagatgcattttcacaattactcacctgtccatattgtgatagaggctataaacgctttacctctctgaaagaacacattaaatatcgtcatgaaaagaatgaagataactttagttgctccctgtgcagttacacctttgcatacagaacccaacttgaacgtcacatgacatcacataaatcaggaagagatcaaagacatgtgacgcagtctgggtgtaatcgtaaattcaaatgcactgagtgtggaaaagctttcaaatacaaacatcacctaaaagagcacttaagaattcacagtggagagaagccatatgaatgcccaaactgcaagaaacgcttttcccattctggctcctatagctcacacataagcagtaagaaatgtatcagcttgatacctgtgaatgggcgaccaagaacaggactcaagacatctcagtgttcttcaccgtctctttcagcatcaccaggcagtcccacacgaccacagatacggcaaaagatagagaataaaccccttcaagaacaactttctgttaaccaaattaaaactgaacctgtggattatgaattcaaacccatagtggttgcttcaggaatcaactgttcaacccctttacaaaatggggttttcactggtggtggcccattacaggcaaccagttctcctcagggcatggtgcaagctgttgttctgccaacagttggtttggtgtctcccataagtatcaatttaagtgatattcagaatgtacttaaagtggcgatagatggtaatgtaataaggcaagtgttggagaataatcaagccaatcttgcatccaaagaacaagaaacaatcaatgcttcacccatacaacaaggtggccattctgttatttcagccatcagtcttcctttggttgatcaagatggaacaaccaaaattatcatcaactacagtcttgagcagcctagccaacttcaagttgttcctcaaaatttaaaaaaagaaaatccagtcgctacaaacagttgtaaaagtgaaaagttaccagaagatcttactgttaagtctgagaaggacaaaagctttgaagggggggtgaatgatagcacttgtcttctgtgtgatgattgtccaggagatattaatgcacttccagaattaaagcactatgacctaaagcagcctactcagcctcctccactccctgcagcagaagctgagaagcctgagtcctctgtttcatcagctactggagatggcaatttgtctcctagtcagccacctttaaagaacctcttgtctctcctaaaagcatattatgctttgaatgcacaaccaagtgcagaagagctctcaaaaattgctgattcagtaaacctaccactggatgtagtaaaaaagtggtttgaaaagatgcaagctggacagatttcagtgcagtcttctgaaccatcttctcctgaaccaggcaaagtaaatacccctgccaagaacaatgatcagcctcaatctgcaaatgcaaatgaaccccaggacagcacagtaaatctacaaagtcctttgaagatgactaactccccagttttaccagtgggatcaaccaccaatggttccagaagtagtacaccatccccatcacctctaaacctttcctcatccagaaatacacagggttacttgtacacagctgagggtgcacaagaagagccacaagtagaacctcttgatctttcactaccaaagcaacagggagaattattagaaaggtcaactatcactagtgtttaccagaacagtgtttattctgtccaggaagaacccttgaacttgtcttgcgcaaaaaaggagccacaaaaggacagttgtgttacagactcagaaccagttgtaaatgtaatcccaccaagtgccaaccccataaatatcgctatacctacagtcactgcccagttacccacaatcgtggccattgctgaccagaacagtgttccatgcttaagagcgctagctgccaataagcaaacgattctgattccccaggtggcatacacctactcaactacggtcagccctgcagtccaagaaccacccttgaaagtgatccagccaaatggaaatcaggatgaaagacaagatactagctcagaaggagtatcaaatgtagaggatcagaatgactctgattctacaccgcccaaaaagaaaatgcggaagacagaaaatggaatgtatgcttgtgatttgtgtgacaagatattccaaaagagtagttcattattgagacataaatatgaacacacaggtaaaagacctcatgagtgtggaatctgtaaaaaggcatttaaacacaaacatcatttgattgaacacatgcgattacattctggagaaaagccctatcaatgtgacaaatgtggaaagcgcttctcacactctgggtcttattctcaacacatgaatcatcgctactcctactgtaagagagaagcggaagaacgtgacagcacagagcaggaagaggcagggcctgaaatcctctcgaatgagcacgtgggtgccagggcgtctccctcacagggcgactcggacgagagagagagtttgacaagggaagaggatgaagacagtgaaaaagaggaagaggaggaggataaagagatggaagaattgcaggaagaaaaagaatgtgaaaaaccacaaggggatgaggaagaggaggaggaggaggaagaagtggaagaagaagaggtagaagaggcagagaatgagggagaagaagcaaaaactgaaggtctgatgaaggatgacagggctgaaagtcaagcaagcagcttaggacaaaaagtaggcgagagtagtgagcaagtgtctgaagaaaagacaaatgaagcctaatcgtttttctagaaggaaaataaattctaattgataatgaatttcgttcaatattatccttgcttttcatggaaacacagtaacctgtatgctgtgattcctgttcactactgtgtaaagtaaaaactaaaaaaatacaaaatacaaaacacacacacacacacacacacacacacacacacacacacacacaaaataaatccgggtgtgcctgaacctcagacctagtaatttttcatgcagttttcaaagttaggaacaagtttgtaacatgcagcagattagaaaaccttaatgactcagagagcaacaatacaagaggttaaaggaagctgattaattagatatgcatctggcattgttttatcttatcagtattatcactcttatgttggtttattcttaagctgtacaattgggagaaattttataattttttattggtaaacatatgctaaatccgcttcagtattttattatgttttttaaaatgtgagaacttctgcactacaaaattcccttcacagagaagtataatgtagttccggaattc

SEQ ID NO: 30832 - DNA, 1552 bp, Homo Sapiens
acttaatgggctcaaggtcacctacctgacctaccagcagctcaatggccttcccaaagaagaaacttcagggtcttgtggctgcaaccatcacgccaatgactgagaatggagaaatcaacttttcagtaattggtcagtatgtggattatcttgtgaaagaacagggagtgaagaacatttttgtgaatggcacaacaggagaaggcctgtccctgagcgtctcagagcgtcgccaggttgcagaggagtgggtgacaaaagggaaggacaagctggatcaggtgataattcacgtaggagcactgagcttgaaggagtcacaggaactggcccaacatgcagcagaaataggagctgatggcatcgctgtcattgcaccgttcttcctcaagccatggaccaaagatatcctgattaatttcctaaaggaagtggctgctgccgcccctgccctgccattttattactatcacattcctgccttgacaggggtaaagattcgtgctgaggagttgttggatgggattctggataagatccccaccttccaagggctgaaattcagtgatacagatctcttagacttcgggcaatgtgttgatcagaatcgccagcaacagtttgctttcctttttggggtggatgagcaactgttgagtgctctggtgatgggagcaactggagcagtgggcagtacctataactacctgggaaaaaagacaaaccagatgttggaggcttttgaacaaaaggacttctctttagccctgaactatcagttttgtatccagagatttatcaactttgttgtcaaactaggttttggagtgtcacagaccaaagccatcatgactctggtctctgggattccaatgggcccaccccggcttccactgcagaaagcctccagggagtttactgatagtgctgaagctaaactgaagagcctggatttcctttctttcactgatttaaaggatggaaacttggaagctggtagctagtgcctctctatcaaatcagggtttgcaccttgagacataatctaccttaaatagtgcatttttttctcagggaattttagatgaacttgaataaactctcctagcaaatgaaatctcacaataagcattgaggtaccttttgtgagccttaaaaagtcttattttgtgaaggggcaaaaactctaggagtcacaactctcagtcattcatttcacagatttttttgtggagaaatttctgtttatatggatgaaatggaatcaagaggaaaattgtaattgattaattccatctgtctttaggagctctcattatctcggtctctggttcctaatcctattttaaagttgtctaattttaaaccactataatatgtcttcattttaataaatattcatttggaatctaggaaaactctgagctactgcatttaggcaggcactttaataccaaactgtaacatgtctcaactgtatacaactcaaaatacaccagctcatttggctgctcagtctaactctagaatggatgcttttgaattcatt

SEQ ID NO: 30833 - DNA, 2840 bp, Homo Sapiens; identical to SEQ ID NO: 26374

SEQ ID NO: 30834 - DNA, 10310 bp, Homo Sapiens
  misc_feature (5161)..(5161): n is a, c, g, or t
gctcgctcctcgcaagctcccgctcgctccctgcccactcccggggggacgttccgtgccgcggccgccgcggccgctgcttctttcacactttagttgggagctgcgcgccgcgctcagttactggagagctggccgcgcgccgccgcctcccgcacgcttgcacgcgggcccggcttcggggttttgggttcttactccaagcggcggggaggagggggagccccggacacactgtggggaggaggaggaagaagaggaggagggaggaagaaaaaagacgaggaggacaggggcggggggcgggaggcttgccaccttcagcccccccgcgaacgcccaaggtgcacacatcttgaccaactcagcagcaaggtggattttctttgtgtttaaagaaaaaaaatgtccctgtgtctgtagagatgatttgcagttcagcccggctgaagctgaccgaatgagactatgggctgtgcctccgccaagcatgttgccactgttcaaaatgaagaggaagcccagaaagggaaaaactaccagaacggagatgtgtttggcgatgagtataggatcaaaccagtggaagaggtcaaatacatgaaaaatggggcagaagaagagcagaaaatagcagccaggaaccaagaaaacttggaaaaaagtgccagctcaaatgtaagacttaaaactaataaagaggttccgggattagttcatcaacccagagcaaacatgcacatctctgaaagccaacaagaattcttcagaatgctggatgaaaaaattgaaaagggtcgggattactgttcggaagaagaggatatcacatagcaccaattttaccactcaaaccaggagctactactgtgtaaataggttacaccccagttgaaatctttgcaaaggtcggttctattcagcgaacagcactatagcaaaagaagatcgttccatattgtacgccccattaaattacagtgtttcttaatgaacttgcaaaggaatattgctaaaaacaaacaaaaaaaactgttatcgaactttctttgttgctgctagttaaaacttgttgcaacttttcacttctcttgtgtccaggtatgcagcaaaattctgcaatttcaccttaaagatactgttggttttacagatgctctccaacctattttctataagatgaggtagtggtgaactcagataacaaacttctcttctaaactggttctgcttctaagacaagcatctcctgccctctctccttcctccccatctctcgcacgcagtctagagatggactgagccttgcttctcactggcagtgttgagctttggagatgggatggttgctatgccaagccttgtttctctgctcagaagaagtagagaagctattatcaattaaaagcatgctgtgatgtgactcctggaagtgacgtaggagtgagtggcaggttgtttgatttaataggtatcttaatcaagaattaagcttgcaacattggctttgctcagatgcagatggaagtgtgatcacaatcattttgaatccctcttcctcacttttttttctaagaaaataaacattttactgtttttatggatccttgtcttctcccattcatccagctcagtgttttaagatgatcctgggtgcagaagttgagccctcctttgcattgacactgataattagcctatagggctccctacccttccattaagaatctaccaagcattagcaaggctgaaagtggtctaagaggtgaggggacatcctatgactttttaggaaggcctgaaaccaccttgttacctttcattttgttagcaaataaaccatcctattttgtaactctcccccttcaaaatgctacatgagccttgccacttcctttttctcttacttccagcacactagacatagcaaaagtgtttgcctactcaaaaacataatacttttatgctgatgatggtatttggagatgtgaaagccaaaagcccctggcagtggtggggaatgttgactgagtgttcagcagagtttatttttccatactatatgaagagaatgatctcttctcaaagacagaagtgatatttttaacaaatattgtcacaagtaaatagcaatcaaaaggagaaaataacttttgtatttttttaatgtgtttgatagctttgacgagggttctctttgttactttcaggggagggcatcctattaaatgccacgccagcagtccgggtctgggtttgtcccacaaaatcacaggagcactgtatgttcctctcttttggagttgtgactttgaagggcctcaatattagccacactgccgcctgcagaaggtggagagttaagatgttctatgtcaatttgctcttgccgaaaagatgagcctcgattttaaaatctatccacatccaactgatggcaccattgatgtgcaaataatgagattccctatctccttttagacctgggacggcaaaagggaagggaaggaaacttagcagagtgctattgactatagattcacatattagcaacaaaatcccgtaattcttttggccaacagcagctattttggggagcagctgtggctgttacataaatagagatgcagccaaaattttaggccttttatcctgcttctagcagaaaaatgcagggagagtcaagtagtctagggtttcaggttgcctcccctcatatggtttttggccaagtgactaaaacagttttccacaactgtaaacaaactgctaagccccacctcaaacttgttcactggggactttgcttaccgttctgtgggtgaccttttccgggatttcttgttcttatcaagcaagaattaagcacatgctaaacgtcttccatttgacttctctactcggtgtctcagacagtgtcttcccagaaaaccaccaccctctacccaaagatgaaacatgctcatgtcatttttctcatggtcacatttaacagttttgacatgttatacttgcgcatagatccaagcgtttcttgggaacctgacttttgagtgtttaataaagccggaagtggtgttgccctgaaccagcagattttcacctgggttctggctccggtgtttaacactggatacatctttgatgtgcgaaagtgagttcatcttcagacacatttggtacatccagaaatagatccaagaaatggggtggttgagtgggtccgcacgaaatgcttgattatgtcagcaacacccaacactgtctgttttccatttgttggttttaatcataaaattgtcaagtgattcgtgtttgtactttatttttttgtgccttctgaaaggatctaaaacaaaaatattttgcctttttttccccacgtgtatctgaacattaagcagattggctcagacacaatgaaaaggataatccaatgtacgtgctggtgcactctgctagttgttatctctgtagggctcaggaagctggaaggaggaagggagggtaagtggcctggtgagtggaggtagaaaaatgatgagaaatgaactgagagcattaagcagagagggttgataggctggccgtgtccggggtgaaattggaaatccagctgcctagtggccagtgggtggggcaagactgtcaacgagatttacagctggcttacacatgccttatgtcctctgagttgtagagttgtaaaagttcagcagtgtgtgcacagctttcttttggttggcagagattcaggatcatggagtactgctctcataattgaagacgtgtttgttattggcagagaaccttaaaaaaggcctttacctcagcgatgcttcctagccccaggcttgcagagaacacagagtggtgttgtggtctatttagggacaaagaaggtataaagtccagagatgagaaaactgggtcagccctcagaaactgcagcagccacgcacacagaagcctgctggaagacaggtctctctccgtccacagtgcccatcatctgagcctgggctgggatgactcaacttagcaaagacggacccaggaggagtgctggttcttcagtctttgtactggccccatcctctcctcactgtaatgtgaggaagcacctctgtgtcagggctcacctgggcatccaaagcggccacgcccacaatccgacagcccccaggagcaggtccagggatgatgcagcccccttcttggtcccatgtgatgtcatcctgctttgttatcttcttataactttatcctgctataactttatcctcttcccagcctcatccctgtttttctgttagggcaagactcttccataagcctgctaaaaaacagagatgatacctcttacaaactttacctcatagcctgtgaagcaggttggcatgtggattacaagtcctgctttgacactgggcaagaatttaagattgttctatctctactagtcatagaaaagaaacattgttaaacatgttgagttttaaaggaagaaatattttcaaattcttaatccaagaaaatactgagttggaatcttagacttcgggactctgacacgttctttatgaaaggcaaaataattggtatctaaagttctctccttcctgcctcccctaaagaaaaaggatattagattgcacactataattttacataagatctgccttccacacttccctgctggaaggcattctcagagctttatgtcttcgtacctctcagagattggactttttcttgtttaaaaccccaaccaaaaaaaataataaggcatgattggtggggagggaatgtgtatttaggggcataataaaaaggtggctcgaagcaggaactttggcctcatggtgtcatgggtggatgcctggactccagtgtgcctgtgaggggctgggttaggcagtcggctgtcacactcacatgtgcctgcaataaaccttttggaatttcatgaacgaggtctatgaattgccttttgccaatgaatggatgtatttttccaaggggggaatagtatccttgactttggcagtcacctttttgtatgtaaggggtcaaaaaactatggtaaagatgaggcttatgagtgaatacctctgggacaaaccttaggactcacaagctatgccatgtttttcagganactctgtacctatctggaatccaatcctgggagaagaggaaaaaggagctaatatttgtcctttatactcactctgtgccagatactgtgscaggcatttataattgtttgtgtcaccccatgatatccgttaaattaatctattacccccgtgttctaaataatagatcttaagtgtggaatgcatctatccaacataaatgcccatgttgaaagaaggaaagatgtcattcaagtatttttcaaattctttttattatgactatgcccttcgcaacactgtgaaaacaacccctgggggcatctgccttccagaatctctctctggcttctcaccagcttggtttcctcatggggagtgttttatttggcctcccctatctgakctgcacacacaccaggggaggccactggctaacagtaggacttcagtgccctgaggaaaaggctttgggaatttaggcacacgtttctctccttggaatccttctagcatctggaaaaggaacctggtatttctgcagttagataccagatgcaaccagaacaggctttcgagtgctgtgatttctttcctgggttcccaagtcttgttgtttcatcacaaactgtatctttttaaggttaaaagtcttgaccttcatgggggtctgggacaatccgatctccaagcatggaggaaaggcaatgcctggaccactgacttgcattgaaatcctttcttgtgggctagggtttgatgtctctttttcatctttggactggggatctgcatcttccaggtccatttaagcactgaaactagatgcaaatctctttcgagaccttacatgttttagatagtcatgtaatgacttggatagacatttaaataacttgttccaaggtcggaagagcccaagaactcctcagagttcctcttcttgcttcttgaatcacatcctctaaagatgactcatgtctccatagcaactgttaaaggtgctgcctagacgggacccgctcccacctttacttactttgctcgaaggaaccaaaacaatgtccttgtgtaaaggggctgtcatatccagttttcctttgaaatctggcccccaagatcctgcttctttctaacctggcagctgtcatgtcccttcaagatgatgtgggaaatggcccttacaacttgggaaccacagaaattgctgtatttcgggaagattcacctctaaactgaaggcttcattctgatagtgtctgccctctctaccctgatttcgcccttctttgcttccatttttagcccaaggctttgaatttgattgagtaagacttagaggcagtataaagaacaccataaacttaggcagaggtcccttagggtctctagagttgaaaataattctacagccttagggggacctcttggcattgactctaaagggagagaatagcccctgtgtcctggcatttcagtctagaccttcaaggactgttctctcttgacaggcaagcaagcaaagaaagttttgcaatagatttcaagccagtttttccattcaaaccaagatgcaaattcataaaattactcttttcctggaatagatccaggcagctgccttattagaactttagattcggatctattttcttaacacacatacacatacacgcgcatacatacatatacagagagatacgtggagaaaggaaatttactctatcattgcaatacttcaagaaagagctgtattttgcctttctgtaatctccaagatagtgtctaggaaagtaatagtataactatagggataccgaaacaggaaaaaccagccatcactcttgagaaagtttgagttcgactcacatgggagaatcgaggtctgctactcgtcttgctttgtgccccatctgtgcctggatgccctactacayctgcttgactcgtctgggctgctagccggggtgttgtggctgacatcctttcctggccttacacacataatagacacatccctaacggcgtgtgcctggtccagccacatacagccaccacatgtgtcacacactgtccccctcatccatgtggacttgactggcatttcagcagctccactgggatgctctaaccccagtgtgtggagttggggtcccttcatctaggttgacccaggtatagcatttttagcattgcctttccagtcttgatgattcattcattgaactcatttatttctggagcccctggtacactccaggcactgcgctaattgccagcaaagcacaactgaactaaatccaccttcaaggaacctagccataacgagggaggcagcatggaagtaccctacaggggaaagtcctgagtgctgtgggagcatctcaccgtggcagccagcccagttttggcaatcaggggcttcctgaaagaggtgacatcaaagcccggatgtgtcagaggactgagggagagtgttactaaaggactttcaggctgagaggatagcacaggactcagcccaaaggagggccagtgtggactgtccagggccagcctgcagtacagaggctggagcttggacttgtagagggagagagaagagcaagggacgtggacggggcagtgagccaggctagccacagagggttcccggggctttgctggggattcagggagcataaataagagctttaggtggtgctgtgtcctctgcagcccactgctgaggtcctccagacaggtaaggtgtggtcacaatcagggccggggtttccctgctcactgcggcagtgcaggggtgcttgctgagatgattcatcccagggtgtcctctgtcccttacccagccccaactcctcttcctctgccaaaagctatttgaattcaaggactttaacctgggccggatctggtttggagacaaaggggacagctctgggtcagcatgaccttctttagagccactaaggcgaaaaataccgtttgggaccaggctggcctagacccagggatgagaatgcaccctaaaataaatatacgggaagcagcagagggcttccctgtctagtgtgtgatcctaactaaaggcagctctcttggacagccttcccctggattaggtcacatacacctggtggccaagcctctgctgggtcccaaatacacacccgagtcctgccaaagaaaggagatttttaaaaagcacagacaaattgtatgcaagtggaaaatacccataggcctagacagctgtggagggaagacctcgtgggtacctggaggctgccagagctgggagctctgcaggtatgagtcagggaaggctcagagacaagcagaatctctctatggagacaacttgcagtgccttttaggttttccaaataacctcggagttcagagcattgggtttttttctcccctccccacccccagaaaaataattagaaaaatgtttaggagaaaggaaaagaattagatgcatcagaataccagctataagccaacactgtttccagaaactcaagaaaaagctcaaacagaagacagttcccctgagaggctggaggcgttggtgctgaaggcaattttcctagctaaggggcactgggccttgctgcaccttggggctgaccttttttgcaaaacacccacccctgccctcctggcatactcaacagcaacgccagctttctggacccttggaaagatgttagctcaaacacccactttttccagatcttcctcttgctcttcactgaggaatttgtaattctgaggctagcgatgcccactcggatattccgcaggcccaggtgtttagattagaatttgtccagcggtaatcctgatgctggaaaccaacaaacatttggcctcatattcacccatttaaaaactagagcccctggcaggtccccttagggccatgtgttcatggaatataagccaagtttgccttaggcttgttcatggaatataagccaagtttacctctccccattttctgccctggcccacttcccactcacctccacctcattgccaggaagggatcaaaatgcctccatgccagttgttaatggctacatatttgcccttcccaagggtatttgcattttatttaggaacatggccttatattcaaggaaaatctagcatcaagattacgaggcatcacctctcaatcaggtctgggaggtatcttggggcattgctcttctgaacacctgcagaggcttcctcaggtgagtgtgggagcccggaagggtggcctccctaaccactctgcctgcacatgaattctccaaagcagtgggcccccatctgtttcaattacacatgcctgtcagcaaaaacttcgtgagatgcactctctctgtgtgtttattaatttatttaaagcatatatccctttacttttgtactactatattaggcacattataaaaagtatacagcatagaaactttaaatgaataagacacaaaatattataaacagaggttctggcattttctctctgaactcctgagggggaccttgggcacctcctggtatgtgcacaccccactttgaacacccttgctttagtgcaaatcagcacgcctaaatagcatcccaaaccactgtgcgacatttggcctgcagaataagaaagtcctaaggcagaatccccaggaacttcaaatctgggagatgaggaaagaaaactcactcacaaacaacataaatgtaaataattcaaaaccctaaaggagagctgtccctagacagtagtggctacaggtgctaagcaaaagtcaggtacactggacagagccatgcgattgattgttcatcttccctctctgggtctccagaaaaggacactggcaatatccccagctctctcctgattggaattctttgaaccctcgaagtgctccagcagtactaccccccacgtagcagtgggcccatgtcgcttgaatattatttttgatttgaccaccaagatgtaatgatgattctattccattttgaaaagggtctgagaaagtgtacaggtctaattatatatacatatttatacatgtgtatttttgtttattgttacattttgacattggactttctattaaataatttttaagagttaaaaaaaaaaaaaaaaaaaaaaaaaaa

SEQ ID NO: 30835 - DNA, 4469 bp, Homo Sapiens
cgcccgagttgccggagacgcccggccctctctgcctgccggctgggctgcccaccgccctccctccccgccctgccgccctgggagctccccggccgtcgccgcggggcccgggactcgctcgctcctccctccttcccaccgggctagggcggcggcggcagcgggggcggcagagaccatcacgggaggaggcagctgcggcggggccgaatcctaatgtacctggctagctggtggtgagtaggggctttggggccaacttggtgggctccccaaggaaacccctttgaaaccaatggatgcattcacgggctcgggtctcaagaggaagtttgatgatgtggatgtgggctcatcagtttccaactcagatgatgagatctccagcagtgatagtgctgacagctgcgacagcctcaatcctcctaccactgccagcttcacacccacatccatcctgaagcggcagaagcagctgcggaggaagaatgtacgctttgaccaggtgactgtatactactttgcccggcgccaaggttttaccagtgtgcccagccagggtggtagctctctgggcatggcccagcgccataactctgtacggagctatacactctgtgagtttgcccaggaacaggaggtgaaccatcgagagattctgcgtgagcacctgaaggaagagaaactccatgccaagaaaatgaagctgaccaagaatgggacagtggagtcggtggaggctgatggcctgacgctggatgatgtgtcagatgaagatattgatgtggaaaatgtggaggtggatgattacttcttcctgcagcctctgcccaccaaacggcgacgggccctgctgagggcttctggggtccaccgtattgatgctgaagagaagcaagaacttcgagccatccgcctgtcacgggaagaatgtggttgtgactgccgactgtattgtgacccagaagcgtgtgcctgcagccaggctgggattaaatgccaggtggatcgcatgtcctttccatgtggctgctcccgggatggctgtgggaacatggcaggacgcattgaatttaatccaatccgggtccggactcattacctccacaccattatgaagctggagctggagagcaagcggcaggtgagccgcccagcagccccagatgaggagccctccccgactgccagttgcagcctgacaggagcacagggctctgagacccaggacttccaggagttcattgctgagaatgagacagcagtgatgcacctgcagagtgcagaggaactggagcggctcaaggcagaagaagattccagcggctctagtgccagcctggactcgagcatcgagagcctgggtgtgtgcatcctagaggagcctctggctgtccccgaagagctgtgcccaggccttacagcccccattctcatccaggctcagctgcccccaggctcctctgtcctgtgttttaccgagaactcagaccacccaactgcctcaacggtgaacagcccatcctacttgaacagtgggcccctggtctattatcaagtggagcagaggccagtcttgggagtgaaaggagagcctggtacggaagaaggctcagcctctttcccaaaggagaaggatctgaatgtcttctctctccctgttacctcactcgtggcttgtagctccacagacccagctgccctctgtaaatcagaggtggggaaaacacccaccctagaagctctattgcccgaagattgtaaccctgaggagcctgaaaatgaagacttccacccttcctggtccccctcaagcctccccttccgcacggacaatgaagagggctgtgggatggtgaagacctcccagcagaatgaggatcggccccctgaagattcttccttagaactccctctggcagtgtgacaggcgctagaggtcctgcctcttacccattctctatttattcccttattttatctaacaccatttcaaaacaaaactgtagaagcagctgctgctcccatgttattttattggggtctttggggaatgggtgggaaaggattgtttgagtattttttaaaagggaaacagtaccaaggagaccagccctaccttgatctggggatagtcttggggcaaagaaagctgcgtagtgctgaacattaagctttctgggccactggaacaaagaactaggatctcacaggaaaagctgggtaactcaagcagctattctttctgtagggaccagaacacgagaatttgaagagcatggcaaagccctttctctcccaagccccaggcagagtacaagctcatttttctcggtggttattctgatatcccattttggtgtgtcataatacttcaaactggaaagtcacctggtcgagtctagggaggagggagtggaagggtctctgcttctgtacaaaatctccaggatttacaaaaatgtaacctgccttccttcaatcccatatttggtaaataagttaatatttgacatgtttggtgttctctgacctgttccccacactggggattcctggtctgtaacttgaattgtttcttccacatgttcttaagtactagagttaaacttgtctatgtgtcttttttctctccatcctttttccttcggagaaagagctggattggctggggatatggtataacgagcctgagccttctgtacgtgtctgacactagcactgtcaggcagctttcggctggggctcacccatcccataggaggcctatgtggagcattaactgtggccaaaggaggcagcgggaacaggctgcttgctatctggaaagatgacatatttgtgccatgcttgttttttcacccaggtttttccctctttgtgagatctgagctttagtggaatgtagaatgtggcaatcttaaggtcaccaatcagtttttgttcttttttcctggatctaccctcatggtcgttttcaacatagcgggttagagttcttatactgttccagttcaattccaagaattgcaaatgtttattggacccctccatcttgatgatatataaaaattggaagccaaaccagttcttaaatgctacatgcaactcccagattccaaaggattcaagttctaattataacctttgaagcgtatagaatggaactcattcagtttgattcagttcttacctctgtcaggaggaatacagttcctgttcatcctgtgttctaagatctccattgaacagcactgatttcctttcattagcaaagtgatctttgtctctgttctaaaatggaggcagtagggagcaaaactattcttctcaagcatcctttacaccatactttacttctggtatggtttattaaccacacacacacacaaaagtgaaaaactgtgttgggggggagacactactcctacttatcttgctcataaagccttttctggtgggatattaaggccctggtgtcttacagaaaccatcacgtatgtcgcagcagcatttcacccctgaagtctctaaactctgagcctgaaaagatttgtatttaatacacataacattttttagttcattctgcctttcctatttgttccagtttttgcttggttttagtttggaggggaacttaagtacacagatccttatctctccccatcccctagcctcacaaaacacagttgagagtcttttaagtacctgagctctcgaagctacccagaactgaactagactcccctaccttagactggtaccctcaaacacaggactgaagcttaattgggaatttggctttatggagaaaagaatctttttcaaagtttgtgtcggaaggggagggtgaggtttgcccactgtctctgcaggaaggctccggcttaatctaggaagtagattccagctgcacgatgaggaacacattagcttttgggatcaaaccaggaatatgaatctgtaattattaagctcattgccaacccacaagatatgtttctgaaaacctgtagtttcttaatttaagtccatccccttcattaacgctacagttgtgactcacactgatcccaaacttttaagtgctaaatattaacatttagcattaactgtcttgtcaagcgaaaggccttctctacaacctagtccatctcacttctggtgctacctgagttggacagaattctagctcatggttgctaggaaagctaggcctctgatcatagaagcagatagcttcagtcccagtctaggcctagataaatgactcttattaccacaacccttattattttccaatttcctttctcacatactgtacacaggtagtattttcaatgtgaatccaaagcttgtctggttctctgaaaataattttttcccctttaggttctttacattgtgataatgctgtatttaaagagaatatttaaatgtaatattaaagaaatattcaaaag

SEQ ID NO: 30836 - DNA, 1852 bp, Homo Sapiens; identical to SEQ ID NO: 26633

SEQ ID NO: 30837 - DNA, 1352 bp, Homo Sapiens
ataccctccatgggcagtaatgggatgactatccccagggagcattgcgaaggagagaggcggctgagggactgcactttctggggccccccgggagagtcagagggcagttaagagggatcacaggcccggcttggtactgtcactccccttcccactccctgctctcagcattctgtcacctccctaccccgtcgcggtgcccagccatggccagacctcccgtgcccggttcggtggttgtcccaaactggcacgagagtgccgagggcaaggagtacctggcttgcattctgcgcaagaaccgccggcgggtgtttgggctgcttgagcggccagtgctgctgccgcctgtgtccattgacactgccagctacaagatctttgtgtccgggaagagtggtgtgggcaagacggcgctggtggccaagctggctggcctggaggtgcctgtggtgcaccacgggaccaccggcatccagaccaccgtggtattttggccagccaagctgcaggccagcagccgtgtcgtcatgtttcgttttgagttctgggactgtggagagtctgcactcaaaaagttcgatcatatgctgctggcttgcatggagaacacagatgccttcctcttcctcttctccttcactgaccgtgcctcctttgaagacctccctggacagctggcccgcatagcaggtgaggcccctggtgtcgtcaggatggtcatcggctccaaatttgaccagtacatgcacacggacgtgcccgagcgggacctcacagccttccggcaggcctgggagctgcccctgctacgggtgaagagtgtgccggggcggcggctggctgatgggcgcacactggacgggcgggctgggctggccgacgttgcccacatactcaatggccttgctgagcagctgtggcaccaggaccaggtggcggctggcctgcttcccaaccccccagagagtgctcctgaatgagtcacgagtggttgcctgtgatcccacccccaaccctcaggtctcgacatagggctggaggctggggcaggaacatggatcctatctggaggactggccagcatggcctgatcagggaggatgtggccagagaaggcccacccgcgagcagcgctttccttgcagaattcatggcagggaggtggggaccaaggccctgagctcgaacatctcccgtggcctttccccctttggcagcaccgatggaggatgactgggagagggggtgcctctcaagttacttcaatcaagaacctgtattggttgaggtgacaccatctgttgtaacagataaaccccgaaatcccaaaaaaaaaaaaaaaaaaa

SEQ ID NO: 30838 - DNA, 3901 bp, Homo Sapiens
gttttcctccgcggatccgcggctggacttggacccagggctctcccgacagcgccctggaacccaaattcaagcaccatccaattcggacgctcatcgcatctcgcctgagcacaaccacggattgcgaactcagcgcagcgcgtggccgctggccgcccgcggcgatctcgatcccgctgacccgaatcctggagtcagaggtttcctatccccctcaagcccccacaggagtcaccaacccagggccggcttatgggtgagggggcaccccctggggcctgagctgccccgcacaggatgccccgtgccccccacttcatgcccttgctgctactgctgctgctgctctcacttccccatactcaggccgcctttccccaggaccccctccctctgttgatctctgaccttcaaggtacttccccattatcctggtttcggggcctggaggatgatgctgtggctgcagaacttgggctggactttcagagattcctgaccttgaaccggaccttgctagtggctgcccgggatcacgttttctccttcgatcttcaagccgaagaagaaggggaggggctggtgcccaacaagtatctaacatggagaagccaagatgtggagaactgtgctgtacggggaaagctgacggatgagtgctacaactatattcgtgttcttgttccctgggactcccagacgctccttgcctgtggaacgaactcattcagccctgtgtgccgcagctatgggataacttcgctgcagcaggagggtgaggaactgagtgggcaggctcgatgcccctttgatgccacccagtccaacgtggccatctttgcagagggcagcctgtactcagccacagctgcggatttccaggccagtgatgctgtagtttacagaagccttgggccccagcccccactccgctccgccaagtatgactccaagtggctccgagagccacactttgtccaggccttggagcatggagaccatgtctacttcttcttccgcgaggtctctgtggaggatgctcggctggggagggtgcagttctcccgcgtagcccgagtatgtaaacgtgacatgggcggctcgcctcgggccttggaccgccactggacatccttcctgaagcttcggctcaactgctctgtccctggggactctactttctattttgatgttttacaggccttgactgggcctgtgaacctgcatggccgctctgctctctttggggtcttcaccacccagaccaatagcatccctggctctgccgtctgcgccttctacctggatgagattgagcgtgggtttgagggcaagttcaaggagcagaggagtctggatggggcctggactcctgtgtctgaggacagagttccctcacccaggccaggatcctgtgcaggagtagggggagctgccttgttctcctcttcccgagacctccctgatgatgtcctgaccttcatcaaggctcacccgctgctggaccccgctgtaccacctgtcacccatcagcctctactcactctcactagcagggccctactgacccaagtagctgtggatggcatggctggtccccacagtaacatcacagtcatgttccttggctccaatgatgggacagtgctgaaggtgctgaccccaggtgggcgatccgggggacctgagcccatcctcctggaagagattgatgcctacagccctgcccggtgcagtgggaagcggacagcccaaacagcacgacggatcatagggctggagctggacactgagggtcacaggctttttgtggctttttctggctgtattgtctacctccctctcagccggtgtgcccggcatggggcctgtcagaggagctgtttggcttctcaggacccatactgtggatggcatagctccaggggctgtgtggatatcaggggatctggtgggactgatgtggatcaggctgggaaccaggaatccatggagcatggtgactgccaagatggagctactgggagtcagtctggccctggggattctgcttatggcgtgcgccgggacctgcccccagcctcggcctcccgctccgtccccatcccactcctcctggccagtgtggccgcagcttttgccctgggcgcctcagtctctggcctcctggtctcctgtgcttgtcgccgcgcccaccgacgtcggggcaaggacatcgagactccggggctcccgcgccctctctccctccgcagtttggcccggctccacggtgggggcccagagcccccgccgccctccaaggacggggacgcggtgcagacgccgcagctctacaccaccttcctgccgcctccggagggcgtgcccccgccggagctggcctgcctgcccacccccgagtccacgccggagctgccggtcaagcacctccgcgccgccggggacccctgggagtggaaccagaacaggaacaacgccaaggagggtccgggccgctcacggggcgggcacgcggcgggcgggcccgcgccccgcgtgctggtgaggccaccgccgcccggctgtcccgggcaggccgtggaagtcaccaccctggaggaactgctgcgctacctgcacggcccgcagccgcccagaaagggggccgagccccccgcccctttaacctcgcgggcgctcccgccggagcccgcccccgccctcttgggcggccccagccccaggccccacgagtgcgcctcgccgctgaggctggacgtgccccccgagggcaggtgcgcctctgcccccgcccggcccgcgctctccgcccccgctccccggctgggcgtcggcggaggccggaggttgcctttctccggccaccgggccccccctgccctgctcactcgagtcccctcgggaggtccctccaggtactccgggggtcccgggaagcacctcctgtacctgggccggcccgagggctaccggggccgcgccctgaaaagggtggacgtcgagaagccccagttgtccctgaagcctcccctcgtcgggccctcctcccgccaggccgtcccgaacggcggccgtttcaacttttaaagggagcggtccacggcctccagcgtggggagcgcccgagtcctctcggccacgagctggacgctcttcaggacgtttcaccgccccctcgccccgcacctccagccttcccgactcgcagagtctcccgaggccccttttcgcctcgggtttatttattgactgtctttccccctgtcctcgacagaagagtgggaggtgagaagcccgtctcctcagtgagccagcatttcagggggagctggcggactcccactccccgctcccttccagccaagctgccttaactcgcccctcggggctcccccagagactgtgccccgggcgggccgcgcgcgctgtgtccagagtcctcgggcctcctgggtctgggacgtgcctctcctactgtgtaggagcctccgcttcccaatacagccgtgtctgcagccactgcctgacttcactcgggcgggggagggcggcagtcggtcggctcgctctgggcgccctcgctctctgccttcatctgggccctgggctctcccgggtaatgggatggctgcggtcccgccggggggcagtctggaaaggtttcctaaaggagacgagcgaattaacggtgtcgaggtgagccagggccagggggaccccggtaaagtttagttgaggctggggaaggccctcggagctcgtttccagatcgaggtaagagggactttcttaaaggcctagtctatgggatggggcggcggagggaattttttgagaaataaaatgaagctgcagtgtacgttacttgaagttccacatcagaaaaaaaaaaaaa

SEQ ID NO: 30839 - DNA, 2744 bp, Homo Sapiens
gttgttggccacagcgtgggaagcagctctgggggagctcggagctcccgatcacggcttcttgggggtagctacggctgggtgtgtagaacggggccggggctggggctgggtcccctagtggagacccaagtgcgagaggcaagaactctgcagcttcctgccttctgggtcagttccttattcaagtctgcagccggctcccagggagatctcggtggaacttcagaaacgctgggcagtctgcctttcaaccatgcccctgtccctgggagccgagatgtgggggcctgaggcctggctgctgctgctgctactgctggcatcatttacaggccggtgccccgcgggtgagctggggacctcagacgtggtaactgtggtgctgggccaggacgcaaaactgccctgcttctaccgaggggactccggcgagcaagtggggcaagtggcatgggctcgggtggacgcgggcgaaggcgcccaggaactagcgctactgcactccaaatacgggcttcatgtgagcccggcttacgagggccgcgtggagcagccgccgcccccacgcaaccccctggacggctcagtgctcctgcgcaacgcagtgcaggcggatgagggcgagtacgagtgccgggtcagcaccttccccgccggcagcttccaggcgcggctgcggctccgagtgctggtgcctcccctgccctcactgaatcctggtccagcactagaagagggccagggcctgaccctggcagcctcctgcacagctgagggcagcccagcccccagcgtgacctgggacacggaggtcaaaggcacaacgtccagccgttccttcaagcactcccgctctgctgccgtcacctcagagttccacttggtgcctagccgcagcatgaatgggcagccactgacttgtgtggtgtcccatcctggcctgctccaggaccaaaggatcacccacatcctccacgtgtccttccttgctgaggcctctgtgaggggccttgaagaccaaaatctgtggcacattggcagagaaggagctatgctcaagtgcctgagtgaagggcagccccctccctcatacaactggacacggctggatgggcctctgcccagtggggtacgagtggatggggacactttgggctttcccccactgaccactgagcacagcggcatctacgtctgccatgtcagcaatgagttctcctcaagggattctcaggtcactgtggatgttcttgacccccaggaagactctgggaagcaggtggacctagtgtcagcctcggtggtggtggtgggtgtgatcgccgcactcttgttctgccttctggtggtggtggtggtgctcatgtcccgataccatcggcgcaaggcccagcagatgacccagaaatatgaggaggagctgaccctgaccagggagaactccatccggaggctgcattcccatcacacggaccccaggagccagccggaggagagtgtagggctgagagccgagggccaccctgatagtctcaaggacaacagtagctgctctgtgatgagtgaagagcccgagggccgcagttactccacgctgaccacggtgagggagatagaaacacagactgaactgctgtctccaggctctgggcgggccgaggaggaggaagatcaggatgaaggcatcaaacaggccatgaaccattttgttcaggagaatgggaccctacgggccaagcccacgggcaatggcatctacatcaatgggcggggacacctggtctgacccaggcctgcctcccttccctaggcctggctccttctgttgacatgggagattttagctcatcttgggggcctccttaaacacccccatttcttgcggaagatgctccccatcccactgactgcttgacctttacctccaacccttctgttcatcgggagggctccaccaattgagtctctcccaccatgcatgcaggtcactgtgtgtgtgcatgtgtgcctgtgtgagtgttgactgactgtgtgtgtgtggaggggtgactgtccgtggaggggtgactgtgtccgtggtgtgtattatgctgtcatatcagagtcaagtgaactgtggtgtatgtgccacgggatttgagtggttgcgtgggcaacactgtcagggtttggcgtgtgtgtcatgtggctgtgtgtgacctctgcctgaaaaagcaggtattttctcagaccccagagcagtattaatgatgcagaggttggaggagagaggtggagactgtggctcagacccaggtgtgcgggcatagctggagctggaatctgcctccggtgtgagggaacctgtctcctaccacttcggagccatgggggcaagtgtgaagcagccagtccctgggtcagccagaggcttgaactgttacagaagccctctgccctctggtggcctctgggcctgctgcatgtacatattttctgtaaatatacatgcgccgggagcttcttgcaggaatactgctccgaatcacttttaatttttttcttttttttttcttgccctttccattagttgtattttttatttatttttatttttatttttttttagagatggagtctcactatgttgctcaggctggccttgaactcctgggctcaagcaatcctcctgcctcagcctccctagtagctgggactttaagtgtacaccactgtgcctgctttgaatcctttacgaagag

SEQ ID NO: 30840 - DNA, 2420 bp, Homo Sapiens
ggcagcggtggtgacggcggtgccggaggttgtccttggcaggttttcctcggcgcttctccatggaggaggcggtgcgaacggcttcagccccgaatgctcgcatctcccactggacggcgacgaaggcggtggccgtgcgagcgcaggactgggcggcctgtgtgggggtgtgagccgcggtgcccaaggctgcgccggcgaggggaagccgcgcggccggccggccgactagggctggagctactcggccagggtttaagactttaaatgagaataaagggtggtatttacgaggaaatgagagtgaataagtcatctctaacctctcccagcctttttttcataagagagaccatattaaacttacatgtttgaagactgcttcattctgcctctagtaccagcggtttctctgttctgtgatcaatgtgattcacaggaactccttaagtaacaaacgaaatgagccaggggcgtggaaaatatgacttctatattggtctgggattggctatgagctccagcattttcattggaggaagtttcattttgaaaaaaaagggcctccttcgacttgccaggaaaggctctatgagagcaggtcaaggtggccatgcatatcttaaggaatggttgtggtgggctggactgctgtcaatgggagctggtgaggtggccaacttcgctgcgtatgcgtttgcaccagccactctagtgactccactaggagctctcagcgtgctagtaagtgccattctttcttcatactttctcaatgaaagacttaatcttcatgggaaaattgggtgtttgctaagtattctaggatctacagttatggtcattcatgctccaaaggaagaggagattgagactttaaatgaaatgtctcacaagctaggtgatccaggttttgtggtctttgcaacccttgtggtcattgtggccttgatattaatcttcgtggtgggtcctcgccatggacagacaaacattcttgtgtacataacaatctgctctgtaatcggcgcgttttcagtctcctgtgtgaagggcctgggcattgctatcaaggagctgtttgcagggaagcctgtgctgcggcatcccctggcttggattctgctgctgagcctcatcgtctgtgtgagcacacagattaattacctaaatagggccctggatatattcaacacttccattgtgactccaatatattatgtattctttacaacatcagttttaacttgttcagctattctttttaaggagtggcaagatatgcctgttgacgatgtcattggtactttgagtggcttctttacaatcattgtggggatattcttgttgcatgcctttaaagacgtcagctttagtctagcaagtctgcctgtgtcttttcgaaaagacgagaaagcaatgaatggcaatctctctaatatgtatgaagttcttaataataatgaagaaagcttaacctgtggaatcgaacaacacactggtgaaaatgtctcccgaagaaatggaaatctgacagctttttaagaaaggtgtaattaaaggttaatctgtgattgttatgaagtgaatttgaatatcatcagaatgtgtctgaaaaaacattgtcctcaaataatgttctttaaaggcaatctttttaaagatttcactaatttggaccaagaaattacttttcttgtatttaaacaaacaatggtagctcactaaaatgacctcagcacatgacgatttctattaacattttattgttgtagaagtattttacattttcatcccttctccaaaagccgaatgcactaatgacagttttaagtctatgaaaatgctttattttttcattggtgatgaaagtctgaaatgtgcatttgtcatccccactccatcaatccctgaccatgtaaggcttttttattttaaaaaaacagagttatcccaatacattatcctgtgatttaccttacctacaaaagtggctcctgtttgtttgatgatgattggttttatttttgaaatatttattaagggaaaactaagttactgaatgaaggaacctctttcttacaaaacaaaaaaaagggcagaaatcaccccaaggaacgatttctcaggttgagatgatcaccgtgaatccggcttcctctgagcattcgatggccttagcacctcatcaagccagcacatcctgcctgctgttgcagcctggctgggtttattcttcagttaccctaatcccatgatgcctggaaccttgattaccgttttacatcagctcttgtacttttcagtatattttcataatgagttatattgtcatttagactttgaacagctctgggaaatagaagactagggttgtttcttaaatttagctcatgttataataaaaagttgaaatg

SEQ ID NO: 30841 - DNA, 2002 bp, Homo Sapiens
tttagtaaatcacacaaaaatccagcagaaattgtgaaaatcctgaaagacaatttggccattttggaaaagcaagacaaaaagacagacaaggcttcagaagaagtgtctaaatcactgcaagcaatgaaagaaattctgtgtggtacaaacgagaaagaacccccaacagaagcagtggctcagctagcacaagaactctacagcagtggcctgctggtgacactgatagctgacctgcagctgatagactttgagggaaaaaaagatgtgacccagatatttaacaacatcttgagaagacagataggcactcggagtcctactgtggagtatattagtgctcatcctcatatcctgtttatgctcctcaaaggatatgaagccccacagattgccttacgttgtgggattatgctgagagaatgtattcgacatgaaccacttgtcaaaatcatcctcttttctaatcaattcagagatttctttaagtacgtggagttgtcaacatttgatattgcttcagatgcctttgctactttcaaggatttactaaccagacataaagtgttggtagcagacttcttagaacaaaattacgacactatttttgaagactatgagaaattgcttcagtctgagaattatgttactaagagacagtctttaaagctgctaggggagctgatcctggaccgtcacaactttgccatcatgacaaagtatatcagcaagccggagaacctgaaactcatgatgaacctccttcgggataaaagtcccaacatccagtttgaagcctttcatgtttttaaggtgtttgtggccagtcctcacaaaacacagcctattgtggagatcctgttaaaaaatcagcccaaactcattgagtttctgagcagcttccaaaaagaaaggacggatgatgagcagttcgctgacgagaagaactacttgattaaacagatccgagacttgaagaaaacggccccttgaagagctccccggcccctgtcacagtcagtcgtctcatttgtccagtttgtacagtgtgtcatttcagaaagtcatcattcttgggaagactttggaggtgcctattttttctgctgtaattgttctgggtagatggagtataaacatttgaatggaaaaaaattaacctagaataatatattcattttagtcaagtctgtgattatttatgtgaaatgagaaccattgtatcagatgttgataaaagcaattttaacttgcagatgtgagcccctgggcacaatgagccgctaaatgggagctcaattgacaggcatcaccaagtcttcaaggaggactgagttctcaggggagaactgggaatggggccagggtgcaaaaatgctttgcccatctgtaggtagacacacagatcgctcagggcactgagagatcccagaaggtaacgttaatgttttcagtcattgtgtgtcctttgttgctgccaatgtctttggactgtaatcagtgcatccacacctcccaggatccagtgctccctctcagctcagtctcccctctctccctgtcctgcattccatcccagctcctcagcatggcctcagtgggcgcacccatgcctcccgcagtccaggtgagcaggggagcaactgagcaggaagaggatggatcaacaagggtcacggggaataggggacccacggggtgtgacctgcttgctagagaactgtgaacatgtggctctggatagagtgactgctgctccatattagcttccagagggtgagtgagggacagaatatttccttcataatggtcatgggtgaatgctttctgctgtaagtgtcttttagagtaggaatcagcatagtgggatgcccagcaggcacaaaccatgggtccagggagtctcagcggggaacttctatcagtatcaataaccattggaaggagaaatgattcatgtgtgaaaaaattctcagatccatcaataaatttttttcag

SEQ ID NO: 30842 - DNA, 2706 bp, Homo Sapiens
attgtccggagtgggtccttgacattcaggaaagatacatccttagacctttcaaaatttgtcatgcctctctaacctaaaacagccctcattaaatgcactttaatccgagcactgtatggcttggaaagaattatgagtgaggagaggagcctttccttattggccaaagccgtggatcccagacaccccaatatgatgacagatgtggttaaacttctctctgcggtatgcattgtaggggaagaaagcatccttgaagaagttttagaagctttaacttcagctggtgaagaaaaaaaaattgacagatttttttgtattgtggaaggcctccggcacaattcagttcaactgcaagtagcttgtatgcagctcatcaatgccctggttacatctcctgatgatttggatttcaggcttcacatcagaaatgaatttatgcgttgtggattgaaagagatattgccaaatttaaaatgcattaagaatgatggcctggatatccaacttaaagtctttgatgagcataaagaagaagatttgtttgagttatcccatcgccttgaagatattagagctgaacttgatgaagcatatgatgtttacaacatggtgtggagcacagttaaagaaactagagcagagggatattttatttctattcttcagcatcttttgctgattcgaaatgattattttataaggcaacaatacttcaaattaattgatgagtgtgtatcccagattgtattgcatagagatggaatggatccagacttcacatatcgaaaaagactagatttagatttaacccagtttgtagacatttgcatagatcaagcaaaactagaagagtttgaagagaaagcatcagaactttacaagaaatttgaaaaagagtttaccgaccaccaagaaactcaggctgaattgcagaaaaaagaggcaaagattaatgagcttcaagcagagctacaagcttttaagtctcagtttggtgccttgccagctgattgtaatattcctttgcctccctctaaagaaggtggaactggccactcagcacttcctcctccgcctccactgccttctggtggaggggtgccgcctccacctcctcccccaccacctcctccacttccaggaatgcggatgccattcagtggtcctgtgcctccaccacctcccctgggattccttggaggacaaaattctcctcctctaccaatcctgccatttgggttgaaaccaaagaaagaatttaaacctgaaatcagcatgagaagattgaattggttaaagatcagacctcatgaaatgactgaaaactgtttctggataaaagtaaatgaaaataagtatgaaaacgtggatttgctttgtaaacttgagaatacattttgttgccaacaaaaagagagaagagaagaggaagatattgaagagaagaaatcgattaagaaaaaaattaaagaacttaagtttttagattctaaaattgcccagaacctttcaatcttcctgagctcttttcgggtgccatatgaggaaatcagaatgatgatattggaagtagatgaaacacggttggcagagtctatgattcagaacttaataaagcatcttcctgatcaagagcaattaaattcattgtctcagttcaagagtgaatatagcaacttatgtgaacctgagcagtttgtggttgtgatgagcaatgtgaagagactacggccacggctcagtgctattctctttaagcttcagtttgaagagcaggtgaacaacatcaaacctgacatcatggctgtcagtactgcctgcgaagagataaagaagagcaaaagctttagcaagttgctggaacttgtattgctaatgggaaactacatgaatgctggctcccggaatgctcaaaccttcggatttaaccttagctctctctgtaaactaaaggacacaaaatcagcagatcagaaaacaacgctacttcatttcctggtagaaatatgtgaagagaagtaccctgatatactgaattttgtggatgatttggaacctttagacaaagctagtaaagtctctgtagaaacgctggaaaagaatttgaggcagatgggaaggcagcttcaacagcttgagaaggaattggaaacctttccccctcctgaggacttgcatgacaagtttgtgacaaagatgtccagatttgttatcagtgcaaaagaacaatatgagacactttcgaagttacacgaaaacatggaaaagttataccagagtataataggatactatgccattgatgtgaagaaggtgtctgtggaagactttcttactgacctgaataacttcagaaccacattcatgcaagcaataaaggagaatatcaaaaaaagagaagcagaggaaaaagaaaaacgtgtcagaatagctaaagaattagcagagcgagaaagactcgaacgccaacaaaagaaaaagcgtttattagaaatgaagactgagggtgatgagacaggagtgatggataatctgctggaggccttgcagtccggggctgccttccgcgacagaagaaaaaggacaccgatgccaaaagatgttcggcagagtctcagtccaatgtctcagaggcctgttctgaaagtttgtaaccatggtaataaaccgtatttataaattacaaaaaaaaaaaaaaaa

SEQ ID NO: 30843 - DNA, 1978 bp, Homo Sapiens
gccgtgtccatggagagaagctgaggcggccgaccttcggcccgaggcaccggggcgccgggacggcgaatgatgtcggcttccttagtccgggcaactgtccgggctgtgagcaagaggaagctgcagcccacccgggcagccctcaccctgacaccttcagcagtaaacaagataaaacaacttcttaaagataagcctgagcatgtaggtgtaaaagttggtgtccgaaccaggggctgtaatggcctttcttatactctagaatatacaaagacaaaaggagattctgatgaagaagttattcaagatggagtcagagtattcatcgaaaagaaagcacagctaacacttttaggaacagaaatggactatgttgaagacaaattatccagtgagtttgtgttcaataacccaaacatcaaagggacttgtggctgtggagaaagctttaatatttgaaatctcaggactcttctggccgtaggttccaggaaagctcgtggaagctttggggctcactgcagaaatcatgtgactgtcacgtgctggaaaataaagtgatacatcttgaaaatgaatccagtgtgttggattccagaagaaatgatatttatattctctataggggacagaaaatgagaagccatcactctttttggatcatttaggtctcttgtatcctttgttttagaaccagtttcattaaagttgccttcctgggcacctgtttatccatttcctgaactgtgtgcactccttagatcgctattgatggcttgatcatccctcagcatttctcccaaccagatcggtgactcctaaaatctgagacaggacatcgtgactgctggtagtaatatggtggtgcattgttttttccacccaaacttaacatagcctttttatacatttttatgaaaaatttcattgtcagctgcctcactgcatactctttaatagtaccaggcaaagattttcttcaactatagtacagattagttctgagtgatggtatcaaaaggtgagaaagacgtcatccgcctttttttaatccatttcttttgccaccctatatgtctgttcagagatgggctctcaagctgactttgattcttttagttgagaagtctcttaaagccatctagcccacctccatcaattccctatgtgaggaagcaaaaccccagggaagccaaagggctcctgtccaccctgacaccacaggccgggggagagtagggactctacccccctctccccttgtaggtgacacatgctctgccctctgaggcagtcagcgaaggcaaatggtctgacttctttatgtgggtcaacatttttgataggaatttctttataattttgataggaggatttatattatttttatttttatttttgagtgggaaggaattttaaaacctttttatgtcaattaccatcttgtttctttcacctttgaaacaatgatttgtagcagagatgacattgtagcaacccagaattatgcttttggaatgtggtcctcactgtacaggagaatgtgtaatcttttgttaaaattcccagtgtgcatacattttctggttcctcggtccagttgctaaagttcttagtattttagcctaacatatttatcaccaacttttctttaaaagtgttccttttgtcacttagttactgattttcctgggtttgacataagtattctatgagatgatatatatgctttttttgaaagctgattctcatgaattcaagtagctgagttcctttatgtttcgtttattcactaaagtagctgacacaaaacacaccaaaacctagagcggtagttttatgtaaatgctcatgagtttgtatcaataatataattgttgatccacttataattcgtgcaatactgtatgtatgtagagattgagttgtcaattaaaaaaaatgtggcctcttaaaaaaaaaaaaaaaaaaaaaa

SEQ ID NO: 30844 - DNA, 1710 bp, Homo Sapiens
gaattcggctcgaggcccgaggagaccacgctcctggagctctgctgtcttctcagggagactctgaggctctgttgagaatcatgctttggaggcagctcatctattggcaactgctggctttgtttttcctccctttttgcctgtgtcaagatgaatacatggagtctccacaaaccggaggactacccccagactgcagtaagtgttgtcatggagactacagctttcgaggctaccaaggcccccctgggccaccgggccctcctggcattccaggaaaccatggaaacaatggcaacaatggagccactggtcatgaaggagccaaaggtgagaagggcgacaaaggtgacctggggcctcgaggggagcgggggcagcatggccccaaaggagagaagggctacccggggattccaccagaacttcagattgcattcatggcttctctggcaacccacttcagcaatcagaacagtgggattatcttcagcagtgttgagaccaacattggaaacttctttgatgtcatgactggtagatttggggccccagtatcaggtgtgtatttcttcaccttcagcatgatgaagcatgaggatgttgaggaagtgtatgtgtaccttatgcacaatggcaacacagtcttcagcatgtacagctatgaaatgaagggcaaatcagatacatccagcaatcatgctgtgctgaagctagccaaaggggatgaggtttggctgcgaatgggcaatggcgctctccatggggaccaccaacgcttctccacctttgcaggattcctgctctttgaaactaagtaaatatatgactagaatagctccactttggggaagacttgtagctgagctgatttgttacgatctgaggaacattaaagttgagggttttacattgctgtattcaaaaaattattggttgcaatgttgttcacgctacaggtacaccaataatgttggacaattcaggggctcagaagaatcaaccacaaaatagtcttctcagatgaccttgactaatatactcagcatctttatcactctttccttggcacctaaaagataattctcctctgacgcaggttggaaatatttttttctatcacagaagtcatttgcaaagaattttgactactctgcttttaatttaataccagttttcaggaacccctgaagttttaagttcattattctttataacatttgagagaatcggatgtagtgatatgacagggctggggcaagaacaggggcactagctgccttattagctaatttagtgccctccgtgttcagcttagcctttgaccctttccttttgatccacaaaatacattaaaactctgaattcacatacaatgctattttaaagtcaatagattttagctataaagtgcttgaccagtaatgtggttgtaattttgtgtatgttcccccacatcgcccccaacttcggatgtggggtcaggaggttgaggttcactattaacaaatgtcataaatatctcatagaggtacagtgccaatagatattcaaatgttgcatgttgaccagagggattttatatctgaagaacatacactattaataaataccttagagaaagattttgacctggctttagataaaactgtggcaagaaaaatgtaatgagcaatatatggaaataaacacacctttgttaaagat

SEQ ID NO: 30845 - DNA, 3508 bp, Homo Sapiens
gcaacagcccagccctagcttgggagcggacccacacgaactgctcaaaggcttggagcgggtctagtaaggcgaacggactgcttccggccagaggtcccgggcggaggaggaagctgtggctgccggcggtgggacgccccggccgctcagcccccgggcactgctgtggggcgttcagctttccacacttggggcaaagcaagccgcgaggaggaaccagacagtcctgttagttgtggccagccctcattccctggaaatggcaaacaaggggaacaagaagcgtcggcagttctctctggaggagaaaatgaaagttgtgggagctgtagactcaggcaagaggaaaggtgatgtggcaaaagaatttggtatcactccctctactttatctacattcttaaaggatcgcaccaaatttgaagaaaaggtgcgggaggcatccgtgggaccccagcggaaaaggatgaggagcgctctttatgatgacattgataaggctgtttttgcttggtttcaagaaatccatgccaaaaacattcttgtgactggttctgtcattcggaaaaaagcactaaacttggccaacatgcttggctatgacaattttcaagcaagtgtgggctggctgaacagatttagagatcgccacggaattgctttgaaagcagtctgtagagaagatagtgacaggttaatgaatggtctaggaatagataagattaatgagtggcatgcaggggaaattataaaactgattgctgactacagcccagatgatatctttaatgctgatgagacaggagtgtttttccagttgcttccccagcacacacttgctgctaaaggagaccactgtagagggggcaagaaagcaaagcagcggttgacagcactcttttgttgcaatgcctcggggactgaaaaaatgagaccattgattgttggtaggtcagccagcccacactgcctcaagaacattcattccctcccttgtgattaccgagccaaccagtgggcttggatgacaagggatctgtttaatgagtggctgatgcaagtggatgccaggatgaagagggcggaacgccggatcctcttgctcatagacaactgctctgctcataacatgcttccacacttggaaaggattcaggttgggtatctgccctccaactgtactgctgtcctgcagccactgaatcttggcataattcacaccatgaaagtactgtaccagagccaccttctaaaacagatcctcctcaagctcaacagcagtgaggatcaagaagaggtggacatcaagcaggccatcgacatgattgctgcagcgtggtggtcagtcaagccatccacagtggtgaaatgttggcagaaggcaggcatcgtccctatggaatttgcagaatgtgacacagaatcagcagccagtgaaccagacattgccattgaaaagttgtggcacacagtggctattgccacctgtgtcccaaatgaagtaaatttccaggactttgttactgcagatgatgatctcattatctctcaggacacagacatcatccaggacatggtggctggcgaaaataccagtgaagcaggaagtgaagatgaaggggaggtatctttaccagagcaaccaaaagtcaccatcacagaagccatatcaagtgtacagaaacttagacagttcctttccacttgtgtagacattcctgatgccatttttggacaattaaatggcatagatgaatatttaatgaaaagagtgacacaaacccttattgattccaaaattacagatttcctccaaacaaaataatgcaggaatttatttcagaaaatgtagtttacaagaataaagatttctttagataggttgttgagccaatttaagtaaagcaatgttattgtgacaacattccagtactctgaaatagccaggaaacttctttgaatggaatttgactaatatgtgtgttttcttttcttttgtttttggctgtctctggtccttgattcaagatgtattttgattcatccaagggtttccaaacttgtctgcaaattaggatcacttgagaatcctttaaaaattccaaagctcaggccatatcccaggcctattaaatcacaatctttggtgacgggtcacaggcattggtagttttgaagctctccaggtgattccaatgtgcagacaaatttgaaaactgaaccaaccacaggaacatcaagtacactgtgggcctgggtccagcttctttccagtaagtgtatctcaggggcttccaaatttagcttacatcagaatcacttggaaggcttgttaaaacccaaggctgctaggcccacccccagagtttgatacagtagacctcaggtgggacccaaaaatttgcatttctaacacattctcagctgatgcagtccaggctccatgctttgaaaaccactggtctagctttagataggatattgagccaatttaaataaagcaatatactggtctagctgagttctagaacttctctctttagctggccatctgaatactcccccatcactaattgttaaaaaaagaatcaactgttcttactctagagctcttttttcctttctgctgatttgctggaagcactacaagacttctgtttgttcgttcgtttgtttgtttgtttgtttttaaagatggggtcttgttatattgcctaggctggaatgcagtggttattcacaggcatgattataacacactactctctctaactcctggcctcaagccatcctcccaaatagatgggactactgatgcacactgccatgctggccttacgaaatgttttaataggcatttcactaatagggatctggagtacaaggaaatacagtgcatttaagacataggctgggcatggtggctcatgcctgtaatcccagcacattgggaagatcacttgaggcaaggagtttgagaccagactggccaacacagcgagacccccatctctaaaaaaaaaaaaattaataagacatggatacaaccagggagggaggttataataatagagcatcctgttaatcagaatcatgggggagaacatacagcccagcgtgcctctcactttccagaaagggtgagaggatcattagagagttcattagagagtatttattcctaataagtcagataaatgtcagtttcatttttagaagtttcacacaatacctgctaatggtgtgatgtcatttttccccctgcttcaggttaattttttggatatttcagaaacccatagcaattcagtgatttttctttttgtagtagctcagtcaaaacaggtaacagcagattaatcatagaaaatgttgcttccacattaacaaaacaatcactgaaaaacagcagatgtttaaatagattattttatagcttattttggatattttttcttttaataaactaatatgatcatttgaattaaaaaaaaaaaaaaaaaaa

SEQ ID NO: 30846 - DNA, 3723 bp, Homo Sapiens
cgacggcgcggaggccccgggcgcggcgcaggctccaaagaagaagaaaccaaggcccagagagggaggcccaggtgcagggagcaggcgagggaaggatccgtacaggggcccaacactactccaccaaccgaagcccccaaaaggagcccggtgatgctgcgaaggctgtgaacaggggaggcggcactgtgggggctgccggcagccggggctggggagagacatgtggacacgtggcctctatggctcccgcctgccagatcctccgctgggccctcgccctggggctgggcctcatgttcgaggtcacgcacgccttccggtctcaagatgagttcctgtccagtctggagagctatgagatcgccttccccacccgcgtggaccacaacggggcactgctggccttctcgccacctcctccccggaggcagcgccgcggcacgggggccacagccgagtcccgcctcttctacaaagtggcctcgcccagcacccacttcctgctgaacctgacccgcagctcccgtctactggcagggcacgtctccgtggagtactggacacgggagggcctggcctggcagagggcggcccggccccactgcctctacgctggtcacctgcagggccaggccagcacctcccatgtggccatcagcacctgtggaggcctgcacggcctgatcgtggcagacgaggaagagtacctgattgagcccctgcacggtgggcccaagggttctcggagcccggaggaaagtggaccacatgtggtgtacaagcgttcctctctgcgtcacccccacctggacacagcctgtggagtgagagatgagaaaccgtggaaagggcggccatggtggctgcggaccttgaagccaccgcctgccaggcccctggggaatgaaacagagcgtggccagccaggcctgaagcgatcggtcagccgagagcgctacgtggagaccctggtggtggctgacaagatgatggtggcctatcacgggcgccgggatgtggagcagtatgtcctggccatcatgaacattgttgccaaacttttccaggactcgagtctgggaagcaccgttaacatcctcgtaactcgcctcatcctgctcacggaggaccagcccactctggagatcacccaccatgccgggaagtccctggacagcttctgtaagtggcagaaatccatcgtgaaccacagcggccatggcaatgccattccagagaacggtgtggctaaccatgacacagcagtgctcatcacacgctatgacatctgcatctacaagaacaaaccctgcggcacactaggcctggccccggtgggcggaatgtgtgagcgcgagagaagctgcagcgtcaatgaggacattggcctggccacagcgttcaccattgcccacgagatcgggcacacattcggcatgaaccatgacggcgtgggaaacagctgtggggcccgtggtcaggacccagccaagctcatggctgcccacattaccatgaagaccaacccattcgtgtggtcatcctgcagccgtgactacatcaccagctttctagactcgggcctggggctctgcctgaacaaccggccccccagacaggactttgtgtacccgacagtggcaccgggccaagcctacgatgcagatgagcaatgccgctttcagcatggagtcaaatcgcgtcagtgtaaatacggggaggtctgcagcgagctgtggtgtctgagcaagagcaaccggtgcatcaccaacagcatcccggccgccgagggcacgctgtgccagacgcacaccatcgacaaggggtggtgctacaaacgggtctgtgtcccctttgggtcgcgcccagagggtgtggacggagcctgggggccgtggactccatggggcgactgcagccggacctgtggcggcggcgtgtcctcttctagccgtcactgcgacagccccaggccaaccatcgggggcaagtactgtctgggtgagagaaggcggcaccgctcctgcaacacggatgactgtccccctggctcccaggacttcagagaagtgcagtgttctgaatttgacagcatccctttccgtgggaaattctacaagtggaaaacgtaccggggagggggcgtgaaggcctgctcgctcacgtgcctagcggaaggcttcaacttctacacggagagggcggcagccgtggtggacgggacaccctgccgtccagacacggtggacatttgcgtcagtggcgaatgcaagcacgtgggctgcgaccgagtcctgggctccgacctgcgggaggacaagtgccgagtgtgtggcggtgacggcagtgcctgcgagaccatcgagggcgtcttcagcccagcctcacctggggccgggtacgaggatgtcgtctggattcccaaaggctccgtccacatcttcatccaggatctgaacctctctctcagtcacttggccctgaagggagaccaggagtccctgctgctggaggggctgcctgggaccccccagccccaccgtctgcctctagctgggaccacctttcaactgcgacaggggccagaccaggtccagagcctcgaagccctgggaccgattaatgcatctctcatcgtcatggtgctggcccggaccgagctgcctgccctccgctaccgcttcaatgcccccatcgcccgtgactcgctgcccccctactcctggcactatgcgccctggaccaagtgctcggcccagtgtgcaggcggtagccaggtgcaggcggtggagtgccgcaaccagctggacagctccgcggtcgccccccactactgcagtgcccacagcaagctgcccaaaaggcagcgcgcctgcaacacggagccttgccctccagactgggttgtagggaactggtcgctctgcagccgcagctgcgatgcaggcgtgcgcagccgctcggtcgtgtgccagcgccgcgtctctgccgcggaggagaaggcgctggacgacagcgcatgcccgcagccgcgcccacctgtactggaggcctgccacggccccacttgccctccggagtgggcggccctcgactggtctgagtgcacccccagctgcgggccgggcctccgccaccgcgtggtcctttgcaagagcgcagaccaccgcgccacgctgcccccggcgcactgctcacccgccgccaagccaccggccaccatgcgctgcaacttgcgccgctgccccccggcccgctgggtggctggcgagtggggtgagtgctctgcacagtgcggcgtcgggcagcggcagcgctcggtgcgctgcaccagccacacgggccaggcgtcgcacgagtgcacggaggccctgcggccgcccaccacgcagcagtgtgaggccaagtgcgacagcccaacccccggggacggccctgaagagtgcaaggatgtgaacaaggtcgcctactgccccctggtgctcaaatttcagttctgcagccgagcctacttccgccagatgtgctgcaaaacctgccatggccactagggggcgcgcggcacccggagccacagctggcggggtctccgccgccagccctgcagcgggccggccagagggggccccgggggggcgggaactgggagggaagggtgagacggagccggaagttatttattgggaacccctgcagggccctggctggggggatgga

SEQ ID NO: 30847 - DNA, 3692 bp, Homo Sapiens
ctgatttctcttcggctggacggaggctgcctcctcacgcggctcccaactattcccgtagctcagtgcccccctcccgccgctctactcagccaggcagacagactgacagactcgctagtcggcagcttcactcccgagggtgccgcgagcccaggcggcgaacacccggtacccctggcgcagcgaggtgggatgctgtacggacagcagcgctaagtgcccccccacccccggcgcagggtgcactcgctcctggccgcgggcccagcggcggcggcggcggcggcggcggaggggatgagcccgggacgcgcgaggcgcctgcctcaagctaccgcccggagagggacgccgagtagggctcatcgcagtaccgcgcggacccctgccccctgtggcacgcggctgcggagccttgaagccgtgtctgtgatcaggatgcactgggcgcctcgcagctggtgaggatgccctgctgcgcggccctgcgcccccagccccagtcccaggtgggcaagactgactgggcccggcttcggcccctcgtgccggtggatgaaacgtgccggagtgcttgggtgccatcagctatcaaatctgaattctaagcgccatggacgaaggcactggactgcagcccggggcgggagagcagctggaggcgccggccactgcagaagctgtccaagagaggtgcgagccggagaccctcaggtctaagagtttaccggtcctcagcagcgcctcctgccggccaagcctcagtcccactagtggagacgccaacccggcctttggctgtgtggattcttcgggccaccaggagttgaagcaaggcccgaacccgttggcccccagtccctctgccccgtccacttcggcggggctcggggactgtaaccacagggtggacctcagcaaaaccttctcggtgtcctccgccttggccatgctccaggagagaaggtgcctctacgtggtcctcacggattcccgttgcttcctggtgtgcatgtgctttctgaccttcatccaggcgttaatggtctctgggtacctgagcagcgtaattaccaccattgaaaggcgctacagtctgaagagttccgagtcggggctgctggtcagctgctttgacatcgggaacctggtggtggtggtgttcgtcagctacttcggcggccggggtcggcggcccctgtggctggccgtgggtggactcctcatcgccttcggggcagccctcttcgccttacctcacttcatctcgcccccctaccagatccaagagttgaacgcctcggcccccaacgacggcctgtgtcagggtggcaactccaccgccactttggagcctccggcctgtccgaaggactcgggaggaaataatcactgggtctacctggctttattcatttgcgcgcagattctcattggaatgggctccacacctatttataccctgggaccaacctacttagatgacaatgtcaagaaagaaaactcctccttgtacctagccatcatgtatgtcatgggagcacttggccctgcagtgggatatttattaggtggacttcttattggtttttatgttgatcccagaaatcctgttcaccttgaccagaatgaccctcgtttcattggaaactggtggagtggattcctcctttgtgccattgcaatgtttcttgtgatattcccaatgtttactttcccaaaaaagcttccacctcgacacaagaaaaagaaaaagaaaaaattttctgttgatgctgttagtgatgacgatgttctgaaggagaaatcaaacaacagtgaacaagcggacaaaaaagtttcttcgatgggatttggaaaggatgtcagagacctaccaagagcagctgtcaggatcttaagcaacatgacattcctttttgtgagtttgtcatacacagctgagagtgccattgtaactgctttcattaccttcattcccaagttcatcgagtcacagtttggtatcccagcctccaatgccagcatctacactggggttattatcgtccccagtgctggtgttggtattgtcctcggaggctacattataaaaaaattgaaacttggtgccagagaatctgcaaaactagcaatgatctgcagtggtgtgtctttactatgtttttcaaccctatttattgttggatgtgaaagcattaatctagggggcataaacatcccttatacaacaggaccttctctcaccatgccccataggaatctgacaggaagctgcaacgttaattgtggttgtaaaatacacgagtatgagccagtctgtggatcagatggaattacatactttaacccttgtctggctggctgtgttaatagtggtaatcttagcactgggatacggaattatacagaatgcacctgtgtccaaagtcgccaagtgatcactccacccaccgtgggacagcgaagtcagctccgtgtggttattgtcaagacttatctcaatgagaacggctatgctgtgtctgggaaatgtaaacggacctgcaatactcttatcccattcttagtttttcttttcatagtcaccttcatcacagcatgtgcccaaccatcagctatcatagtaacactcaggtccgtagaagatgaggagagaccttttgcactgggaatgcagtttgttttgttgcgaacacttgcatacattcctactccaatctactttggagcagtcattgacaccacctgcatgctctggcaacaggaatgtggtgtgcagggttcttgctgggagtacaacgtgacgtcgtttcgttttgtgtattttggtttggctgccggcctcaaattcgttgggtttatttttatttttctggcctggtactccataaaatacaaggaggatggactgcagaggcggaggcagagagaatttcccctgagcaccgtgagtgagagagtgggacaccccgacaatgcccggactagatcttgcccagctttcagcacccagggagaattccacgaagagactggcctgcaaaaagggatccagtgcgcagcacagacctacccggggcccttcccagaagcaataagttcctctgcggacccggggctggaagagagccccgctgccttggagccgccctcctgaagcttgaaaatggaagaatttagttttgttggttgaattgaaaatggcgacttgagaaacaactgtgccttcttttctttctttcttttttttaacctctacagacacaatcctcaaaccaacaaaactcagtatacacagccgctattcattgagggctggatacctcaacaagactgagagcctttccccgcttctctccaagaaggagacgttcagctagatttgttcccatttccgttgtgttaattcaaagctcatgctcccctacggtacaggctgaggtacacggttagcaaaaccatgggaaggggaatggcggtgcatatcattaactaacactccaaacaaaggtgagcttgcccaggacttggcatttccaaatcaaagtttttagatatgaacacctactgtgagttctgctacaaagcacaaatgaatttgtctcaactatgcaatttgattggaaaaatgtatgtgcagcatgttacatttactttcacggaataaagcagatatgtttctgaaa

SEQ ID NO: 30848 - DNA, 4934 bp, Homo Sapiens
gcgagctgagctgacagcgcggagctggcgctgtggagcgcagggagccttgccggttcctccgaccggcgtctgcgagtacagcggcggctaacctgccccggcttcaggatttacacagacgtggggcgatgcttgtgaccctgcagctcctcaaaccagcctgtattgagcggtttgcagcctgatgctcagccccctccccacagggcccctagaagcctgtttctccgtacagtccaggacctccagccccatggagcccccgatcccacagagcgcccccttgactcccaactcagtcatggtccagccccttcttgacagccggatgtcccacagccggctccagcacccactcaccatcctacccattgaccaggtgaagaccagccatgtggagaatgactacatagacaaccctagcctggccctgaccaccggcccaaagcggacccggggcggggccccagagctggccccgacgcccgcccgctgtgaccaggatgtcacccaccattggatctccttcagcgggcgccccagctctgtgagcagcagcagcagcacatcctctgaccaacggctcttagaccacatggcaccaccacccgtggctgaccaggcctcaccaagggctgtgcgcatccagcccaaggtggtccactgccagccgctggacctcaagggcccggcggtcccacccgagctggacaagcacttcttgctgtgcgaggcctgtgggaagtgtaaatgcaaggagtgtgcatccccccggacgttgccttcctgctgggtctgcaaccaggagtgcctgtgctcagcccagactctggtcaactatggcacgtgcatgtgtttggtgcagggcatcttctaccactgcacgaatgaggacgatgagggctcctgcgctgaccacccctgctcctgctcccgctccaactgctgcgcccgctggtccttcatgggtgctctctccgtggtgctgccctgcctgctctgctacctgcctgccaccggctgcgtgaagctggcccagcgtggctacgaccgtctgcgccgccctggttgccgctgcaagcacacgaacagcgtcatctgcaaagcagccagcggggatgccaagaccagcaggcccgacaagcctttctgacagtttgtgtcgaagccccagtgctctgcctggaaacctggttctcttctgacatctaagaagactgcagcaaggtcagaggttttagcctcctgaggctgaccttgctagtctgcccactccctacccccagcttcggaaaatacagagaccaccaccacgtaccctgtattccccaaggtgatgaagaagcactttggggctttttttcagggtcctgaaactttgtgtcaaacagacaatgcaggggcagggtgtggtttggggggaaatttttctttttcagaagacagaacacagatgtggacacatatccggaaactgcagctgcttgaatgccttcccagcccctccttctccctccctccctccgccccccccttcctcttttccattgtctttggctctcacaggagctagctgcctgggaggaattgttaactgagtaccagggtacctttaaagaagacccttggagtcttctataccttcttctccttccccatctcactccaccccactttgtccctgatgtcttggggaaggtgtagaacaccctagcagttcctattgtatatacttgggagccactgagaacagaggacggccagtgagtccaagcctcgttcctccttctgcctccccggagccacaggatggatttaggagccactgctcagtgcacttctcccttccaactgcatcaactaactctcgggggtgttctgctcaccacaccgtccttcggttcttactgagtcacagactcgcctgcccactacgtgtcctgggttctctactcagatcccttccagaaactttatatgggtagaggaagccagggcggcaaatgcgagaccaaatatcattttgccaatgagtctgaggctgtggtctctggatccagtcattatgtttttatagaataattaaaccggatgctaacggtgttttaaaaaataataataaaacaacttgtttccttttggccacccccaggaagggctgatttcaaaatctgggggcgagcaacctcaaggaacacaatttccctccctatcaacaagaggattttaacagcaaagaagagaggcagcacctcccattggcagaatgaccgctgagccaggctgggtttgggtttcttctcttctgattctgctgctcactgtcatagccttttgtgtatagtgatgtgtctgtatctttaatgtaaatagagagatgatgaaaaaagagtctattttagtgttaggaagccccagcaggggagtcggaagagcttggaagagctggggagagggtaggggaaaggtttttccaggggccactgggtttgagccctgcttctgtgcacagccacaccaccctctcccgacagccctcaaagacgtagcaactctttctctcaaggtgctaaaggactcagaaggtgcagcacgtccagtgggtaggtacttgttgcatgcaaaagctgtagtgtatctggtccttcctccccagcttttgtgtggggttcttgctttgtgtggtattttgttttcccctctaatgagagggcatggcctgagtcagaagagctaccccaggtgaaactggaagtgcatgaggcagagcgtccgtagcatttccagtttgttctgtataggacagaggtgcctccgggaaggaggcagcgaggtaggtagctatgataggcacctaatgcttctcaaggacttattttttccttcttgaagactagtagtaacatcttatgatttagagtaagttgattgtaaccataggtatttattgattggaggaagggagggtcatattattttcggctttatttatgtaacatttgctagcttataaaaggcgaatgtgaaatattgcatctgcattttccaaggctgattcgtgtagctacccttgccacagttgtgacggatgtatggatgttcttgaacatttcagaaggagtggtagaaaaaaacacacattcagccaaccacttatatgaattgaatgtatcagaagtgtactgaagggactggagatggttttcctcagatgagggggccccaaaattgatagtgcacatctgcacgctttctgcgaggcctcagaacttttcccagggcccctccctcaaattgtctccatgggaaacttgacccagtggcaagttgcactttggtgatcttggtggtctacacacccgttctgtggagagtcgatttacataagctgtgtatacacacacacacacacacacacacacacacacacacacacccctaccccacactgactgtctaccgacagagaccctatttcctggcaaacggcctcctgaaccctgactttttgtgtacatacttgtaaacacggatttttctgggttttggtttgctttttccttttttccccctgcccctgttctagcttgttcttcttggtttgctttcaacctgcttgatggatgtctgcagagtgctctctaagagtccacctcagtgcctcgtgtgctcagtggtcatgggaaggagcgaaggaaccatccttggttctcccagcttggttgtgtagcaatccctcagcattgtttttctcagcttcttggcaaaaattaaaacaacaacaacaacaacaacaacaacaacaaacagaaggataaactggcttgcctgtggaccctccccggctctggggccagtcgagagccactgagggacccagcactcagagacacaacacacatgtgtagctgcttctggctgagtgtgtttcctgtcaccaatggcctgtttggctggacgatgcctcggcttgaccttttttgaaaagtgctggttagttcccgccccctggtaaacctggggtaggtgggggttctgtcttaactcgaggggcacctgggatccaggacgcttctagggggctctggctgcccgtgttaatgaaggacagcgcttccgcgagcaccctgggaactgggtcttgggtagcaaagccctcccagagaaaagatgggcacaactaaggctttcctgagcaggaagggggtgaagaccaatcccttcctttggtcctttggtacgcaccccctcagagctgagatggaagacatggctagttcttttcagccttgtggagcctgtcagtcgccatcatacctcgagtgaggcccagctagataatgacttgtccaagatggcacacgtggaaagttgatctgcaccagaacccggatgactgtcaccttgaagcgtcctgttctccttctgtgctgtcccaggaagtgtctggcgggcgtgggcagcacagctctacactgtacgattcactagggcatcctgcgagcctcactagccttctggttcatgcctttgacaagcatttttgtgccccctctgcttactgtgacagtcgatgatgaatcttgcgttgccattttctgctgtgggtaactgcgtgcagtgtcttgccttgctttctcttcttactgtcccacagcttggtttcatgttacaaacagaaaagctcgaggctcccaccccgccacatcccaacttcatttccccctcactgtagcccatttccaccccaccacaaagttgccacaggttttctttgtatagaatatttattttgaagctctattttaatagtatttattttagaaagtctactattgtaagagttcttctgtttgtgaagaaaaaaacaagttaaaaactgaatgtactgatttagaaaatatatataaatatatattgttaaatataaa

SEQ ID NO: 30849 - DNA, 935 bp, Homo Sapiens
ggagagacctggctgctgtgtcccgcggcttgcgctccgtagtggactccgcgggccttcggcagatgcaggcctggggtagtctcctttctggactgagaagagaagaatggagaagcccctcttcccattagtgcctttgcattggtttggctttggctacacagcactggttgtttctggtgggatcgttggctatgtaaaaacaggcagcgtgccgtccctggctgcatggctgctcttcggcagtctagccggcctgggtgcttaccagctgtatcaggatccaaggaacgtttggggtttcctagccgctacatctgttacttttgttggtgttatgggaatgagatcctactactatggaaaattcatgcctgtaggtttaattgcaggtgccagtttgctgatggccgccaaagttggagttcgtatgttgatgacatctgattagcagaagtcatgttccagcttggactcatgaaggattaaaaatctgcatcttccactattttcaatgtattaagagaaataagtgcagcatttttgcatctgacattttacctaaaaaaaaaaaagacaccaaatttggcggaggggtggaaaatcagttgttaccattataaccctacagaggtggtgagcatgtaacatgagcttattgagaccatcatagagatcgattcttgtatattgattttatctctttctgtatctataggtaaatctcaagggtaaaatgttaggtgttgacattgagaaccctgaaaccccattccctgctcagaggaacagtgtgaaaaaaaatctcttgagagatttagaatatcttttcttttgctcatcttagaccacagactgactttgaaattatgttaagtgaaatatcaatgaaaataaagtttactataaataataaaaaaaaaaaaaaaaaa

SEQ ID NO: 30850 - DNA, 1041 bp, Homo Sapiens
gcccccgagcaggagccggtgcgagcggagcagagccgaggtcgggccgcgagcggagccggctgagcgggcgccgagctcccgccatggcccggaacacgctgtcctcgcgcttccgccgggtggacatcgacgaatttgacgagaacaaatttgtggacgagcaggaggaggcggcggcggcggcggcggagccaggcccggacccgagcgaggtggacgggctcctgcggcaaggggacatgcttcgggcattccatgcagccttgcggaactctcccgtcaacaccaagaatcaagctgtgaaggagcgagcccagggcgtggtgctgaaagtgctcacaaacttcaagagcagtgagattgagcaggctgtgcagtcactggacagaaacggcgttgacttgttaatgaagtacatttataaaggctttgagaagcccacagaaaatagcagcgcagtgttactccagtggcacgaaaaggccttagcagtaggaggactaggctccattataagagttcttacagcaagaaagactgtttaaaaaaaataaaaagactcatgttaccttgagaagaattctggatgcccaggctggtgaagaagggattgacaatggaccatcttcctaggaactcccaagtaaactatttcaggacatgtatctgctgaaatgtattttattttcaaggtggaggggaaaatcgtctgtttcctaaatcctgtttaggatctgatagtctatgcctttgtctccgagtactgcagaactgacattttgacggtctaccagcgtggcggctggtgttggtcagatgcacctgtgtgcactgggggagggatggtttgggcaggtgcagatccaagggctgtggtaaacgggagagcttgtgtttttgaagtggaaaaaaacccaagagtttgtacagacatcctgtcttcccagagaaggtggacactcttgggctcattgtaaagtgcctgctgcatcaataaagctcttggcttattagtctatacaaaaaaaaaaaaaaaaa

SEQ ID NO: 30851 - DNA, 1706 bp, Homo Sapiens
cacttgatgggaatcatggcagcatccaggccattgtcccgcttctgggagtggggaaagaacatcgtctgcgtggggaggaactacgcggaccacgtcagggagatgcgcagcgcggtgttgagcgagcccgtgctgttcctgaagccgtccacggcctacgcgcccgagggctcgcccatcctcatgcccgcgtacactcgcaacctgcaccacgagctggagctgggcgtggtgatgggcaagcgctgccgcgcagtccccgaggctgcggccatggactacgtgggcggctatgccctgtgcctggatatgaccgcccgggacgtgcaggacgagtgcaagaagaaggggctgccctggactctggcgaagagcttcacggcgtcctgcccggtcagcgcgttcgtgcccaaggagaagatccctgaccctcacaagctgaagctctggctcaaggtcaacggcgaactcagacaggagggtgagacatcctccatgattttttccatcccctacatcatcagctatgtttctaagatcataaccttggaagaaggagatattatcttgactgggacgccaaagggagttggaccggttaaagaaaacgatgagatcgaggctggcatacacgggctggtcagtatgacatttaaagtggaaaagccagaatattgagttatttcttaacaagtttcgagagagaagggagcaagacaagagcaagcaacggctattaaatgtcacaatcctttaattagaaaccatttattggccggacgcggtggctcacgcctgtaatcgcagcactttgggaggccgaggcgggcggctcacgacgtcaggagatccagaccatcttggctaacagggtgaaaccccgtctctactaaaaatacaaaaaattagccgggcgtggtggcgggcgcctgtagtcccagctactctggaggctgaggcaggagaatcaattgaacccgggaggcggagcttacagtgagctgagattgcgccactgtactcctgggcaacagcgagactccgtctcaaaaaaaaaaaaaaaaaaaagaaaccatttattttaaaaatgattagattgctatgcctcaactcatagaagatgaacccttcaagaaaacgtgaagtagaacgggtgggccagaaatgaaaacaggcaagtaaagtatttcttcggaaaacattttatcaaaccaaatgttaaaaagactttccttttgtaaaactggattagagaagacttttcagtgggttatctctaggatgatcagtagttcagcacttaaaaactgcagagaaaactgaaagttatgttccagataactttccgttgtttaccaaattttcttagatttggtcatcatcaggaagcatttgtaaaaataaaaatctccacaaattactggcccatctcggacttgctgaatcaatttgataggattaatctccagtgaagctgtgtttacagggcattccaagtgattcttatcaggaaatgtgaaaaacactcctgtacataatcggttaatttaaaattttacttaataagtgaacaagtaatgaagatttcacctgtttacttagggtatctacccagacccatcgattctgagttcgggagatgattttgaaattactgttttccaaataaaggtgctcccttccaaaaaaaaaaaaaaaaaaaa

SEQ ID NO: 30852 - DNA, 3109 bp, Homo Sapiens; identical to SEQ ID NO: 23614

SEQ ID NO: 30853 - DNA, 5392 bp, Homo Sapiens
aattcactaatgcattctgctctttttgagagcacagcttctcagatgtgctccttggagctggtgtgcagtgtcctgactgtaagatcaagtccaaacctgttttggaattgaggaaacttctcttttgatctcagcccttggtggtccaggtcttcatgctgctgtgggtgatattactggtcctggctcctgtcagtggacagtttgcaaggacacccaggcccattattttcctccagcctccatggaccacagtcttccaaggagagagagtgaccctcacttgcaagggatttcgcttctactcaccacagaaaacaaaatggtaccatcggtacctcgggaaagaaatactaagagaaaccccagacaatatccttgaggttcaggaatctggagagtacagatgccaggcccagggctcccctctcagtagccctgtgcacttggatttttcttcagcttcgctgatcctgcaagctccactttctgtgtttgaaggagactctgtggttctgaggtgccgggcaaaggcggaagtaacactgaataatactatttacaagaatgataatgtcctggcattccttaataaaagaactgacttccatattcctcatgcatgtctcaaggacaatggtgcatatcgctgtactggatataaggaaagttgttgccctgtttcttccaatacagtcaaaatccaagtccaagagccatttacacgtccagtgctgagagccagctccttccagcccatcagcgggaacccagtgaccctgacctgtgagacccagctctctctagagaggtcagatgtcccgctccggttccgcttcttcagagatgaccagaccctgggattaggctggagtctctccccgaatttccagattactgccatgtggagtaaagattcagggttctactggtgtaaggcagcaacaatgcctcacagcgtcatatctgacagcccgagatcctggatacaggtgcagatccctgcatctcatcctgtcctcactctcagccctgaaaaggctctgaattttgagggaaccaaggtgacacttcactgtgaaacccaggaagattctctgcgcactttgtacaggttttatcatgagggtgtccccctgaggcacaagtcagtccgctgtgaaaggggagcatccatcagcttctcactgactacagagaattcagggaactactactgcacagctgacaatggccttggcgccaagcccagtaaggctgtgagcctctcagtcactgttcccgtgtctcatcctgtcctcaacctcagctctcctgaggacctgatttttgagggagccaaggtgacacttcactgtgaagcccagagaggttcactccccatcctgtaccagtttcatcatgaggatgctgccctggagcgtaggtcggccaactctgcaggaggagtggccatcagcttctctctgactgcagagcattcagggaactactactgcacagctgacaatggctttggcccccagcgcagtaaggcggtgagcctctccatcactgtccctgtgtctcatcctgtcctcaccctcagctctgctgaggccctgacttttgaaggagccactgtgacacttcactgtgaagtccagagaggttccccacaaatcctataccagttttatcatgaggacatgcccctgtggagcagctcaacaccctctgtgggaagagtgtccttcagcttctctctgactgaaggacattcagggaattactactgcacagctgacaatggctttggtccccagcgcagtgaagtggtgagcctttttgtcactgttccagtgtctcgccccatcctcaccctcagggttcccagggcccaggctgtggtgggggacctgctggagcttcactgtgaggccccgagaggctctcccccaatcctgtactggttttatcatgaggatgtcaccctggggagcagctcagccccctctggaggagaagcttctttcaacctctctctgactgcagaacattctggaaactactcatgtgaggccaacaatggcctagtggcccagcacagtgacacaatatcactcagtgttatagttccagtatctcgtcccatcctcaccttcagggctcccagggcccaggctgtggtgggggacctgctggagcttcactgtgaggccctgagaggctcctccccaatcctgtactggttttatcatgaagatgtcaccctgggtaagatctcagccccctctggaggaggggcctccttcaacctctctctgactacagaacattctggaatctactcctgtgaggcagacaatggtccggaggcccagcgcagtgagatggtgacactgaaagttgcagttccggtgtctcgcccggtcctcaccctcagggctcccgggacccatgctgcggtgggggacctgctggagcttcactgtgaggccctgagaggctctcccctgatcctgtaccggttttttcatgaggatgtcaccctaggaaataggtcgtccccctctggaggagcgtccttaaacctctctctgactgcagagcactctggaaactactcctgtgaggccgacaatggcctcggggcccagcgcagtgagacagtgacactttatatcacagggctgaccgcgaacagaagtggcccttttgccacaggagtcgccgggggcctgctcagcatagcaggccttgctgcgggggcactgctgctctactgctggctctcgagaaaagcagggagaaagcctgcctctgaccccgccaggagccctccagactcggactcccaagagcccacctatcacaatgtaccagcctgggaagagctgcaaccagtgtacactaatgcaaatcctagaggagaaaatgtggtttactcagaagtacggatcatccaagagaaaaagaaacatgcagtggcctctgaccccaggcatctcaggaacaagggttcccctatcatctactctgaagttaaggtggcgtcaaccccggtttccggatccctgttcttggcttcctcagctcctcacagatgagtccacacgtctctccaactgctgtttcagcctctgcaccccaaagttccccttgggggagaagcagcattgaagtgggaagatttaggctgccccagaccatatctactggcctttgtttcacatgtcctcattctcagtctgaccagaatgcagggccctgctggactgtcacctgtttcccagttaaagccctgactggcaggttttttaatccagtggcaaggtgctcccactccagggcccagcacatctcctggattccttagtgggcttcagctgtgattgctgttctgagtactgctctcatcacacccccacagagggggtcttaccacacaaagggagagtgggccttcaggagatgccgggctggcctaacagctcaggtgctcctaaactccgacacagagttcctgctttgggtggatgcatttctcaattgtcatcagcctggtggggctactgcagtgtgctgccaaatgggacagcacacagcctgtgcacatgggacatgtgatgggtctccccacgggggctgcatttcacactcctccacctgtctcaaactctaaggtcggcacttgacaccaaggtaacttctctcctgctcatgtgtcagtgtctacctgcccaagtaagtggctttcatacaccaagtcccaagttcttcccatcctaacagaagtaacccagcaagtcaaggccaggaggaccaggggtgcagacagaacacatactggaacacaggaggtgctcaattactatttgactgactgactgaatgaatgaatgaatgaggaagaaaactgtgggtaatcaaactggcataaaatccagtgcactccctaggaaatccgggaggtattctggcttccctaagaaacaacggaagagaaggagcttggatgaggaaactgttcagcaagaggaagggcttctcacactttcatgtgcttgtggatcacctgaggatcctgtgaaaatacagatactgattcagtgggtctgtgtagagcctgagactgccattctaacatgttcccaggggatgctgatgctgctggccctgggactgcactgcatgcatgtgaagccctataggtctcagcagaggcccatggagagggaatgtgtggctctggctgcccagggcccaactcggttcacacggatcgtgctgctccctggccagcctttggccacagcaccaccagctgctgttgctgagagagcttcttctctgtgacatgttggctttcatcagccaccctgggaagcggaaagtagctgccactatctttgtttccccacctcaggcctcacactttcccatgaaaagggtgaatgtatataacctgagccctctccattcagagttgttctcccatctctgagcaatgggatgttctgttccgcttttatgatatccatcacatcttatcttgatctttgctcccagtggattgtacagtgatgacttttaagccccacggccctgaaataaaatccttccaagggcattggaagctctctccacctgaaccatggcttttcatgcttccaagtgtcagggccttgcccagatagacagggctgactctgctgccccaacctttcaaggaggaaaccagacacctgagacaggagcctgtatgcagcccagtgcagccttgcagaggacaaggctggaggcatttgtcatcactacagatatgcaactaaaatagacgtggagcaagagaaatgcattcccaccgaggccgcttttttaggcctagttgaaagtcaagaaggacagcagcaagcataggctcaggattaaagaaaaaaatctgctcacagtttgttctggaggtcacatcaccaacaaagctcacgccctatgcagttctgagaaggtggaggcaccaggctcaaaagaggaaatttagaatttctcattgggagagtaaggtacccccatcccagaatgataactgcacagtggcagaacaaactccaccctaatgtgggtggaccccatccagtctgttgaaggcctgagtgtaacaaaagggcttattcttcctcaagtaagggggaactcctgctttgggctgggacataagtttttctgctttcagacgcaaactgaaaaatggctcttcttgggtcttgagcttgctggcatatggactgaaagaaactatgctattggatctcctggatctccagcttgctgactgcagatcttgagatatgtcagcctctacagtcacaagagctaattcattctaataaaccaatctttctgtaaa

SEQ ID NO: 30854 - DNA, 3959 bp, Homo Sapiens
aaggcttccgggcatgcgcacagcgttgtgcaaatgaatgccttccactgaaccgaggcactgttatagaagaatggaagaagatacagattatagaatcaggtttagttctttgtgtttctttaatgatcacgttggatttcatggcactataaaaagctcaccaagtgactttattgttattgaaattgatgaacagggacagttagttaataagaccatcgatgagcctattttcaagattagtgaaatacaacttgagccaaataattttcccaaaaaaccaaaactagatcttcaaaatctgtccttagaagatggaagaaaccaagaagttcatactttgattaagtacactgatggtgaccaaaatcatcagtctggttcagaaaaggaagatactatcgttgatggaacttccaaatgtgaagaaaaagctgatgttttaagctcctttttggatgaaaaaactcatgagttactgaataattttgcctgtgatgtaagagagaagtggctttctaaaacagagctaattggactacctcctgaattctcaataggcagaatcgttgacaaaaaccagagggctagtttacacagtgccattaggcagaaatttccatttttagtaactgtaggaaaaaacagtgaaattgttgtaaaaccaaatcttgaatataaagaactttgtcatttggtatctgaagaggaagcatttgacttttttaaatatttggatgcaaagaaagaaaattccaaatttacctttaaacctgatacaaacaaagaccacagaaaagctgtccaccattttgtcaacaaaaagtttggaaaccttgtggaaaccaaatctttttctaaaatgaattgcagtgctggtaatccgaatgtggtggtaacagtaagatttcgggaaaaagcacacaaacgtgggaaaaggcctctttctgaatgccaagaaggaaaagttatatatacagcttttaccctacgaaaggaaaacctggaaatgtttgaagcgattggttttttagctatcaaacttggtgttattccttcggattttagttatgcaggccttaaagacaagaaagccatcacctatcaagcaatggttgttagaaaagtgactccagagaggttgaaaaatattgaaaaagaaattgaaaagaaaagaatgaatgtctttaatattcggtctgtagatgattccctgagacttggtcagctcaaaggaaatcactttgatattgtcattagaaatttaaaaaaacaaataaatgattctgcaaacctgagggagagaattatggaagcaatagaaaatgttaagaaaaaaggctttgtgaattactatggaccacagagatttgggaagggaaggaaagttcacacagaccaaattggactagctttgctgaagaatgaaatgatgaaagccataaaattgtttcttacaccagaagacttggatgatcctgtaaatagagcaaagaagtattttcttcaaactgaggatgctaaaggcacactttcattgatgcctgaattcaaagtgcgtgagagagcattgttggaggcattgcaccgctttggcatgaccgaggaaggttgtatccaggcatggttctctttaccccattccatgcgcatattctatgttcacgcatataccagcaaaatttggaatgaggcagtatcttacagacttgaaacctatggagcaagagtagtgcagggtgatttggtctgtttggatgaagacattgatgacgagaatttccaaaatagtaaaattcacctggtaactgaagaggagggatcagctaatatgtatgcaatacatcaggtggttcttccagtacttggatacaatattcagtacccgaagaacaaagtagggcagtggtaccatgacatacttagcagagatggactacagacatgtaggtttaaagtacctactctgaaactgaatataccaggttgctatagacagattttgaaacatccctgtaatctctcataccaactaatggaagatcatgacattgatgtcaaaacgaaaggttcccacattgatgaaacagctttgtctcttttgatctcttttgatcttgatgcttcatgctatgctaccgtttgtctgaaggaaataatgaagcatgacgtttaaaactgatacccttggtataaccatatatatgtcactctttgaaggaaagggggctaaaatgtcttaagcaccttccatgtgttaggaacttcataattgttatctcttttaattttcacagcatcctgagaagttaggatttgatactgtaattttatagaggatatgtaagtgtcagggtccaaatttaaggtccatgtgaccccaaagcctgtgttttttttctattatatgtttcagtgacctttattctgtgtcataaagttacaatcttttaaaaccattaggaatatatataatactgcaagataacatttaagaaaaaaagttgtgaatattcatatcctccagctccttgcttagaacactagtaaaattaggtcgcagtgaagcaaatgttggagagaaagatagatgaagcattttgctaattattattgtccccctttcctgtttttgaaattattgatcagaacaatatacaagggaaatgccatacctctgtttgtgatagataccccagagtagttattacctctttgtgagataagtaatctttgatgaagattgaaatacaatttctcatccaatttttatatcttggcatacgctgaccctcttgaccatttgtaattttttcatattatctaaaacaggtgttagagtcagacagattcattcttagattctagctctgacacttactagtgattttgagtatgttgttgatttttttgtgtgtggttactgatagaatcaagacaattacaacttcataaatgacaaataataggattatctccacattttctgttgctggaggaacaaaacattgtgcccatttgaaaattttaatttttgttggtttaactatcccacattataaatcatccttcaccattttatatcagttaaatatgggtgtgttggggaggaatgactggcatgtagacatgtattgatttaggaagatctgagcatttctttcattgttggtaagatataatgatgaaatttaaaaagcagtatggagcattatatatcagtaatgtgatatatatacttaagccagtttaaccattttgggaaatgttagcattaggaaataaaatccaaaagaaggaagagaagctatatgcaatgcaaaatttgcttattgcaatattttcatatacagacactaaaaacagttttcaaagtccagcattacgtaactaaagtaagtaaaatgatgtgtatcaacttgatggtaaaatatgtagttatttaaaaaagcaatgaacaatttagtttcatgagaaaatgttgccccctaaaagtagaacacatatgttacaactgcaataatactctgaattcatctttcacaaataagagacatgttagcatagtgattaaaagcacagatattggagacaaactaacccagtttgaaccctggcactgccacgtatagcactgcagccttgggaaagttatttaaactcatgggcttcagtttcaacatctgtaaaatgggcatgttaacattgcctacctcataggattactgtgagaattttctaagttaatatatgtaaagcaactttaaaaagtgcctggcacttagttattgttaagtaagtgtctgcagatgcaagtttggaagagaaaagcaaataaatgaaaatcccttcctgttaagatgatggggtatttggatttttttttaatactaaaaagttttttttgttatatgttttggcaataaataattctcaatacaaaaaaaaaaaaaaaa

SEQ ID NO: 30855 - DNA, 1082 bp, Homo Sapiens
gcttgctccggccggcaccctaggccggcccgccgccagctgtcgccgacatggaacccttggccagcaacatccaggtcctgctgcaggcggccgagttcctggagcgccgtgagagagaggccgagcatggttatgcgtccctgtgcccgcatcgcagtccaggccccatccacaggaggaagaagcgacccccccaggctcctggcgcgcaggacagcgggcggtcagtgcacaatgaactggagaagcgcaggagggcccagttgaagcggtgcctggagcggctgaagcagcagatgcccctgggggccgactgtgcccggtacaccacgctgagcctgctgcgccgtgccaggatgcacatccagaagctggaggatcaggagcagcgggcccgacagctcaaggagaggctgcgcagcaagcagcagagcctgcagcggcagctggagcagctccgggggctggcaggggcggccgagcgggagcggctgcgggcggacagtctggactcctcaggcctctcctctgagcgctcagactcagaccaagaggagctggaggtggatgtggagagcctggtgtttgggggtgaggccgagctgctgcggggcttcgtcgccggccaggagcacagctactcgcacggcggcggcgcctggctatgatgttcctcacccagggcgggcctctgccctctactcgtgccaggcccacttgccaggcaggagccctccccaagccttcagggctgctcggagtcacctgttggaatggactaaaaggacccttgtgtgggaacaggtgctccccaaacaccctgctgctggctgccaggcaggccctctggaagggaaggggcaggactcatcaggacctccctggacccctgcagggcaggcagcttgggcccgagcccaagcatttggctctgctgcccccaaggggacaggaagcctcttgggcctcttcccttcctggacaaggccccctgcctttgcctcacataaactgtacagtattttcattaaaagcctctttcataaaaaaaaaaaaaaaaaaaaaaaaaaaaaaaaaaa

SEQ ID NO: 30856 - DNA, 1908 bp, Homo Sapiens; identical to SEQ ID NO: 26405

SEQ ID NO: 30857 - DNA, 4593 bp, Homo Sapiens; identical to SEQ ID NO: 24323

SEQ ID NO: 30858 - DNA, 1851 bp, Homo Sapiens
gcttcctttctcggaaacgcggcgcggccggctgccggaaaacagggcagacctgtatgattggtttattcctggggttgtcatatcatggctgataatgacacagacagaaaccagactgagaagctcctaaaaagagtacgagaactggagcaagaggtgcaaagacttaaaaaggaacaggccaaaaataaggaggactcaaacattagagaaaattcatcaggagctggaaaaactaagcgtgcatttgatttcagtgctcatggccgaagacacgtagccctaagaatagcctatatgggctggggataccagggctttgctagtcaggaaaacacaaataataccattgaagagaaactgtttgaagctctaaccaagactcgactagtagaaagcagacagacatccaactatcaccgatgtgggagaacagataaaggagttagtgcctttggacaggtgatctcacttgaccttcgctctcagtttccaaggggcagggattccgaggactttaatgtaaaagaggaggctaatgctgctgctgaagagatccgttatacccacattctcaatcgggtactccctccagacatccgtatattggcctgggcccctgtagaaccaagcttcagtgctaggttcagctgccttgagcggacttaccgctattttttccctcgtgctgatttagatattgtaaccatggattatgcagctcagaagtatgttggcacccatgatttcaggaacttgtgtaaaatggatgtagccaacggtgtgattaattttcagaggactattctatctgctcaagtacagctagtgggccagagcccaggtgaggggagatggcaagaacctttccagttatgtcagtttgaagtgactggccaggcattcctttatcatcaagtccgatgtatgatggctatcctctttctgattggccaaggaatggagaagccagagattattgatgagctgctgaatatagagaaaaatccccaaaagcctcaatatagtatggctgtagaatttcctctagtcttatatgactgtaagtttgaaaatgtcaagtggatctatgaccaggaggctcaggagttcaatattacccacctacaacaactgtgggctaatcatgctgtcaaaactcacatgttgtatagtatgctacaaggactggacactgttccagtaccctgtggaataggaccaaagatggatggaatgacagaatggggaaatgttaagccctctgtcataaagcagaccagtgcctttgtagaaggagtgaagatgcgcacatataagcccctcatggaccgtcctaaatgccaaggactggaatcccggatccagcattttgtacgtaggggacgaattgagcacccacatttattccatgaggaagaaacaaaagccaaaagggactgtaatgacacactagaggaagacaatactaatttggagacaccaacgaagagggtctgtgttgacacagaaattaaaagcatcatttaaccatagacaatttgccaggatctaggaaccacctaatggtaggtggacagaaaaggaaaaaaaaaaaaatttacttgcaagtactaggaattcagatgatcagctcttaaaaaaaaaaaaaaagcaaaaagactaaagccctattaaggaagttattgctttaataagaaatttcaaatattctcttatcccggtccaaaaggattaagcgattaaagaacgtaaaatggagatgtatttacatacacctggaaacctgtgccttgtattcaaattcattaaagcctaatcctgcaagtaaaaaaaaaaaaaaaaaaa

SEQ ID NO: 30859 - DNA, 3869 bp, Homo Sapiens; identical to SEQ ID NO: 22484

SEQ ID NO: 30860 - DNA, 4068 bp, Homo Sapiens
ggcagagcgcggcgcggggccggcggcgaaggtccggggtggaatcgacgtcgctgcggctgccgacgacccacacccggccggccgcctccgcagacccaccttggccgcgcggcagggggcgcgcagagccccgagggagcgagtccccgcgcgtggcagctcggcggcttctcccttcgggaggtccggctcccggctctccggacccgcctggcgtcctcgcctgcggcggggcggacgacagcggcgcccaggaatggcttcggcgggcagcggcatggaggaggtgcgcgtgtcggtgctgacccccttgaagctggtcgggctggtgtgcatcttcctggcgctgtgtctggacctgggggcggtgctgagcccggcctgggtcacagctgaccaccagtactacctgtcgttgtgggagtcctgccgcaaacccgccagcttggacatctggcactgcgagtccacgctcagcagcgattggcagattgctactctggctttactcctgggcggcgctgccatcattctcattgcattcctggtgggtttgatttctatctgcgtgggatctcgaaggcgtttctatagacctgttgcggtcatgctttttgcagcagttgttttacaggtttgcagcctggtcctttacccaatcaagttcattgaaactgtgagcttgaaaatttaccatgagttcaactggggttatggcctggcctggggtgcaactatattttcgtttgggggtgccatcctttattgcctgaaccctaagaactatgaagactactactagaaccaatagtctcaaagtaaaaacaaccaccaccatccaacaaaaggattacgtctgcatcttttctaacttactattttctaaaacacttgtggagcatcaagcagtttgctcagttgatttaatcttttttgccttttggctgtcaacatcataaccagcttttacatccattttagaaatctgcacaaattaagagagctgattagacataggcaaatgctgcaaacttccaatatgttcatatcgtttttcttgacaaatgaagggtctatatgacagcaaccattgtgagaaactagttggaatgagatttgcctcaatctcctattgcctgcaggggagcagttggcataagcaacatttagaagttcctttgcgctgacaaggattccactgttagagcccttaccgcctgcttatcctacccaatgactacattggctgttggttatttgcttgagtgagcccttgaaaaatgaactgcccttcagcatctaatgggagttgtgaatgtaactggttaatgatacacattccaccttcaggaacactctttttaatgggaggttatgctttggcaatcagcgtctccctgggaagagagtcaagacttggagacatgtgcttctcattatgtggttagaaattggtgcctcagccctatctagactggggaaaaattgaggatctctgtttttcctggggcaaacagaaagaaatctgcatgagttgcttttgtaccctttaaatcatttgccaaacattgcagcaaacaagtgtgcgtatgtaacaagcttcactgtttttatagaaggtgaaccattagtataaatggtaataagttgttccctaaccctccacatacatttgcctatcacacgtaaaattaatatttactctagtgaagtggtttgagcactaaccttgtacacattgttaagaggcttagattggtattcatacttatttaccatacaaaagtatggtaccttaaagcttttgctctatgttctttactgtttcactggaaagtgtcaatagagttgcctaagaataaaaattgaaatggtgttaatctgaaaattaatgattctctgtaagcactgtagttgaaaagagagtagcaattaggatgatcattttgtgtaaaattcattaaaatagaaggctgctattttttgcaagtattttaaatgtcttcatttttttaagaaaggaatagcgatagatttatataaatatctaaatgtctcagtagaggagtagaattcatctggttatcacctggtcctctgaagttaactgatgggctaaccgatttgtgcacacacttaggatggatttatgttaagggaattacttactgactgttcaatggaaggaagtattaataatagggaataagtttgcaactaatctcatgctgcaaacttgtgttaattctgtttaatatacaaatttggatagcttaattataaacatatttttatatcaaatatacagttctaatataaaagttataaataattatttttgttaacaaagacactaaaacagtatgttctggttttggccctcttgcagaaagaagcattagaaaaattactttaaaagtagctatatgttactgtattgcaaaatctgttaagagcaggaccacatcgatagtatttaataatttgttttacctcccaaaacacagttcttctttcagcttgtcttaagaatggttgccaaaaacaacagccaaaaaaaaaaaacctattttattatccaaatgctagaaaacacacatgaattttctataaaatcacgaatatgaagtaccaggtttagtcttactttagcaatgatagacaaaagcgaataaatacatcacagacagaaacctttataaaaatatatgattctataaagaatcattagaaattatgagtggaaattctccagaaagatagtattatagagtcttttgaagcaattttttgagaaatagtaaaatctggggcagagtgtcttgcagttaattgcatattgtcagagcagcatgagaaatatgatatttggatagggatttcagcaactaaacattctctgttctgagatctctttattcctgaataatgaaagaatagtactttggtgctgacaccaatgaggcacttctcttggtcctagtagaggatgcagtgtactgttaaaccaatatcatcacatctcgagtcttatcaagttttcattctctgtcaatatgacaagctcaaagtgacagaatatgttataggttgaagcacacatatttgcagtttactgaaaagtagatttcttatgtgacttttttcccttctcagcaaagagccctacactagatttctaccatcactaatatttggaagtatttcattactaacaatctcagtacaacatgaaaattgttgcttctcatctaaaatacaattttgtctatcagaataaacacaagtgaaattttcacctacattaacattatgtctttgcagctttaggtttgttagatgtgttcttaagcataatttttagccacaaacccattgttagatagatatctatggatatagatctacatctatagatatagatatacacacatatatatactcacacacatatagcataaaatactcagcagggctagttattccgatttcttgcacaattatttagctttttgtaagttcaacatgtaaattttaaagacataaatatagagagacttatgtgtttgaatataaatgatatatatggattagcatgtacctgtatattattaaacatgcaatgaactgactggtaagtgacgtctaattgtatggctagcaatgtaatttattcagactgtatttttgtacagagcagtgcactctaacctatgcctctgtgtcctctttaatgcctaaagctgtgcctagaaatttcatctgtcttaaaagtaaaatatacttcatgctgtttatgctattagtttctgtactgctattctatatttattatttttaaatatatgacatgtttactacttaaacatgaattcatggtatcctggttattttttttaagtcatctgggggaaaacctgtttatcactccagtgattttgagtttgcagtttcacaatcagttcttcatttcatgatttttgtagttgacatgaagtcatctatgtggaaaaaaataaaaataaaagtgatttcacggatgtggtttgaaaaaaaaaaaaaaaa

SEQ ID NO: 30861 - DNA, 3619 bp, Homo Sapiens
ttgggcgagagggtggggccactcaacgctgaggcggcgaatggccggagcagacttaaatcaagaggctggggacctctaagatcaaagtttggggcggggcctaaggagggggcggggcctccagattcgagacctggaagggctggggcggcgcttggggcggccctgccgccgcctcccgttctcccctccgcagcggcggcggtggcggagaaggaactcgacacgcaccgaccgccctcccgccccagccgaagcggaagctgtagcccgctctgggccggggccatgggcgccccgcgccgcccgggtcatgaggacggaggcggaggcagcggggccgccgctcgagcccggggactttgtgcaactgcctgtgcccgtcatccagcagctctaccactgggactgtggcctggcctgctccaggatggtgctgcggtacctgggccagctggacgacagtgagtttgagagagccctgcagaagctgcagctgaccaggagcatctggaccatcgacctggcctacctgatgcaccactttggcgtgaggcaccgcttctgtacccagaccctgggtgtcgacaagggctacaagaaccagtccttctacaggaagcactttgacacagaagagacccgggtgaatcagctgtttgcacaagcaaaggcctgcaaggtgctggtggagaaatgcacagtgagtgtgaaggacatccaggcgcacctggctcagggccatgtggccatcgtgctggtgaactcgggggtgctgcactgtgacctgtgctccagccctgtcaagtactgctgcttcacccccagtggccaccactgcttctgccgcactcctgactaccagggccacttcatcgtgctgcgtggctacaaccgggccactggctgcatcttctacaacaacccagcctatgccgacccaggaatgtgcagcaccagcatcagtaactttgaggaggccagaaccagctatggcacagatgaggacatcctctttgtctacttggacagctgacagcaggagcctggtgcgcctaggccctcggaccccatccccaccccagccgggcccgctcaggatgccctggcccaggcttggggctgctggggttggaatgtggaactgcagcctcagcccatctggcagagtcccaggaactcggagactggcacagctgctttgtctgccagtgccgtgtgttgtcatgtcactcaccccaagcacctgctggctgctggaagcataccccaagaccccaagccttgactccagctgcgcccacaggaagtccagtcccgacagtgcccttgttgcctttgagccagatccatggcaatggtctccccacagaccgcaggactgagcctggagagagaagttgcttgacggatgccacttgtcaggacagtatgtgagtgtctggagacagcatagctgaccccaatcccccagggctgaggacccctccaggcccctctctcctggaagtgctgcatatgcccctgtgcccagtggttgatgataccaccaccacctgcctacccatgggcccaagtttctgtggctcattacagggcatctgacccctgccacccagcatagacacacctcacagctgccctgccatgcagagccctggccgctggagactcttaaaccccccacagccctccaggtcctccagctctgtcagatggagggctctcgggcctagatcccactggtaggcctcgtggctggcagcagtgctctgggaataaacagctgccctagccccagagggatccctgcacccaggaggcctcctgacaccagccaaaatcctgacagcagggtctgccctcttgagtgtggggagcccctagtcctttaaggttggctgctaaggcctgtgctccaaagcaacgggctggggcagcctgcagctgcccacccaacctggtcttcacaccagattgcacaggatactgggtcttgtctatcttgatggagaagaggggttcctgcccaggatcttacaacacagcaagtagcatagagctctttccttcctcttttttggggaggttggggtcaggggttgtttctttgagatttaagttttcatttttgaggggtaatcaccttcaagtaaaacagtaatagcaagagtgaaggtactttggaaccactaacacctctgcacagggcagttagccagctcaagttctttttcagagaaagggacttggccagtggtttaagtacctgccccttcacctctcagacgaggcagctgacgaggcagctggcccagtcttgggagtctgctcaggacagtggtggagctgggtcttgaaccccagtctgcacctaaaaaactaaaggaaatggatttttttttttttttttgagacggagactcactctgttgcccagactggagtgcagtggcacgatcttggcttactacaacctccgcctcctgggttcaagcgatcctcctgcctcagccccccactagctgggactacaggcacatgccaccatgcccggctaatttttttgtatttttagtagagaccaggcttcgccatgttggccaggctggtctcgaacccctgagctcaggtgatccacctgcctcggcctcccaaagtgggaaatgggtcattttcaaaggggcaacagtgataccatccctgcactcctgggtcctgctcttccaatgcccaaggcatggcatggtggcagctgtgcccccgcccattgctttggagcacagatgactctgggggcagaggtgggctctgtttaggagggcagtgagaccacccagccaaattgcttctcaaccctagacaaagcctttggccaagagggaggtgctgttagttgggcagcccttctgggtttcagagaccggtgttggctctagactggtctcatctccattgccttaatgccaggtggcccaggagtacccatgcacagcagctgtggggtgtgggcatcttcaggtggtgttctggtaaaattgttagaatagctgtatgaaggaaaccagtgggaggaaatgaagttttcaggatggtgggatgtgatttagacagtgcacatgctgttagggctgtcactagggagtggccttcatggagggtggtaacagcacctcagtccagccaaaatgtttagaaacactcagtctctggtcccagaggatggcttctcagggcatgccacaagttaaaggtcaccttcctgaaagatgaatgagaaagctgcccattctcaagactcatctgcctagggagggtcacagaggcaggatgtaagacacactgtgttgcattcttgcacaagtcatgaaaatggagccagagagcctggacatcagggacttttgcccacagcacatgacaccgacagctgcccagcctgttcacatgctggggaccagcacagcacctgaagccatgtgggacagttgggctttgttcattctagccacggggatgaaagggatcttttgcattgcagagattttatatatattttgtttgtaatgagccattctcaataaacattattctcactgcaaaaaaaaaaaaaaaa

SEQ ID NO: 30862 - DNA, 1369 bp, Homo Sapiens
aaacaggaaataaatacgaatgaaactgagctctaagcagcatgtaacctggcctgcatccaggaaatagaggacttcggatccttctaaccctaccacccaactggccccagtacattcattctctcaggaaaaaaaacaaggtccccacagcaaagaaaaggaataggatcaagagatacgtggctgctggcagagcaagcatgaattcgatgacttcagcagttccggtggccaattctgtgttggtggtggcaccccacaatggttatcctgtgaccccaggaattatgtctcacgtgcccctgtatccaaacagccagccgcaagtccacctagttcctgggaacccacctagtttggtgtcgaatgtgaatgggcagcctgtgcagaaagctctgaaagaaggcaaaaccttgggggccatccagatcatcattggcctggctcacatcggcctcggctccatcatggcgacggttctcgtaggggaatacctgtctatttcattctacggaggctttcccttctggggaggcttgtggtttatcatttcaggatctctctccgtggcagcagaaaatcagccatattcttattgcctgctgtctggcagtttgggcttgaacatcgtcagtgcaatctgctctgcagttggagtcatactcttcatcacagatctaagtattccccacccatatgcctaccccgactattatccttacgcctggggtgtgaaccctggaatggcgatttctggcgtgctgctggtcttctgcctcctggagtttggcatcgcatgcgcatcttcccactttggctgccagttggtctgctgtcaatcaagcaatgtgagtgtcatctatccaaacatctatgcagcaaacccagtgatcaccccagaaccggtgacctcaccaccaagttattccagtgagatccaagcaaataagtaaggctacagattctggaagcatctttcactgggaccaaaagaagtcctcctccctttctgggcttccataacccaggtcgttcctgttctgacagctgaggaaacgtctctcccactgtttgtactctcaccttcattcttcaattcagtctaggaaaccatgctgtttctctatcaagaagaagacagagattttaaacagatgttaaccaagagggactccctagggcacatgcatcagcacatatgtgggcatccagcctctggggccttggcacacacacattcgtgtgctctgctgcatgtgagcttgtgggttagaggaacaaatatctagacattcaatcttcactctttcaattgtgcattcatttaataaatagatactgagcattcaaaaaaaaaaaaaaaaaa

SEQ ID NO: 30863 - DNA, 1426 bp, Homo Sapiens
cgaaggctgtgcggtctgccaggagctgcggccccgtccggcccgggctggcatgggttggaattggagcctatcccccaacccgaaggctaacagcatcatgtggttactaactgttcctcattcaccggttgatgcctcccagaaaaaaacgccgccagccttcccagaaagccccgctgctgttccaccaacaaccactggagggccccaaacacagctgtgcatctacacagcttcccatcactcacactcgacaggtgcccagcaagcccattgaccacagcaccatcacttcctgggtatcacctgattttgatacagcagcaggaagcttgttcccagcctaccagaaacaccaaaaccgggcgagacactcaagtcgaaaacctaccacctccaagtttccacatctaacttttgagagtccgcaatcttccagttcagagacattggggatccccttaatccgagagtgccccagtgaatcagaaaaggatgtttccagaagacccttagttccagtgctcagtccccaaagctgtgggaacatgtcagtgcaggcacttcagagcttaccttatgtgttcattccacctgatatccagaccccagagtcatcatctgtgaaggaagaactcattccccaagatcagaaggaaaacagccttctaagctgcactcttcacactggcactcctaatagcccagagcctggacctgttctggttaaagacacccccgaggacaagtatggaataaaggtcacatggaggagacgacagcacctgcttgcttacctcagggagagagggaagctgagcagaagccaattccttgtgaaaagctgactgccatcagtaatctcaatagaaaagagatatgttttctggagtcataaaggaattcaattcctagggtttttgtttttgtttttgagatgtaatattgctctgttgcccaggctggagtgcagtggtatgatctcaccttactgcaaccaccacttcctgggttcaagcgattctcctgcctcagcctccccagtagctgggattacaggcaccagccaccatgcctggctaatttttttgtatttttagtagagatgtggtttctccatgttggccaggctggtctcaaaatcctgacctcaagtcatctgctggccttgacctcacaaagtgctggcccagccgagatttgttttctaagatactttgtgtcatgaacagttcagtttagtgtcatgaactattcacttcatatttttcttgtattaactgtttaaatttttaaaatatcttgtagtaactctttaaaatgtatgtaagtaaatggctgcagaaagtttttttagagaatcctgcttccatcagtaatacagcaatattaccccatccactaaaaaaaaaaaaaaaaaaaa

SEQ ID NO: 30864 - DNA, 4473 bp, Homo Sapiens
aaaagtcgggagtgccatggtgccagctggggatcaagaccgcgcgccacacagggggaagccggcccaggctggggctcgcacctcacgtgcctcccgggccctgcgatcctggaggcgctcccaggccgcgcgcgccacggtcacccacccacgtggggggcacgaccgtgggagtcacggggggtaccgtgagggtcacagggggtgccgcagggatccacagtgggcttccgcggggcctccacccctgagcttcacagaggaagtgaaatttgagctgcgcgccctgaaggactgggacttcaaaatgagcgtccctgactacatgcagtgtgctgaggaccaccagacgctgctcgtggtggtccagcctgtgggcatcgtctccgaggagaacttcttcaggatctataagaggatttgctctgtgagtcagatcagcgtgcgggactcccagcgagtcctctacatccgctacaggcaccactacccacccgagaacaacgagtggggtgacttccagacccaccgcaaagtcgtgggcctcatcaccatcacagactgcttctcggccaaggactggccacagacctttgagaagttccacgtgcagaaggagatctacggctccacactgtatgactcccggctctttgtcttcgggctgcagggggagatcgtggagcagccgcgcaccgacgtggctttctaccccaactacgaggactgccagacggtggagaagagaatcgaggacttcatcgagtcactgttcatcgtgctggagtccaagcgtctggacagagccacagacaagtctggggataagatcccccttctctgtgtcccgtttgagaaaaaggactttgtaggactggacacagacagcagacattacaagaagcggtgccaaggccgcatgcggaagcacgtgggggacctgtgcctgcaggcagggatgctgcaggactccctggtgcattaccacatgtcggtggagctgctgcgttctgtgaatgactttctgtggcttggagctgccctggaaggattgtgttcagcttctgtcatctatcactatcctggtggaactggtgggaagagtggagctcggaggttccagggcagcacccttcctgctgaagcagccaatagacaccggccaggggcacaggaagttctcattgatccaggtgccctcaccaccaatggcatcaaccctgacaccagtactgagatcggacgtgctaagaactgccttagccctgaagacataattgacaagtataaagaggcgatttcctattacagcaagtataagaatgcgggagtgattgagttggaagcgtgcatcaaggctgtacgtgtccttgcaattcagaaacggagcatggaagcatcagaatttcttcagaatgcagtttacattaaccttcgacagctttctgaggaagagaaaattcagcgctacagcatcctctccgagctctatgagctgatcggcttccatcgcaagtctgcgttcttcaagcgcgtggccgccatgcagtgcgtggccccaagcatcgcggagcctgggtggagggcctgctacaaactcctcctggaaacgctgcccggctacagtctgtcgctggatcccaaagatttcagcagaggcacgcacagaggctgggctgcggtccagatgcgtttgctccatgaattggtctacgcctcccgaaggatggggaaccctgccctctctgtcagacacctgtccttccttctacagaccatgctggacttcttgtcggatcaggaaaagaaagatgtggcccaaagcctagagaactatacgtccaagtgtcctgggaccatggagcccatcgccctccctggcggcctcaccctgccaccggtgcccttcaccaagcttcccgtcgtcaggcatgtgaaactattgaaccttcctgctagcctccggccacacaaaatgaaaagcttgctgggtcagaacgtgtcaaccaaaagtcctttcatctattcaccaattatcgcacacaaccgtggagaagagcggaacaagaaaatagatttccagtgggttcaaggagatgtgtgtgaagttcagctgatggtatataacccaatgccgtttgaacttcgagttgaaaacatggggctgctcaccagcggagtggagttcgagtctctccctgcggcgctttctcttccggctgaatctggtctgtacccagtgacgctcgtcggggtcccgcagacgactggaacgattactgtgaacggttaccataccacggtcttcggtgtgttcagtgactgtttgctggataacctgccgggaataaaaaccagtggctccacagtggaagtcattcccgcgttgccaagactgcagatcagcacctctctgcccagatctgcacattcattgcaaccttcttctggtgatgaaatatctactaatgtatctgtccagctttacaatggagaaagtcagcaactaatcattaaattggaaaatattggaatggaaccattggagaaactggaggtcacctcgaaagttctcaccactaaagaaaaattgtatggcgacttcttgagctggaagctagaggaaacccttgcccagttccctttgcagcctgggaaggtggccacgttcacaatcaacatcaaagtgaagctggatttctcctgccaggagaatctcctgcaggatctcagtgatgatggaatcagtgtgagtggctttcccctgtccagtccttttcggcaggtcgttcggccccgagtggagggcaaacctgtgaacccacccgagagcaacaaagcaggcgactacagccacgtgaagaccctggaagctgtcctgaatttcaaatactctggaggcccgggccacactgaaggatattacaggaatctctccctggggctgcatgtagaagtcgagccgtctgtatttttcacccgagtcagcaccctcccagcaaccagtacccggcagtgtcacctgctcctggatgtcttcaactccaccgagcatgagctgaccgtcagcaccaggagcagcgaggcactcatcctgcacgccggcgagtgccagcgaatggctattcaagtggacaagttcaactttgagagtttcccggagtcccctggggagaaggggcaatttgcaaaccccaagcagctggaggaagagcggcgggaagcccgaggcctggagatccacagcaagctgggcatctgctggagaatcccctccctgaagcgcagtggcgaggcgagtgtggaaggactcctgaaccagctcgtcctggagcacctgcagctggcgcctctgcagtgggatgtgctggtggacggacagccatgtgaccgcgaggctgtggcggcctgccaggtgggcgaccccgtgcgcctggaggtgcggctgaccaaccggagcccgcgcagcgtagggcccttcgccctcactgtggtccccttccaggaccaccagaacggcgtgcacaactacgacctgcacgacaccgtctccttcgtgggctccagcaccttctacctcgacgcggtgcagccgtccggccagtcggcctgcctcggggccctcctcttcctctacacgggagacttcttcctccacatccggttccacgaggacagcaccagcaaggagctgccaccctcttggttctgcctgcccagtgtgcacgtgtgtgccctggaggcgcaggcctgagcccgcctacttccgtccctctttctgcagggccagaggtgaccctgcctggcctcccacaccccctgcaatgagcaaggccttcactgcagccccatctcctcctcctcccccagacccctcccagccctctcctcctgttcctcctgtagcatctttgctgggctacgcagaagccccggacatggcagccccaccccatgccacgccccttcctacactgttccctggaccatacacaggctgaagcagaggaaatcccaaagcgggtgcccatccagcccaggtcccaggatccctgcacccatttctgtgacctggggccccagccgtgctgtgctgctcatcccagcagagggacctccctcgtccagcgacttccctttggccatagaaagaaatggtgagcatgagactgggcacagcctgagggcgtgggcagcttcccaccctccctgggccttggaatcccccaaggctggttttcttcctggagacccccatgggcaacttggcaggagagatggtgccgtaggaggtcgtggatggttgatgccaagagaggccctccacccgtggtgggcaaatgtccaggcctgggctggcagcccagggctgtttctgggtgctccctggccccagggtggcgtctggttaccatggctgtgtgtgtccatgtctgcaagcagttcttcaataaatggcctgcctccccc

SEQ ID NO: 30865 - DNA, 3542 bp, Homo Sapiens
agcggagcgccaggcagcgcggagcggaggtcgggcccacagccgctccgcctcccggcccgcagatccccgacggccgcaccgcgggctcctctggcccgcaagaacacgtgcatggcgtcctggggaaggcgctgagtgcggagtcgcggcgccgcacgcggcaccatggccctggagcaggcgctgcaggcggcgcggcagggcgagctggacgtgctgaggtcgctgcacgccgcaggcctcctggggccctcgctgcgcgacccgctggacgcgctgcccgtgcaccacgcggcccgcgctgggaagctgcactgtctgcgcttcctggtggaggaagccgccctccccgccgcggcccgcgcccgcaacggcgccacaccggcccacgacgcctccgccaccggccacctcgcctgcctgcagtggctgctgtcgcagggcggctgcagagtgcaggacaaagacaattctggtgccacagtcttgcatctggctgcccgcttcggccaccccgaggtggtgaactggctcttgcatcatggcggtggggaccccaccgcggccacagacatgggcgccctgcctatccactacgctgccgccaaaggagacttcccctccctgaggcttctcgtcgagcactaccctgagggagtgaatgcccaaaccaagaacggtgccacgcccctgtacctggcgtgccaggagggccacctggaggtgacccagtacctggtgcaggaatgcggcgcagacccgcacgcgcgcgcccacgacggcatgaccccgctgcacgccgcggcgcagatgggccacagcccagtcatcgtgtggttggtgagctgcaccgacgtgagcctgtccgagcaggacaaagacggcgccaccgccatgcacttcgcggcgagccgcggccacaccaaggtgctcagctggctgctgctgcacggcggggagatctcggctgacctgtggggcgggaccccgctgcacgacgccgccgagaacggggagctagagtgctgccagatcctggtagtgaacggcgcggagctggacgtccgcgaccgggacgggtacacggccgccgacctgtcggacttcaacggccacagccactgcacccgctacctgcgcacggtggagaacctgagcgtggagcaccgcgtgctttcccgggatccatccgcagagctggaggctaagcagccggattcaggcatgtcctcacccaataccacggtgtcggtccagccgctgaactttgacctcagctcgcctaccagcaccctctccaactacgactcctgctcctccagccactccagcatcaagggccagcaccctccatgtgggctttccagcgctagagctgcagacatacagagctacatggacatgctgaacccggagctgggcctgcctcggggcacgattgggaagcccacacccccaccacccccacccagcttccccccgccacccccgcccccaggcacccaactgcccccacccccacctggctacccagctcccaagcctcctgtaggaccacaggcagctgacatctacatgcagaccaagaacaaactccgccacgtggagacagaggccctcaagaaggagctgagctcctgtgacggccacgacgggctgcggaggcaggactccagccgcaagccccgcgccttcagcaagcagcccagcacgggggactactaccggcagctgggccgctgccccggcgagacgctggccgcacgcccgggcatggcgcacagcgaggaggtgcgtgcccgccagcccgcgcgcgccggctgcccgcgcctcggccctgccgcccgcggctcactcgaaggcccctccgctcccccgcaggcggcgctgcttcctgggaaccatgttcctaacggctgcgccgcggaccccaaggcgtccagggagctgccactgccgcccccaccgccgccgccgcccctgccggaggccgcgagttcgccaccgccggccccgcctctgcccctcgagagcgctggccctggctgcgggcagcgccgctcctcctcgtccaccggcagcaccaagtctttcaacatgatgtccccgacgggcgacaactcggagctactggctgagattaaggcaggcaagagcctgaagccgacgccccagagcaaggggctgaccacagtgttctcaggcatcgggcagccggccttccagcccgattcgccgctgccttctgtgtcacctgcactgtcaccagtccggagccccacaccgccagctgcggggtttcagccgctgctcaatggaagcttggttcccgtgccgcccactactcctgcgccgggagtgcagctggacgtggaggctctcatccccacgcacgatgagcagggccggcccatccccgagtggaagcgccaggtgatggtgcgcaagatgcagctgaagatgcaggaggaggaggagcagaggcggaaggaggaggaggaggaggcccggctggccagcatgcccgcctggaggcgggacctcctgcggaagaagctggaagaagagagggagcagaagcggaaagaggaggagcgacagaagcaggaggagctgcggcgggagaaggaacagtcagagaagctgcggacgctgggctacgatgagagcaagctggcgccctggcagcgacaggtcatcctgaagaagggggacatcgctaagtactagaggccgcagactcctgtccgcagcctcgcagctccgtggggccctccgccccagccccagccagccaggccctggtggaaaggctgggagccgcacagccctcccctcctgcgctggaaaccctccctgacccccaccctggccccccgtatccccagcccttggcaacactggagtgcacacgccgccacggttgcccagaaaaagtgcccaagctgctgacgcaaacaacaacaaatgctgcttatttgcatgccgacttacatatatttgcatgttcgttgactatcaaagagtgcagagctctccccagccccgtgggtggtgactttgttttcctgcggggctcagccccctccaggatgcagccccctcccccgcaccccggaaccggcgtcgctggcgcatcctgggtggaggcaggccccgagctcggggaaggggttttcccttcctctctgccccagatctgcgcgcggcctagcccgggcctcatttcttatccccgccaagggtttcctctcagtcatttgtttaccagaaacatgaaaactgcctgtctggccgggccgcacttgtggcccccgggaccccacctctggccccacctccctcaagtctgcgccccgtccccagccagacccactcgctgccgggaccctttcactgccccggtggagtgaatagaggatgaggggccctgaccctgtgtctccaactgctgcaccccatcccgaccctgtctccgccacctcgcagccccattaaagcgctctcatctggaaaaaaaaaaaaaaaaaaaaaaaaaa

SEQ ID NO: 30866 - DNA, 2495 bp, Homo Sapiens
gggtggtggatctgtcggtcccgttttcccgtcgcacgtggtggccactgttggcttctgaatggtttgcaaggcggatatccacgccaaggcctttggatcggccgtgggtacatccgtctgagccgttcctttccatcgcagagcggcggcctccggcggcgctctccagtcatggactaccggcggcttctcatgagccgggtggtccccgggcaattcgacgacgcggactcctctgacagtgaaaacagagacttgaagacagtcaaagagaaggatgacattctgtttgaagaccttcaagacaatgtgaatgagaatggtgaaggtgaaatagaagatgaggaggaggagggttatgacgatgatgatgatgactgggactgggatgaaggagttggaaaactcgccaagggttatgtctggaatggaggaagcaacccacaggcaaatcgacagacctccgacagcagttcagccaaaatgtctactccagcagacaaggtcttacggaaatttgagaataaaattaatttagataagctaaatgttactgattccgtcataaataaagtcaccgaaaagtctagacaaaaggaagcagatatgtatcgcatcaaagataaggcagacagagcaactgtagaacaggtgttggatcccagaacaagaatgattttattcaagatgttgactagaggaatcataacagagataaatggctgcattagcacaggaaaagaagctaatgtataccatgctagcacagcaaatggagagagcagagcaatcaaaatttataaaacttctattttggtgttcaaagatcgggataaatatgtaagtggagaattcagatttcgtcatggctattgtaaaggaaaccctaggaaaatggtgaaaacttgggcagaaaaagaaatgaggaacttaatcaggctaaacacagcagagataccatgtccagaaccaataatgctaagaagtcatgttcttgtcatgagtttcatcggtaaagatgacatgcctgcaccactcttgaaaaatgtccagttatcagaatccaaggctcgggagttgtacctgcaggtcattcagtacatgagaagaatgtatcaggatgccagacttgtccatgcagatctcagtgaatttaacatgctgtaccacggtggaggcgtgtatatcattgacgtgtctcagtccgtggagcacgaccacccacatgccttggagttcttgagaaaggattgcgccaacgtcaatgatttctttatgaggcacagtgttgctgtcatgactgtgcgggagctctttgaatttgtcacagatccatccattacacatgagaacatggatgcttatctctcaaaggccatggaaatagcatctcaaaggaccaaggaagaacggtctagccaagatcatgtggatgaagaggtgtttaagcgagcatatattcctagaaccttgaatgaagtgaaaaattatgagagggatatggacataattatgaaattgaaggaagaggacatggccatgaatgcccaacaagataatattctataccagactgttacaggattgaagaaagatttgtcaggagttcagaaggtccctgcactcctagaaaatcaagtggaggaaaggacttgttctgattcagaagatattggaagctctgagtgctctgacacagactctgaagagcagggagaccatgcccgccccaagaaacacaccacggaccctgacattgataaaaaagaaagaaaaaagatggtcaaggaagcccagagagagaaaagaaaaaacaaaattcctaaacatgtgaaaaaaagaaaggagaagacagccaagacgaaaaaaggcaaatagaatgagaaccatattatgtacagtcattttcctcagttccttttctcgcctgaactcttaagctgcatctggaagatggcttattggttttaaccagattgtcatcgtggcactgtctgtgaagacggattcaaatgttttcatgtaactatgtaaaaagctctaagctctagagtctagatccagtcactgactctgtctggtgttgacagaggatttatttaagctattattttaataaagaactttgtacatttttatttttatatttttttctcttacaaatatgtttttggaagcatgataaatgtttaaatgtagtcaacatctgtaactcttacatgagtgtccagaggcactcatgggaaaattggttttgctttctttgtacacaccagagacccatctgaggtcatctgattataaggccatgtttatataaagggaatttcacccacagttcagctggctgttgattttcactgcaactctgcctttgtgtgtattggcgatcatttgtaatgctcttacacttcgtctttaatgttctttttggagttaggacctctcagttcataaagttttttacaattcaaaaaaaaaaaaaaaaaaaa

SEQ ID NO: 30867 - DNA, 6357 bp, Homo Sapiens
ctgtggtcggggctcgggaccggctgccatcttagtctagggactgaggagtcgccgccgccccgagtcccggtaccatgcatttcacggtggccttgtggagacaacgccttaacccaaggaagtgactcaaactgtgagaacttcaggttttccaacctattggtggtatgtctgacagtggatcacaacttggttcaatgggtagcctcaccatgaaatcacagcttcagatcactgtcatctcagcaaaacttaaggaaaataagaagaattggtttggaccaagtccttacgtagaggtcacagtagatggacagtcaaagaagacagaaaaatgcaacaacacaaacagtcccaagtggaagcaaccccttacagttatcgttacccctgtgagtaaattacattttcgtgtgtggagtcaccagacactgaaatctgatgttttgttgggaactgctgcattagatatttatgaaacattaaagtcaaacaatatgaaacttgaagaagtagttgtgactttgcagcttggaggtgacaaagagccaacagagacaataggagacttgtcaatttgtcttgatgggctacagttagagtctgaagttgttaccaatggtgaaactacatgttcagaaagtgcttctcagaatgatgatggctccagatccaaggatgaaacaagagtgagcacaaatggatcagatgaccctgaagatgcaggagctggtgaaaataggagagtcagtgggaataattctccatcactctcaaatggtggttttaaaccttctagacctccaagaccttcacgaccaccaccacccaccccacgtagaccagcatctgtcaatggttcaccatctgccacttctgaaagtgatgggtctagtacaggctctctgccgccgacaaatacaaatacaaatacatctgaaggagcaacatctggattaataattcctcttactatatctggaggctcaggccctaggccattaaatcctgtaactcaagctcccttgccacctggttgggagcagagagtggaccagcacgggcgagtttactatgtagatcatgttgagaaaagaacaacatgggatagaccagaacctctacctcctggctgggaacggcgggttgacaacatgggacgtatttattatgttgaccatttcacaagaacaacaacgtggcagaggccaacactggaatccgtccggaactatgaacaatggcagctacagcgtagtcagcttcaaggagcaatgcagcagtttaaccagagattcatttatgggaatcaagatttatttgctacatcacaaagtaaagaatttgatcctcttggtccattgccacctggatgggagaagagaacagacagcaatggcagagtatatttcgtcaaccacaacacacgaattacacaatgggaagaccccagaagtcaaggtcaattaaatgaaaagcccttacctgaaggttgggaaatgagattcacagtggatggaattccatattttgtggaccacaatagaagaactaccacctatatagatccccgcacaggaaaatctgccctagacaatggacctcagatagcctatgttcgggacttcaaagcaaaggttcagtatttccggttctggtgtcagcaactggccatgccacagcacataaagattacagtgacaagaaaaacattgtttgaggattcctttcaacagataatgagcttcagtccccaagatctgcgaagacgtttgtgggtgatttttccaggagaagaaggtttagattatggaggtgtagcaagagaatggttctttcttttgtcacatgaagtgttgaacccaatgtattgcctgtttgaatatgcagggaaggataactactgcttgcagataaaccccgcttcttacatcaatccagatcacctgaaatattttcgttttattggcagatttattgccatggctctgttccatgggaaattcatagacacgggtttttctttaccattctataagcgtatcttgaacaaaccagttggactcaaggatttagaatctattgatccagaattttacaattctctcatctgggttaaggaaaacaatattgaggaatgtgatttggaaatgtacttctccgttgacaaagaaattctaggtgaaattaagagtcatgatctgaaacctaatggtggcaatattcttgtaacagaagaaaataaagaggaatacatcagaatggtagctgagtggaggttgtctcgaggtgttgaagaacagacacaagctttctttgaaggctttaatgaaattcttccccagcaatatttgcaatactttgatgcaaaggaattagaggtccttttatgtggaatgcaagagattgatttgaatgactggcaaagacatgccatctaccgtcattatgcaaggaccagcaaacaaatcatgtggttttggcagtttgttaaagaaattgataatgagaagagaatgagacttctgcagtttgttactggaacctgccgattgccagtaggaggatttgctgatctcatggggagcaatggaccacagaaattctgcattgaaaaagttgggaaagaaaattggctacccagaagtcatacctgttttaatcgcctggacctgccaccatacaagagctatgagcaactgaaggaaaagctgttgtttgccatagaagaaacagaaggatttggacaagagtaacttctgagaacttgcaccatgaatgggcaagaacttatttgcaatgtttgtccttctctgcctgttgcacatcttgtaaaattggacaatggctctttagagagttatctgagtgtaagtaaattaatgttctcatttagatttatctcccagtgatttctactcagcgtttccagaaatcaggtctgcaaatgactagtcagaaccttgcttaacatgagattttaacacaacaatgaaatttgccttgtcttattccactagtttattcctttaacaacaatattttatgtgtgtcaaaagtctcacttgggagtagtgtttttttcttttagacattctgcagacatgcagggaagtcctttggtaactgcaatatacaagattttcctattaagcctcttggtaagaggcatttgttaaaagtgcaagcttactcctgcttctggggatgtgagcaaaattcgggcttgtgttctccctctcattttagtctgacttgactattgtttttcctttctggcgcatgaatccatacatcattcctggaagtgaggcaagactcttgcatctctacaaagtagttttgtcaatttgaattcagggaaaagttggtcacagcctgcaaatgacttcatttggaagtctgattgtttcagttgcctgacaaatactacactttacaaacaatgttaacactgtgattccttcattgttttaagaagttaacctagggccgggcatggtggctcatacctgtaatcctagcactctgggaggccgaggcaggaggatccctttagcccaggagttaaagaccagcctgggcaacatagggagaccctgtcttttttttgggcagcgtggtgggggataaataaataaaaggaaaaaaaacttagcctagaattagaattaatttaattgaattcatctaaagatgtctctggtgatttttatatgttccgctatataattgatgctttatagttttatcataatccaacaacttcagttatatttaattattgttaaggagtttaagactagaaagactagagtgctttctagtccaaatagaggtcagtgaaacagcttttgacatcagattttcatttgagagggagagctgtggtactggctaaaaagaaaggaagataacatccagtaaccacaggaatatattctctgtgaattaaaagtcttcaaagttatcatttctctgacatatgttggagtagtcatttccattctttacattgtcatgaactggattgataaccctcatctgcaatattttcacccctaaaatttttaacagggtttcctttttttctcacgactatttaagtttagattgctccattattaactgattaatgcactttgaagttctctggaattaattattttaacttggcctagcttcgactgtcaaggtggctgttataaatttgacttcattggcagtggatgaagcctaagccagctgagtctctatcatagctgaaccctgaggacagcctcatagctcatgtatcagggacttttgccacatttcagaggcatagcatgaacaagtaatattaagccaagaataagcagcagaaccctgttccatatggaaaaaagaaaaacaattttttgtccctaatgttcttccttttacatcctggaacaacaataaaaacatttttttaaacttgtctactgtaagatactgccatcataaagcagagacttacatgagtgaaagggttgcctcatcaagcagctcagtgtaaatggggaggctaggctctccccagccctatggtttttttatttcatgtaccccaggaaatactgtgtggtttctaaaagccctggttgttaaaagtagggactctgcctttttgttggtagggagaaaaaacgctattgctttgtcttacagagcgaatgtctgccaactacccgttcattatataagtctgaacttggtaatatatggctaatgaagattaagccctctataaagacttcctgttgaggtgaattctcatactgaaatgtagttacctacaatatttactagagatttatgaaattaaattaagagataatgtaagaaaatacatttttttggttctatataatgcttcatgattcatttagggacctagaaatattgtgtgaaaatatataaatatcacccaaaaggctttctgccctatatttttaaaatacagaatagttatatttgaagtagccctggccctagttctatagggcttggctatttaatatttttatggaagaagtgtttagttctggaaaaggtaaatgcttgtatatatttttgcagcctgggatctccctactccattttttcctttaatttaagtggccacatgtatatgtcttccctgctgtgttaggaaaatgggggctggatatcccaagaatcagaggttatataaaaatactgcaaatagaccgcagacataaatatctaccaaatgctatcttaaattttggtccaaactgaacatatggaaatagatttattgtaagtatttacttagagctttttcttaaatctgaactaacttgcttttagaagtctttttctttgtaagcattgtaaatgctaataaatcctgttaatttttttttttttttttttttttttttactgcatgttacattgaaataaaaacaaagtaaaatgagcaattgccttattgttctgctcttttgcagggggtgggggttggggaagacagcattccacagcctggtcaggagggaaggacctcacttgtttcatcaaatggagtggtttaaaactgatcaagcagctcataataatgaattcctgctctgtcttttattatcttatgtcagagtgcagcaaaatctcatttcataagacttacaataactctatttaaaattcaggtattgtactcgggaggctgaggtgggaggatcccaggagttcaaatcctgcctgggcaacatagcaagaccctgtctcttaaaaaaacaaaaagacatattcaggtactgatttttcatcaagagattgacataccaatgatcagaaattttagtgaaacttgactcaactatacacaaagttctcatcctaaatgaactatttcagtcaagcccactctaccactttttacttatctggttaataatccgaaatgttaccggggttgactcacggaattaaatttttcctctatttttatatcctttcctgttgtggatgtaacttacctttctaaactcctttagagttaacgacttctatttagtattgttggtatctccagcccccctcctttttttgtttttcttttagttatttactttgtttgtataatttgctttcattaactaaaaatggaattggcagcactggattgtatattactgtattaagagtacctttgttttcttgatctgttacttttaatactcaggtaatgctacaaatattacagggagtcaaatgcttttataaagttccttcagtggttgcctcacttgcgttttcctacaagatgtaagactgtttataattaaacttttttggtccttc

SEQ ID NO: 30868 - DNA, 3243 bp, Homo Sapiens; identical to SEQ ID NO: 25405

SEQ ID NO: 30869 - DNA, 2414 bp, Homo Sapiens
gaagatgcagtttctccgtatccgcaggcttctttcgctggcgccattacctgagttctcctccagcgtttccgcaccctctccgattagcggtcccaggagtttccagggtaaccgcgcagtagggcggatctcattaggcggaaagcgaaacccggaagtgacgctcttaccgggtgtcagcagcgagagggttcgaagatggcggcgcgcaagggtcggcgtcgcacgtgtgaaaccggggaacccatggaagccgagtccggcgacacaagttccgagggcccggcccaggtctacctgcccggccgggggccgccgctacgcgaaggggaggagctggtcatggacgaggaggcctatgtgctctaccaccgagcgcagactggcgccccctgtctcagctttgacatagtccgggatcacctgggagacaaccggacagagcttcctcttacactttacttgtgtgctgggacccaggctgagagcgcccagagcaacagactgatgatgcttctgatgcacaatctgcatgggacaaagcccccaccctcagagggcagtgatgaagaagaagaggaggaagatgaagaggatgaagaagagcggaaacctcagctggagctggccatggtgccccactatggtggcatcaaccgagttcgggtgtcatggctgggtgaagagcctgtggctggggtgtggtcagagaagggccaggtggaggtgtttgcgctgcggcggcttctgcaggtggtggaggagccccaggccctggcagccttcctccgggatgagcaggcccaaatgaagcccatcttctccttcgctggacacatgggcgagggctttgcccttgactggtccccccgggtgaccggtcgcctgctgaccggtgactgtcaaaagaacatccacctctggacacctgcggacggcggctcctggcacgtggaccagcggccattcgtgggccacacacgctctgtggaggacctgcagtggtcaccgactgagaacacggtgtttgcctcctgctcagctgacgcctccatccgcatctgggacatccgggcagcccccagcaaggcctgcatgctcaccacagccaccgcccatgatggggacgtcaatgtcatcagctggagccgccgggagcccttcctgctcagtggcggggatgatggggccctcaagatctgggaccttcggcagttcaagtctggttccccagtggccaccttcaagcagcacgtggcccccgtgacctccgtcgagtggcacccccaggacagcggggtctttgcagcctcgggtgcagaccaccagatcacacagtgggacctggcagtggagcgggaccctgaggcgggcgacgtggaggccgaccccggactggccgacctcccgcagcagctgctgttcgtgcaccagggcgagaccgagctgaaggagctgcactggcacccgcagtgcccagggctcctggtcagcacggcgctgtcaggcttcaccatcttccgcaccatcagcgtctgaggcgtcccactggctctgatcttgcttcctgcttggaaactgaagtcgaattgggctcccctggaaggggttcattcaggtctgttgactgagactggccggcctgtgggctgccgtgatggattctgtttgacgtattgttctctagaaggcctggctctgatccagtgacccctctcaccaaagaactcggtttaaccagggctctgtaagaccactcccacccagagacttgtgtggcctggtgtggcctgtgtgtcggattccttcctgtcagctgtgacccatttgacctgtgtccccagaacccagttttttgtttgtttgtttgagacggagtcttggtctgtcgcccaggctggagtgcagtagcacgatcttggctcactgcaacctccgcctcctgggttaaagtgattctctcagctcagtctcccaggtagctgggattacaggcatgtgccaccacaccccgttaatttttgtatttttagtagagacggggtttcaccatgttggccaggctggtctcaaattcttgatctcaagtgatctgtccgccccggcctcccagagtgctgggttgggattacaggcgtgagccaccgcgtccggctcaggacccagttttggctgctggttcccagcaggggactcgggggatatacagtggctgcaccaaattggaggtgtgggttcctccaacacaatttgcttctgcccgttgtcttcctgccagctgggtttggccaggatttctccgtgtgggggctacatgcgaccctctcccctcctccctgactttagaggctggtgctgtgtcgggaggaaggtcagggctcctgagcagcaataaaggaccaagaagaggc

SEQ ID NO: 30870 - DNA, 1707 bp, Homo Sapiens
gtggtaggctgcgaccccttcctcccacagccccttcccgcccctcgccgggcatccgccgacaggacaggagagatttacaaatagtgttttggcatcatggaacgtgtaggttgtactttaacgacaacttacgcccaccctagaccaacaccaaccaactttctaccagccatcagtaccatggcctcaagctacagggaccgctttccccactccaatttgacccatagcctgagccttccttggagacccagcacatactacaaagtcgcctccaattccccaagcgtggccccgtactgcaccagatcacagagggtgtccgagaataccatgcttccctttgtttccaacagaaccactttcttcacaagatacacaccggatgactggtacaggtccaatttaaccaactatcaagagtccaacacttcccgacataattcggagaaactaagagtggatacatctcgcctgattcaagacaaatatcaacaaacaagaaaaactcaggcagacacaacccaaaatctgggagaacgtgtcaatgacatagggttttggaaatctgaaatcattcatgagttggatgaaatgattggagagacaaatgcacttactgatgtgaagaaaagactggagcgggctttgatggagactgaagcccctcttcaggtagcccgagaatgtctatttcatcgagaaaagagaatgggaatcgacctagttcacgatgaagttgaagcacaactgctgacggaagttgatactattctgtgttgtcaagaaagaatgaagctacatttggataaggctattgcccaacttgcagccaacagagcgtcccagcatgagctggaaaaggacctgagtgacaaacagacggcttaccggatcgacgacaaatgccaccacctgcgcaacacatcagacggtgtcggctacttccgcggagtggagagggtcgatgcaactgtctcagtgcctgagtcctgggccaaatttacagatgacaatattctccgctcccagagtgaacgggcagcttccgctaagctaagagacgacattgaaaacctcttggttgtgactgccaatgagatgtggaatcaattcaacaaagtgaacttgtctttcaccaatcgcattgctgagactgcagatgctaagaataagattcagacgcacttagcaaagaccctgcaggagattttccagactgaaatgaccatagaatccatcaagaaggccatcaaggacaagactgccttcctgaaggtggctcagaccagactggatgagcgcacaagacggccgaacattgagttgtgccgagacatggctcagctacgccttgttaacgaggtacacgaggttgacgacaccatccagaccctgcagcagcgcctgagggatgcagaggacaccctgcagtcgctggtccacatcaaagccacactcgagtatgacctggctgtcaaagccaattccctgtacatcgaccaggaaaaatgcatgagcatgcgcaagagctaccccaacaccctccggctggtcggcttctgctagggaccccaccgggtgtggttttgatacccctaagttaaggctgagccagagcactgtctcagcatttgaaccgaatgctaatatagtcacttattaaaggattatgctgatggaaatgtaccaaaaaaaaaaaaa

SEQ ID NO: 30871 - DNA, 3693 bp, Homo Sapiens
gctgcgtccttagcgggagcccgagtgcgggcggtggcgggcttggcggcggggcaggattccaggcaggagccttgcctctcaggtggcgggctctgcgaccctgcgagatggacgggacagaaggcagtgccgggcagcccggccccgctgagcgatcccaccgaagcagcgtgtcctccgtgggagcccgagcggctgacgtgctggtatacctagcggatgacacggtggtgcccctggctgtggagaacctgccctcgctcagtgcccatgagctgcaccgcgctgtccgcgaggtcctgcagcttccagacatcgccctggatgtcttcgcgctctggctggtctcccctctgctggaggtgcagctgaaacccaagcaccagccctacaagctgggacgccagtggccggagctgctgctgcgcttcaccagtgccccagatgatgacgtggccatggatgagcctttcctgcagttccgaaggaacgtgttcttcccaaagcggcgggagctccagatccatgacgaggaggtcctgcggctgctctatgaggaggccaagggcaacgtgctggctgcacggtacccgtgcgacgtggaggactgcgaggctctgggcgccctggtgtgccgcgtgcagcttgggccctaccagcccggccggccggcagcctgcgacctgagggagaagctggactccttcctccctgcccacctctgtaagcggggccagagtctctttgctgccctccggggccgtggggccagggccgggccgggcgagcagggcctgctgaacgcctaccgccaggtgcaggaggtcagcagcgacggcgggtgcgaggccgccctgggcacccactaccgcgcctatctcctcaagtgccacgagctgccgttttatgggtgtgccttcttccacggtgaggttgacaagccggcccaaggctttttgcaccggggtgggcgcaagccagtttctgtggccatcagtctggaaggcgtgcacgtcatcgatagcagagagaagcatgtcctgctgggcctgcgcttccaggagctgtcgtgggaccacacctcccccgaggaggaggagcccatcttgtggctggagttcgacggggacagcgagggcacacctgtcaacaagctcctcaagatctactccaagcaggccgaactgatgagcagtctcattgagtactgcatcgaactgagccaggcggcggagcccgcaggcccccaggacagtgcgactggctcgccctcggaccccagctcctcactggctcctgttcagcgccccaagctgcggaggcagggcagtgtggtgtccagccggatccagcatctctccaccatcgactacgtggaggacggcaaggggatcaggcgagtgaagccgaagcgcaccacatccttcttcagccggcagctgtccttgggccaggggagctacaccgtggtgcagcccggcgacagcctggagcagggctgaggacgctgcacccggcaggaggagggcgactgggggccctggcccggcactgtcctcctgaggggcaggcgccggctgcaacagtctcatgggtcaccacgtggggagggctgcctcagcaggtttctcagaccacggagaagtgacttttgggcccggggccatgcccgggctgtgcaaagctggccagggcctcctgtagggctcctctgcagcctgccctgccttcccccggatgctgggccctgctgctctctcaggaccatccgatcaagctgcagctgccaccctcacctagaaacatgcctttgtgcccacctcaagatgggcagtgtccctgttctgaagtgcccagtggcagctccagtggtagaggaccaaggattgaggtttgggacctgaagctccagtgtgtgcctttggcctcttccctggacttgggtgaccagtctccgtcttcctcctgctagtgctccaccccccggacttggatgaccagtttcccaccttcctcctgctggtgctccatcccccaataccaggctgggccaccactctgaggagggtaggaggggcctccctggattgaaccgggacagaaacacggtgagggcccccaccacacctccctggttgaatcaggaatggagggagccaggcagggccctacctggggtcctgtgcccctcgttctggtctcctttgcaggcacgagataccagaaagagcatgcctttctgatagcctttggtgatgtcactgctgggaggtggctatcctgtggaccacctggcctccagacccacactcacagtctgtgaaaaactgaaaatcccctggtgggcactccctggagcccaagcagctcccctaggggactgaccggacctgacctcccctccctgtgtctgggtcttcaggttttagtttggtctttgttcatctgagttgtgctggggcaacgccaggaagtgccctgggtaacctctgctgtgcgctccttcccaggtggcgccatggattcctctgggggctggcgcatgcccaggaaagcctgggccacacgggacactctcttctttatcgaggacacttggaaaggtgactgatatgggtgcttggcttctctggtcccagcttgccctccggggagcaggggctctgtcttgtcccagatgagctgagagcccctgagaggagggctttcccagccctgggaccctccgaggtgggtgtgcgggtctcacaggtgcttcctgggacttcctgtggctgcacagggcttggctttgtcttcgttcccggtggaaaaccgtgggagaggaagcttgggcctctactccaagtatcagagcctgttcaccctcctccctttggtagcttgtgaatgtgccaggtgtttcgaggtaggcttgccttctggcagcatggactttgttaaaataataggcggaaagaagaggcctgggaagggcccccagtcttttggaatgtcctggtcacagggtcatgtcagctgccagttctcgtctcccgtcctggagttgctcggtcttgcggagctgcccgcctgcctgttctggcggctccagcgcaggctgtccctgctgctttgattccaggtgattttattttttttatttttttattttttttgagacggagtcttgctctgttgcccaggcaggagtgcagtggcgcatctcggctcactgcaacctctgtctcaagcgattctcctgcctcagcctcctgagtagctgggattacaggtgcatgccaccaggccccgctgatttttgtatttttagtagagatagggtttcaccatgttggtcaggctggtcgtgaactcctgacctcatgatctgcccgcctcaacctcccaaagtgctgggattataggcgtgagccaccgcccccagctgattccaggcgaattcttctctgatgggcgggcgagggtgtgttcgtgtgatgggttggagtgtgtgtgtctgagtacacagatgatgtgttttcccttcagcttcttacgttttctgagcatccgttgtgccttaacattttctgcttgtcctttgggacaaagcagtattttactcattctttgaatgttctcattcttttgtatcatgtgacttattaaaatcagtttctaacaaaaaaaaaaaaaaaaaaaaaaaaa

SEQ ID NO: 30872 - DNA, 4109 bp, Homo Sapiens
agcgggaggactggggcggcgcggcgcggcgcggtgcatttccaggcgctgctctccgtcgcagagaaccctgagctcggcgcgccgagagtcccagcagggcaagggggcgcggcgtcctggtcctcgagcttgggagacagatgcgcatgggcgtgggggcatgcggacctaagctcgggtgaagctctcgggaagggcaagactgcggcgacgagatgcgagcagaggagccctgcgcccccggggcccccagcgccctgggagcccagcgcacgccgggccccgagctgcgcctgtccagccagctgctgcccgagctctgtaccttcgtggtgcgcgtgctgttctacctggggcctgtctacctagctggctacctggggctcagcataacctggttgctgctcggcgccctgctgtggatgtggtggcgcaggaaccgccgcgggaagcttgggcgcctggccgccgccttcgaattccttgacaatgaacgcgagttcatcagccgcgagctgcggggccagcacctgccagcctggatccacttcccggacgtggagcgggtcgagtgggccaacaagatcatctctcagacctggccctacctaagcatgatcatggaaagcaagttccgggagaaacttgagcccaagatccgagagaagagcatccacctgaggacctttacctttaccaagctctactttggacagaagtgtcccagggtcaacggtgtcaaggcacacactaatacgtgcaaccgaagacgtgtgactgtggacctgcagatctgctacatcggggactgtgagatcagtgtggagctgcagaagattcaggctggtgtgaacgggatccagttgcagggcaccctgcgggtcatcctggagcccctcctagtggacaagccctttgtgggagccgtgactgtgttcttccttcagaagcagcacctacagatcaactggactggcctgaccaacctgctggatgcgccgggaatcaatgatgtgtcagacagcttactggaggacctcattgccacccacctggtgctgcccaaccgtgtgactgtgcctgtgaagaaggggctggatctgaccaacctgcgcttccctctgccctgtggggtgatcagagtgcacttgctggaggcagagcagctggcccagaaggacaactttctggggctccgaggcaagtcagatccctacgccaaggtgagcatcggcctacagcatttccggagtaggaccatctacaggaacctgaaccccacctggaacgaagtgtttgagttcatggtgtacgaagtccctggacaggacctggaggtagacctgtatgatgaggataccgacagggatgacttcctgggcagcctgcagatctgccttggagatgtcatgaccaacagagtggtggatgagtggtttgtcctgaatgacacaaccagcgggcggctgcacctgcggctggagtggctttcattgcttactgaccaagaagttctgactgaggaccatggtggcctttccactgccattctcgtggtcttcttggagagtgcctgcaacttgccgagaaacccttttgactacctgaatggtgaatatcgagccaaaaaactctccaggtttgccagagtgaaacaaggtcagcaaagacccttcttcctatgtcaaactatctgtaggcaagaagacacatacaagtaagacctgtccccacaacaaggaccctgtgtggagccaggtgttctccttctttgtgcacaatgtggccactgagcggctccatctgaaggtttgatggaagaagggctcttgaaacagagttaagaggtttctaagccaggcgggctgggaagcttgaagtgcaccttgagcaggttctcctggcagcgtttaaagtcagccccttgtatgtaagagaggacactggggccccacaaggcctcatctccttaaggctagtgcctgaggtcactgtatagggggatgtgggaggataaatcctcaagtcccttgactttccctgcaaaagggtctttatatttgctacacagtacccagagcagcctatctacacaggacattaataatggtgtactttaaaaaatatatgtttcatttaatcttcacaagatctgtagagtaagcaaagagaggcaaaaacaatgtcttgtccaagatctcatgaccaacaagtggtggagctgggatcttttagggccctgagccctgcctggagagcagcacagctcatcagtccccaaagccccctggctctgggcatttgacagactagctcatacagatcataattgcctctactctgagtcactatcttccctgacagaagacaaggaccaggtctggcctgatcccattctagttttcagaataggaccagatgcccatagaagcacagtacagactgaagtaaacccaaacttggctggggctcagatgctagtagtggagtggtggggcttggttatcctcttgttttgtgactggaccactgcccaggtgcttgatgatgaccaggagtgtgctctgggaatgctggaggtccccctgtgccagatcctcccctatgctgacctcactcttgagcagcgctttcagctggaccactcaggcctggacagcctcatctccatgaggctggtgcttcggttcctgcaagtggaggaacgagagctggggagcccatacacaggacctgaagccctaaagaaaggccctctgctcatcaagaaagtggctaccaaccagggtcccaaagcccaacctcaggaagaaggccctacagatttgccatgtcccccagaccctgcttctgatactaaggacgtatccaggagtaccacaaccaccaccagtgctaccaccgttgccactgagcccacatcccaagagacaggcccagagcctaaaggcaaggacagtgccaaaaggttctgtgagcccatcggggagaagaagagtccagccaccatcttcctgactgtcccaggtccccactctccagggcccatcaagtcacccagacccatgaaatgccctgcctccccattcgcatggccgcccaagaggctggctcccagcatgtcctcgctcaactccttggcctcttcttgctttgacctggcagatatcagcctcaacattgagtatgcacctctctgcttaatcttttctaaaatcgcctgtatgaaaaatacctcgctggatggaaaagtagatatgaacttacatttctgtgcaagttgttttttcacaaaatatcttcctaagaggcagcatggtgtggtagaaagaacacaggacaagggagagagagccaaacaggctgtttatggctctagctgcgtactgactataaaatagatgctggactctggttgaggtggggacctcaggcgacggcagctgggtgagattcagctcacagtgcgctatgtgtgtctgcggcgctgcctcagcgtgctaatcaatggctgcagaaacctaacaccatgtaccagcagtggagctgatccctacgtccgtgtctacttgttgccagaaaggaagtgggcatgtcgtaagaagacttcagtgaagcggaagaccttggaacccctgtttgatgagacatttgaattttttgttcccatggaagaagtaaagaagaggtcactagatgttgcagtgaaaaatagtaggccacttggctcacacagaagaaaggagttaggaaaagtactgattgacttatcaaaagaagatctgattaagggcttttcacaatggtatgagctgactccaaatggacagcccagaagctgatgatgagaattcttatcactcacctttatattaaaatgtatatatatgtatatattttttcctttggatcacttacatccaatatatgtatattttgtcatttaaatcagaacaaccacttgaaattatatacatacaattcttgtgtggaatttaactccatgactgaatagcataaggaagaggttatttaaaagcaagaactaaaaaaaaaaaaaaaaaaaaaaaaaaaaaaaaaaaaaaaaaaagaaaaaaaaaaaaaaa

SEQ ID NO: 30873 - DNA, 18209 bp, Homo Sapiens
gaagccgcatccagacaaaagctgccgcatccctgccctgcccaacccctggagggattcgagtttggtgcttgtccccgtctgattctcagcgccaaactttttgctagttcagagattccaagagtctgatgagttactctgagaggaaaccctctgcctgttgttgaggaggactgagcacagtgcttaggcgctgagggggaaaaagagggggaaaaaaaagaaaatgatttcctgggaagttgtccatacagtattcctgtttgctcttctttattcttccctagctcaagatgcgagcccccagtcagagatcagagctgaggaaattcccgagggggcctccacgttggcttttgtgtttgatgtgactggttctatgtatgatgatttagttcaggtgattgaaggggcttccaaaattttggagacgtctttgaaaagacctaaaagacctcttttcaactttgcgttggtgcctttccatgatccagaaattggcccagtgacaattaccacagatcccaagaaatttcaatatgaactcagagaactgtatgttcagggtggtggtgattgcccagaaatgagtattggagctataaaaattgccttggaaatttctcttcctggttctttcatctatgttttcactgatgctcggtccaaagattaccggctcacccatgaggtgctgcaacttatccaacagaaacagtcacaagtcgtatttgttctgactggagattgtgatgacaggacccatattggatataaagtctatgaagaaattgcctctacaagttctggtcaagtgttccatctggacaaaaaacaagttaatgaggtattaaaatgggtagaagaagcagtacaggcctccaaagttcaccttttatccacagatcatttggaacaggctgtaaatacttggagaattccttttgatcccagcctgaaagaggtcactgtgtctttgagtgggccttctccaatgattgaaattcgcaatcctttagggaagctgataaaaaagggatttggcctgcatgagctattaaatatccataactctgccaaagtagtgaatgtgaaagagccagaggctggaatgtggacagtgaagacctcaagcagtggaaggcactctgttcgcattactggcctcagtactattgatttccgagctggcttttctcgaaagcccaccctggacttcaaaaaaacagtcagcagaccagtgcaaggaatacctacctatgtactgctcaatacttctggaatttccactccagctagaatagatcttcttgaacttttgagtatctcaggaagttctcttaagactattcctgttaaatattacccacatcgaaaaccttatggcatatggaatatttctgactttgtaccaccaaatgaagctttctttctcaaagtaacaggctatgataaagatgattacctcttccagagagtatcaagtgtttccttttctagtattgtcccagatgctcccaaagttacgatgcctgagaaaaccccaggatactatctgcagccgggccaaattccctgctctgttgacagtcttttgccctttaccttgagctttgtcagaaatggagttacacttggagtagaccagtatttgaaagaatctgccagtgtgaacttagatattgcaaaggtcactttgtctgacgaaggtttctatgaatgcattgctgtcagcagtgcaggtactggacgggcacagacattttttgacgtatcagagccccctccggtcatccaagtgcctaacaatgttacagtcactcctggagagagagcagttttaacatgtctcatcatcagtgcggtggattacaatctaacctggcagaggaatgacagagatgtcagactggcagagccagcgagaattaggaccttggctaatctgtcattggagctaaagagtgtgaaattcaacgatgctggagagtatcattgtatggtttctagtgaaggtggatcatcagccgcttcagttttcctcacagtgcaagaaccacccaaagtcactgtgatgcccaagaatcagtctttcacaggagggtctgaggtctccatcatgtgttctgcaacaggttatcccaaaccaaagattgcctggaccgttaacgatatgtttatcgtgggttcacacaggtataggatgacctcagatggtaccttatttatcaaaaatgcagctcccaaagatgcagggatctatggttgcctagcaagtaattcagctggaacagataaacagaattctactctcagatacattgaagcccctaagttgatggtagttcagagtgagctcttggttgcccttggggatataaccgttatggaatgcaaaacctctggtattcctccacctcaagttaaatggttcaaaggagatcttgagttgaggccctcaacattcctcattattgaccctctcttgggacttttgaagattcaagaaacacaagatctggatgctggcgattatacctgtgtagccatcaatgaggctggaagagcaactggcaagataactctggatgttggctcacctccagttttcatacaagaacctgctgatgtgtctatggaaattggctcaaatgtgacattaccttgttatgttcagggttatccagaaccaacaatcaaatggcgaagattagacaacatgccaattttctcaagacctttttcagttagttccatcagccaactaagaacaggagctctctttattttaaacttatgggcaagtgataaaggaacctatatttgtgaagctgaaaaccagtttggaaagatccagtcagagacaacagtaacagtgaccggacttgttgctccacttattggaatcagcccttcagtggccaatgttattgaaggacagcagcttactttgccctgtactctgttagctggaaatcccattccagaacgtcggtggattaagaattcagctatgttgctccaaaatccttacatcactgtgcgcagtgatgggagcctccatattgaaagagttcagcttcaggatggtggtgaatatacttgtgtggccagtaacgttgctgggaccaataacaaaactacctctgtggttgtgcatgttctgccaaccattcagcatgggcagcagatactcagtacaattgaaggcattccagtaactttaccatgcaaagcaagtggaaatcccaaaccgtctgtcatctggtccaagaaaggagagctgatttcaaccagcagtgctaagttttcagcaggagctgatggtagtctgtatgtggtatcacctggaggagaggagagtggggagtatgtctgcactgccaccaatacagccggctacgccaaaaggaaagtgcagctaacagtctatgtaaggcccagagtgtttggagatcaacgaggactgtcccaggataagcctgttgagatctccgtccttgcaggggaagaggtaacacttccatgtgaagtgaagagcttacctccacccataattacttgggccaaagaaacccagctcatctcaccgttctctccaagacacacattcctcccttctggttcaatgaagatcactgaaacccgcacttcagatagtgggatgtatctttgtgttgccacaaatattgctgggaatgtgactcaggctgtcaaattaaatgtccatgttcctccaaagatacagcgtggacctaaacatctcaaagtccaagttggtcaaagagtggatattccatgtaatgctcaagggactcctcttcctgtaatcacctggtccaaaggtggaagcactatgctggttgatggagagcaccatgttagcaatccagacggaactttaagcatcgaccaagccacgccctcagatgctggcatatatacatgtgttgctactaacatagcaggcactgatgaaacagagataacgctacatgtccaagaaccacccacagtggaagatctagaacctccatataacactactttccaagaaagagtggccaatcaacgcattgaatttccatgtcctgcaaaaggtacccctaaaccaaccatcaaatggttacacaatggtagagagttgacaggcagagagcctggcatttctatcttggaagatggcacattgctggttattgcttctgttacaccctatgacaatggggagtacatctgtgtggcagtcaatgaagctggaaccacagaaagaaaatataacctcaaagtccatgttcctccagtaattaaagataaagaacaagttacaaatgtgtcggtgttgttaaatcagctgaccaatctcttctgtgaagtggaaggcactccatctcccatcattatgtggtataaagataatgtccaggtgactgaaagcagcactattcagactgtgaacaatgggaagatactgaagctcttcagagccactccagaggatgcaggaagatattcctgcaaagcaattaatattgcaggcacttctcagaagtactttaacattgatgtgctagttccacccaccataataggtaccaacttcccaaatgaagtctcagttgtcctcaaccgtgacgtcgcccttgaatgccaggtcaaaggcactccctttcctgatattcattggttcaaagatggcaagcctttatttttgggcgatcctaatgttgaacttctagacagaggacaagtcttacatttaaagaatgcacggagaaatgacaaggggcgctaccaatgtactgtgtctaatgcagctggcaaacaagccaaggatataaaactgactatctatattccacctagtattaaaggaggaaatgtcaccacagacatatcagtattgatcaacagccttattaaactggaatgtgaaacacggggacttccaatgcctgccattacttggtataaggacgggcagccaatcatgtccagctcacaagcactttatattgataaaggacaatatcttcatattcctcgagcacaggtctctgattcagcaacatatacgtgtcacgtagccaatgttgctggaactgctgaaaaatcattccatgtggatgtctatgttcctccaatgattgaaggcaacttggccacgcctttgaataagcaagtagttattgctcattctctgacactggagtgcaaagctgctggaaacccttctcccattctcacctggttgaaagatggtgtacctgtgaaagctaatgacaatatccgcatagaagctggtgggaagaaactcgaaatcatgagtgcccaagaaattgatcgaggacagtacatatgcgtggctaccagtgtggcaggagaaaaggaaatcaaatatgaagttgatgtcttggtgccaccagctatagaaggaggagatgaaacatcttacttcattgtgatggttaataacttactggagctagattgtcatgtgacaggctctcccccaccaactatcatgtggctgaaggatggccagttaattgatgaaagggatggattcaagattttattaaatggacgcaaactggttattgctcaggctcaagtgtcaaacacaggcctttatcggtgcatggcagcaaatactgctggagaccacaagaaggaatttgaagtgactgttcatgttcctccaacaatcaagtcctcaggcctttctgagagagttgtggtaaaatacaagcctgtcgccttgcagtgcatagccaatgggattccaaatccttccattacatggttaaaagatgaccagcctgtgaacactgcccaaggaaaccttaaaatacagtcttctggtcgagttctacaaattgccaaaaccctgttggaagatgctggcagatacacatgtgtggctaccaacgcagctggagaaacacaacagcacattcaactgcatgttcatgaaccacctagtctggaagatgctggaaaaatgctgaatgagactgtgttggtgagcaaccctgtacagctggagtgtaaggcagctggaaatcctgtgcctgttattacatggtacaaagataatcgtctactctcaggttccaccagcatgactttcttgaacagaggacagatcattgatattgaaagtgcccagatctcagatgctggcatatataaatgcgtggccatcaactcagctggagctacagagttattttacagtctgcaagttcatgtggccccatcaatttctggcagcaataacatggtggcagtggtggttaataacccggtgaggttagaatgtgaagccagaggtattcctgccccaagtctgacctggttgaaagatgggagtcctgtttctagtttttctaatggattacaggttctctctggtggtcgaatcctagcattgaccagtgcacaaatcagcgacacaggaaggtacacctgcgtggcagtgaatgctgctggagaaaagcaaagggacattgacctccgagtatatgttccgccaaatattatgggagaagaacagaatgtctctgtcctcattagccaagctgtggaattactatgtcaaagtgatgctattcccccacctactcttacttggttaaaagacggccaccccttgctgaagaaaccaggcctcagtatatctgaaaatagaagtgtgttaaagattgaagatgctcaggttcaagacactggtcgttacacttgtgaagcaacaaatgttgctggaaaaactgaaaaaaaaaactacaatgtcaacatttgggtccccccaaatattggtggttctgatgaacttactcaacttacagtcattgaagggaatctcattagtctgttgtgtgaatcaagtggtattccacccccaaatctcatctggaagaagaaaggctctccagtgctgactgattccatggggcgagttagaattttatctgggggcaggcaattacaaatttcaattgctgaaaagtctgatgcagcactctattcatgtgtggcgtcgaatgttgctgggactgcaaagaaagaatacaatctgcaagtttacattagaccaaccataaccaacagtggcagccaccctactgaaattattgtgacccgagggaagagtatctccttggagtgtgaggtgcagggtattccaccaccaacagtgacctggatgaaagatggccaccccttgatcaaggcaaagggagtagaaatactggatgaaggtcacatccttcagctgaagaacattcatgtatctgacacaggccgttatgtgtgtgttgctgtgaatgtagcaggaatgactgacaaaaaatatgacttaagtgtccatgctcctccaagcatcataggaaaccacaggtcacctgaaaatattagtgtggtagaaaagaactcagtatctttgacttgtgaagcttctggaattcccctgccttccataacctggttcaaagatgggtggcctgtcagccttagcaattctgtgaggattctttcaggaggcaggatgctacggctgatgcagaccacaatggaagatgctggccaatatacttgcgttgtaaggaatgcagctggtgaagaaagaaaaatctttgggctttcagtattagtaccacctcatattgtgggtgaaaatacattggaagatgtgaaggtaaaagagaaacagagtgttacgctgacttgtgaagtgacagggaatccagtgccagaaattacatggcacaaagatgggcagcccctccaagaagatgaagcccatcacattatatctggtggccgttttcttcaaattaccaatgtccaggtgccacacactggaagatatacatgtttggcttccagtccagctggccacaagagcaggagcttcagtcttaatgtatttgtatctcctacaattgctggtgtaggtagtgatggcaaccctgaagatgtcactgtcatccttaacagccctacatctttggtctgtgaagcttattcatatcctccagctaccatcacctggtttaaggatggcactcctttagaatctaaccgaaatattcgtattcttccaggaggcagaactctgcagatcctcaatgcacaggaggacaatgctggaagatactcttgtgtagccacgaatgaggctggagaaatgataaagcactatgaagtgaaggtgtacattccacccataatcaataaaggggacctttgggggccaggtctttcccctaaagaagtgaagatcaaagtaaacaacactctgaccttggaatgtgaagcgtatgcaattccttctgcctccctcagctggtacaaggatggacagccccttaaatccgatgatcatgttaatattgctgcgaatggacacacacttcaaataaaggaggctcaaatatcagacaccggacgatatacttgtgtagcatctaacattgcaggtgaagatgagttggattttgatgtgaatattcaagttcctccaagttttcagaaactctgggaaataggaaacatgctagatactggcaggaatggtgaagccaaagatgtgatcatcaacaatcccatttctctttactgtgagacaaatgctgctccccctcctacactgacatggtacaaagatggccaccctctgacctcaagtgataaagtattgattttgccaggagggcgagtgttgcagattcctcgggctaaagtagaagatgctgggagatacacatgtgtggctgtgaatgaggctggagaagattcccttcaatatgatgtccgtgtactcgtgccgccaattatcaagggagcaaatagtgatctccctgaagaggtcaccgtgctggtgaacaagagtgcactgatagagtgtttatccagtggcagcccagcaccaaggaattcctggcagaaagatggacagcccttgctagaagatgaccatcataaatttctatctaatggacgaattctgcagattctgaatactcaaataacagatatcggcaggtatgtgtgtgttgctgagaacacagctgggagtgccaaaaaatattttaacctcaatgttcatgttcctccaagtgtcattggtcctaaatctgaaaatcttaccgtcgtggtgaacaatttcatctctttgacctgtgaggtctctggttttccacctcctgacctcagctggctcaagaatgaacagcccatcaaactgaacacaaatactctcattgtgcctggtggtcgaactctacagattattcgggccaaggtatcagatggtggtgaatacacttgtatagctatcaatcaagctggcgaaagcaagaaaaagttttccctgactgtttatgtgcccccaagcattaaagaccatgacagtgaatctctttctgtagttaatgtaagagagggaacttctgtgtctttggagtgtgagtcgaacgctgtgccacctccagtcatcacttggtataagaatgggcggatgataacagagtctactcatgtggagattttagctgatggacaaatgctacacattaagaaagctgaggtatctgacacaggccagtatgtatgtagagctataaatgtagcaggacgggatgataaaaatttccacctcaatgtatatgtgccacccagtattgaaggacctgaaagagaagtgattgtggagacgatcagcaatcctgtgacattaacatgtgatgccactgggatcccacctcccacgatagcatggttaaagaaccacaagcgcatagaaaattctgactcactggaagttcgtattttgtctggaggtagcaaactccagattgcccggtctcagcattcagatagtggaaactatacatgtattgcttcaaatatggagggaaaagcccagaaatattactttctttcaattcaagttcctccaagtgttgctggtgctgaaattccaagtgatgtcagtgtccttctaggagaaaatgttgagctggtctgcaatgcaaatggcattcctactccacttattcaatggcttaaagatggaaagcccatagctagtggtgaaacagaaagaatccgagtgagtgcaaatggcagcacattaaacatttatggagctcttacatctgacacggggaaatacacatgtgttgctactaatcccgctggagaagaagaccgaatttttaacttgaatgtctatgttacacctacaattaggggtaataaagatgaagcagagaaactaatgactttagtggatacttcaataaatattgaatgcagagccacagggacgcctccaccacagataaactggctgaagaatggacttcctctgcctctctcctcccatatccggttactggcagcaggacaagttatcaggattgtgagagctcaggtgtctgatgtcgctgtgtatacttgtgtggcctccaacagagctggggtggataataagcattacaatcttcaagtgtttgcaccaccaaatatggacaattcaatggggacagaggaaatcacagttctcaaaggtagttccacctctatggcatgcattactgatggaaccccagctcccagtatggcctggcttagagatggccagcctctggggcttgatgcccatctgacagtcagcacccatggaatggtcctgcagctcctcaaagcagagactgaagattcgggaaagtacacctgcattgcctcaaatgaagctggagaagtcagcaagcactttatcctcaaggtcctagaaccacctcacattaatggatctgaagaacatgaagagatatcagtaattgttaataacccacttgaacttacctgcattgcttctggaatcccagcccctaaaatgacctggatgaaagatggccggccccttccacagacggatcaagtgcaaactctaggaggaggagaggttcttcgaatttctactgctcaggtggaggatacaggaagatatacatgtctggcatccagtcctgcaggagatgatgataaggaatatctagtgagagtgcatgtacctcctaatattgctggaactgatgagccccgggatatcactgtgttacggaacagacaagtgacattggaatgcaagtcagatgcagtgcccccacctgtaattacttggctcagaaatggagaacggttacaggcaacacctcgagtgcgaatcctatctggagggagatacttgcaaatcaacaatgctgacctaggtgatacagccaattatacctgtgttgccagcaacattgcaggaaagactacaagagaatttattctcactgtaaatgttcctccaaacataaaggggggcccccagagccttgtaattcttttaaataagtcaactgtattggaatgcatcgctgaaggtgtgccaactccaaggataacatggagaaaggatggagctgttctagctgggaatcatgcaagatattccatcttggaaaatggattccttcatattcaatcagcacatgtcactgacactggacggtatttgtgtatggccaccaatgctgctggaacagatcgcaggcgaatagatttacaggtccatgttcctccatctattgctccgggtcctaccaacatgactgtaatagtaaatgttcaaactactctggcttgtgaggctactgggataccaaaaccatcaatcaattggagaaaaaatgggcatcttcttaatgtggatcaaaatcagaactcatacaggctcctttcttcaggttcactagtaattatttccccttctgtggatgacactgcaacctatgaatgtactgtgacaaacggtgctggagatgataaaagaactgtggatctcactgtccaagttccaccttccatagctgatgagcctacagatttcctagtaaccaaacatgccccagcagtaattacctgcactgcttcgggagttccatttccctcaattcactggaccaaaaatggtataagactgcttcccaggggagatggctatagaattctgtcctcaggagcaattgaaatacttgccacccaattaaaccatgctggaagatacacttgtgtcgctaggaatgcggctggctctgcacatcgacacgtgacccttcatgttcatgagcctccagtcattcagccccaaccaagtgaactacacgtcattctgaacaatcctattttattaccatgtgaagcaacagggacacccagtcctttcattacttggcaaaaagaaggcatcaatgttaacacttcaggcagaaaccatgcagttcttcctagtggcggcttacagatctccagagctgtccgagaggatgctggcacttacatgtgtgtggcccagaacccggctggtacagccttgggcaaaatcaagttaaatgtccaagttcctccagtcattagccctcatctaaaggaatatgttattgctgtggacaagcccatcacgttatcctgtgaagcagatggcctccctccgcctgacattacatggcataaagatgggcgtgcaattgtggaatctatccgccagcgcgtcctcagctctggctctctgcaaatagcatttgtccagcctggtgatgctggccattacacgtgcatggcagccaatgtagcaggatcaagcagcacaagcaccaagctcaccgtccatgtaccacccaggatcagaagtacagaaggacactacacggtcaatgagaattcacaagccattcttccatgcgtagctgatggaatccccacaccagcaattaactggaaaaaagacaatgttcttttagctaacttgttaggaaaatacactgctgaaccatatggagaactcattttagaaaatgttgtgctggaggattctggcttctatacctgtgttgctaacaatgctgcaggtgaagatacacacactgtcagcctgactgtgcatgttctccccacttttactgaacttcctggagacgtgtcattaaataaaggagaacagctacgattaagctgtaaagctactggtattccattgcccaaattaacatggaccttcaataacaatattattccagcccactttgacagtgtgaatggacacagtgaacttgttattgaaagagtgtcaaaagaggattcaggtacttatgtgtgcaccgcagagaacagcgttggctttgtgaaggcaattggatttgtttatgtgaaagaacctccagtcttcaaaggtgattatccttctaactggattgaaccacttggtgggaatgcaatcctgaattgtgaggtgaaaggagaccccaccccaaccatccagtggaacagaaagggagtggatattgaaattagccacagaatccggcaactgggcaatggctccctggccatctatggcactgttaatgaagatgccggtgactatacatgtgtagctaccaatgaagctggggtggtggagcgcagcatgagtctgactctgcaaagtcctcctattatcactcttgagccagtggaaactgttattaatgctggtggcaaaatcatattgaattgtcaggcaactggagagcctcaaccaaccattacatggtcccgtcaagggcactctatttcctgggatgaccgggttaacgtgttgtccaacaactcattatatattgctgatgctcagaaagaagatacctctgaatttgaatgtgttgctcgaaacttaatgggttctgtccttgtcagagtgccagtcatagtccaggttcatggtggattttcccagtggtctgcatggagagcctgcagtgtcacctgtggaaaaggcatccaaaagaggagtcgtctgtgcaaccagccccttccagccaatggtgggaagccctgccaaggttcagatttggaaatgcgaaactgtcaaaataagccttgtccagtggatggtagctggtcggaatggagtctttgggaagaatgcacaaggagctgtggacgcggcaaccaaaccaggaccaggacttgcaataatccatcagttcagcatggtgggcggccatgtgaagggaatgctgtggaaataattatgtgcaacattaggccttgcccagttcatggagcatggagcgcttggcagccttggggaacatgcagcgaaagttgtgggaaaggtactcagacaagagcaagactttgtaataacccaccaccagcgtttggtgggtcctactgtgatggagcagaaacacagatgcaagtttgcaatgaaagaaattgtccaattcatggcaagtgggcgacttgggccagttggagtgcctgttctgtgtcatgtggaggaggtgccagacagagaacaaggggctgctccgaccctgtgccccagtatggaggaaggaaatgcgaagggagtgatgtccagagtgatttttgcaacagtgacccttgcccaacccatggtaactggagtccttggagtggctggggaacatgcagccggacgtgtaacggagggcagatgcggcggtaccgcacatgtgataaccctcctccctccaatgggggaagagcttgtgggggaccagactcccagatccagaggtgcaacactgacatgtgtcctgtggatggaagttggggaagctggcatagttggagccagtgctctgcctcctgtggaggaggtgaaaagactcggaagcggctgtgcgaccatcctgtgccagttaaaggtggccgtccctgtcccggagacactactcaggtgaccaggtgcaatgtacaagcatgtccaggtgggccccagcgagccagaggaagtgttattggaaatattaatgatgttgaatttggaattgctttccttaatgccacaataactgatagccctaactctgatactagaataatacgtgccaaaattaccaatgtacctcgtagtcttggttcagcaatgagaaagatagtttctattctaaatcccatttattggacaacagcaaaggaaataggagaagcagtcaatggctttaccctcaccaatgcagtcttcaaaagagaaactcaagtggaatttgcaactggagaaatcttgcagatgagtcatattgcccggggcttggattccgatggttctttgctgctagatatcgttgtgagtggctatgtcctacagcttcagtcacctgctgaagtcactgtaaaggattacacagaggactacattcaaacaggtcctgggcagctgtacgcctactcaacccggctgttcaccattgatggcatcagcatcccatacacatggaaccacaccgttttctatgatcaggcacagggaagaatgcctttcttggttgaaacacttcatgcatcctctgtggaatctgactataaccagatagaagagacactgggttttaaaattcatgcttcaatatccaaaggagatcgcagtaatcagtgcccctccgggtttaccttagactcagttggacctttttgtgctgatgaggatgaatgtgcagcagggaatccctgctcccatagctgccacaatgccatggggacttactactgctcctgccctaaaggcctcaccatagctgcagatggaagaacttgtcaagatattgatgagtgtgctttgggtaggcatacctgccacgctggtcaggactgtgacaatacgattggatcttatcgctgtgtggtccgttgtggaagtggctttcgaagaacctctgatgggctgagttgtcaagatattaatgaatgtcaagaatccagcccctgtcaccagcgctgtttcaatgccataggaagtttccattgtggatgtgaacctgggtatcagctcaaaggcagaaaatgcatggatgtgaacgagtgtagacaaaatgtatgcagaccagatcagcactgtaagaacacccgtggtggctataagtgcattgatctttgtccaaatggaatgaccaaggcagaaaatggaacctgtattgatattgatgaatgtaaagatgggacccatcagtgcagatataaccagatatgtgagaatacaagaggcagctatcgttgtgtatgcccaagaggttatcggtctcaaggagttggaagaccctgcatggacattaatgaatgtgaacaagtgcctaaaccttgtgcacatcagtgctccaacacccccggcagcttcaagtgtatctgtccaccaggacaacatttattaggggacgggaaatcttgcgctggattggagaggctgccaaattatggcactcaatacagtagctataaccttgcacggttctcccctgtgagaaacaactatcaacctcaacagcattacagacagtactcacatctctacagctcctactcagagtatagaaacagcagaacatctctctccaggactagaaggactattaggaaaacttgccctgaaggctctgaggcaagccatgacacatgtgtagatattgatgaatgtgaaaatacagatgcctgccagcatgagtgtaagaatacctttggaagttatcagtgcatctgcccacctggctatcaactcacacacaatggaaagacatgccaagatatcgatgaatgtctggagcagaatgtgcactgtggacccaatcgcatgtgcttcaacatgagaggaagctaccagtgcatcgatacaccctgtccacccaactaccaacgggatcctgtttcagggttctgcctcaagaactgtccacccaatgatttggaatgtgccttgagcccatatgccttggaatacaaactcgtctccctcccatttggaatagccaccaatcaagatttaatccggctggttgcatacacacaggatggagtgatgcatcccaggacaactttcctcatggtagatgaggaacagactgttccttttgccttgagggatgaaaacctgaaaggagtggtgtatacaacacgaccactacgagaagcagagacctaccgcatgagggtccgagcctcatcctacagtgccaatgggaccattgaatatcagaccacattcatagtttatatagctgtgtccgcctatccatactaaggaactctccaaagcctattccacatatttaaaccgcattaatcatggcaatcaagcccccttccagattactgtctcttgaacagttgcaatcttggcagcttgaaaatggtgctacactctgttttgtgtgccttccttggtacttctgaggtattttcatgatcccaccatggtcatatcttgaagtatggtctagaaaagtcccttattattttatttattacactggagcagttacttcccaaagattattctgaacatctaacaggacatatcagtgatggtttacagtagtgtagtacctaagatcattttcctgaaagccaaaccaaacaacgaaaaacaagaacaactaattcagaatcaaatagagtttttgagcatttgactatttttagaatcataaaattagttactaagtattttgatcaaagcttataaaataacttacggagatttttgtaagtattgatacattataataggacttgcctattttcatttttaagaagaaaaacaccactcattttataaaatatagtacagctactataaggcttgtttgatcccaaatggtgcttatcttgattgaacattcagaacaaggatattattttcagtgattttgtgagatcagctgaaccacttatgataataataataaaaaagactgctttgccctcacgtcagttgtacatggcatggaactttaaaaattttaatataaactttcatccagttagcttcataacttttacgttccagaattttgtttattttcctgtcaatgaaagcaatttttaaagataccagtgggacaggtttggttttttaaaaatctcatgtgttcaaattaacataaatattacacgtcaatacactgtacatggtggtaatagactctaagcaattgccaagatgtattctatttttatgaagtgtatatatattaccttagtgtgcattttctatataatatcttgatggactcttttataaaattattttataaaaaacaatgttacactaaaatcagcctaaataaattttcacaactttttttcat

SEQ ID NO: 30874 - DNA, 2486 bp, Homo Sapiens; identical to SEQ ID NO: 26573

SEQ ID NO: 30875 - DNA, 3152 bp, Homo Sapiens
gccatgaacttccaggcgggcggggggcagagcccgcagcagcagcagcagctggccggcgggcccccccagcagttcgcgctctccaactccgcggccatccgggccgagatccagcgcttcgagtccgtgcatcccaatatctacgccatctacgacctgatcgagcgcatcgaggatttggcgctgcagaaccagatccgggagcacgtcatctccatcgaggactcgtttgtgaacagccaggagtggacgctgagccgctccgtaccggagcttaaagtgggcatagtggggaacctgtctagcgggaagtcagccctggtgcaccgctatctgacggggacctatgtccaggaggagtcccctgaaggggggcggtttaagaaggagattgtggtggatggccagagttacctgctgctgatccgagatgaaggaggcccccctgagctccagtttgctgcctgggtggatgcagtggtgtttgtgttcagcctggaggatgaaatcagtttccagacggtgtacaactacttcctgcgtctctgcagcttccgcaacgccagcgaggtgcccatggtgcttgtgggcacgcaggatgccatcagcgctgcgaatccccgggttatcgacgacagcagagcccgcaagctctccacagatctgaagcggtgcacctactatgagacgtgcgcgacctacgggctcaatgtggagcgtgtcttccaggacgtggcccagaaggtagtggccttgcgaaagaagcagcaactggccatcgggccctgcaagtcactgcccaactcgcccagccactcggccgtgtccgccgcctccatcccggccgtgcacatcaaccaggccacgaatggcggcggcagcgccttcagcgactactcgtcctcagtcccctccacccccagcatcagccagcgggagctgcgcatcgagaccatcgctgcctcctccacccccacacccatccgaaagcagtccaagcggcgctccaacatcttcacgtctcggaagggtgctgacctggaccgggagaagaaggctgccgagtgcaaggtggacagcatcgggagcggccgcgccatccccatcaagcaggggatcctgctaaagcggagcggcaagtccctgaacaaggagtggaagaagaagtatgtgacgctctgtgacaacgggctgctcacctatcaccccagcctgcatgattacatgcagaacatccacggcaaggagattgacctgctgcggacaacggtgaaagtgccagggaagcgcctgccccgagccacacctgccacagccccgggcaccagcccccgtgccaacgggctgtccgtggagcggagtaacacacagctgggtgggggcacaggtgccccccactcggccagcagcgcatccctgcactctgagcgccccctcagcagctcggcctgggctggcccgcgccctgaggggctgcaccagcgctcctgctccgtttccagcgccgaccagtggagtgaggccaccacttccctgcccccaggcatgcagcaccctgccagtggcccagctgaggtactcagttccagccccaagctggatcctcccccatctccccactccaaccggaagaagcaccggaggaaaaagagcaccgggaccccccgaccagacggccccagcagtgctactgaagaggcagaggagtcgtttgaatttgtggtggtgtccctcactgggcagacgtggcacttcgaggcttcaacggcggaggagcgggagctgtgggttcagagtgtgcaggcccagatccttgccagcctgcaaggctgccgcagtgccaaggacaagactcgactggggaaccagaacgcagctctggctgtgcaggccgtccgcaccgtccgcggcaacagcttttgtatcgactgcgatgcacccaatccagactgggccagcctgaacctgggtgccctgatgtgcattgagtgctcaggcatccaccgacacctgggggctcacctgtcccgggtgcgctcccttgacctcgatgactggccgcctgagctgctggctgtcatgactgccatgggcaatgccctcgccaacagcgtctgggagggggccttgggtggctactccaagccagggcctgatgcctgcagagaggagaaggaacgctggatacgggccaagtatgaacagaagctcttcctggccccactgccaagctcagatgtgccactggggcagcagctgctccgggccgtggtggaagatgacctgcggctgttggtgatgctcctggcacatggctccaaagaggaggtgaatgagacctatggggacggggacgggcggacggctctacatctctccagtgccatggccaacgttgtcttcacgcagctgctcatctggtacggggtggacgtgaggagccgggacgcccggggcctgactccactggcatatgctcgccgggccggcagccaggagtgtgcagacatcttgatccagcatggctgccctggggagggctgtggcttagcgcctacccccaacagagagcctgccaatggcaccaacccctctgctgagctgcaccgtagtcctagcctcctataaggcccaggaagagggcagaggggccagaaggactccatggcccaaagaccctcctccctgcaggcactgtgggaacagacacagagatggagaagcagggacatgctgagaggacgaagccaaggaaattagggaggagagtcaaagggatcaaggagagttggggatttgagctgcagcagagagggatgagggatttagccctctgccctaaggtgccattgaaaagggacaggacccttcggaggtgcctgtgaggagaggggagcaggacctctccctcctccagatccctgcctcctagtgccagcccctcacacgccttcatcctgaaacaggaagaggacggcaccaagttgggggtgctggatgaaagagacgaggggtgatctgtgagtcccatgtaaactttgtacattggaatatttatgtttgtgtacatatttgatgtgtgtgtgtatgatgagccaataaaccagactgtgtgcgtggcaaaaaaaaaaaaaaaaaaaaaaaaaaaa

SEQ ID NO: 30876 - DNA, 3237 bp, Homo Sapiens
gcggccgccttcctgctggggatcctgtttgccctcgtctgccggagcccgcgcgcccagccgcccgacttcgccgccgcctggagccggctggccgcgacctcagccgcccgccgcccgccggggagtcctgtgtatggaaactcacatgagtcagctcagtctagaagggtagtaatttctcataatatggataaagctctgaaagaagtgttcgactacagttatagagattacattctgtcctggtatggaaacctcagcagagatgagggacaactttaccatctgctcttggaagacttttgggaaattgccagacagctgcaccacagactgagtcacgtggatgtggttaaagttgtctgcaatgatgttgtgaggactttactcactcatttctgtgacctgaaagctgccaatgccagacatgaagaacagccaagaccttttgtgttgcacgcatgcttgaggaactcagatgatgaagtaagatttctacaaacgtgttctcgggttctggtgttttgtctcctcccctcaaaggatgtgcagtctctcagcttacgtataatgcttgcagaaattctcacaacaaaagtcttgaagccggtagtggagttactgagtaatccagattacattaaccaaatgctgcttgcccagctggcgtacagagagcaaatgaatgagcatcacaagagagcctacacctatgccccctcttacgaggacttcatcaagctcattaacagcaactctgatgtggagttcttgaagcaactaaggtatcaaattgtagtggaaataatccaggcgactacaattagcagctttccccaactgaagaggcacaaaggtaaagaaactgcggcaatgaaagctgatctcctgagggccaggaacatgaagaggtacatcaaccaactgactgtggcaaagaagcagtgtgagaagagaatccgaatcctgggaggccctgcctatgaccagcaagaggatggggccctggatgagggggaagggcctcaaagccagaagattcttcagtttgaagatatcttggccaatacgttctaccgagagcactttggaatgtacatggaaaggatggacaaaagagctctgattagtttttgggaatctgtggaacatttaaagaatgctaacaagaatgaaattccacaattagttggtgaaatttatcagaatttctttgtggagagcaaagaaatatctgtggaaaaatcactttacaaagaaattcagcagtgtcttgtaggaaataaaggtattgaagtattctacaaaatccaggaagatgtttatgagaccctaaaggataggtattacccttcatttattgtcagtgacctgtatgagaaattgttgataaaagaggaagaaaaacatgcctcacagatgatttccaacaaggatgagatgggcccaagagatgaggctggtgaggaagccgtggatgatggtaccaatcagatcaatgaacaagccagttttgctgtaaacaaactgcgagaactaaatgagaaacttgaatataaaaggcaagctctaaattctattcaaaatgcaccaaaacctgacaagaagattgtttccaagttgaaggatgaaataatcctaatagagaaagaacgcacagaccttcagctgcacatggcaagaacggattggtggtgtgaaaaccttggcatgtggaaagcctccatcaccagtggagaggttacagaagagaatggtgagcaattgccatgttactttgtcatggtaagcctacaagaagttggaggagttgaaactaagaactggacggtccccagaaggctcagcgagtttcagaatttacaccggaaactcagtgagtgcgtcccttctttaaaaaaagtccagttgccttctcttagcaagctgcctttcaaatctatagatcaaaagtttatggaaaagtcgaagaatcaattaaataagtttttacagaatctgctttcagatgaaagactgtgtcagagtgaagcactttatgccttcttgagcccttctcctgactacctcaaggttatcgacgtgcaggggaaaaaaaattctttttcattatcctcatttttggaaagacttcctcgcgacttcttctcccaccaggaggaggagacagaggaggacagtgacctgtcagattatggtgatgatgtggatgggaggaaagacgccttggctgaaccatgtttcatgttgattggggagatttttgaacttcgaggaatgtttaaatgggtgagaagaacattaattgccctcgttcaggtcacttttggaagaaccatcaacaaacaaatccgggacacagtcagctggattttcagtgagcaaatgttggtttactacatcaatattttccgggatgctttttggccaaatgggaagttggcaccaccgaccacaatcagaagcaaagagcaaagtcaggaaacaaaacagagagcacagcaaaagctgcttgaaaacattccagatatgcttcagagccttgttggacagcaaaatgcccgccacggtataataaaaatattcaatgcactgcaagaaacaagagccaacaagcatctgttatatgcgctgatggaactgctgctaattgaactgtgtcctgagctgagagttcatttagatcaacttaaagctggccaagtttgagactacacaaataaaccaccagaaaaatgtctgtgtaataatagacatgaaacattttcctcttttccacagagggcttaactgagaaccgtattgatttttattttagttacctccctctagttttatgtgaaattagtagaatcagggaggacgggacttatgctgtggtaggcaacagaaaaaaacttctattgattttaatttaatatgaatactttaaagatcaacataccgattgaaatacaaatgttaatatgtgagaacctaggaagtattttaaatatttatgaaaatattttgttttaaaatgaactatgaatattgtacagttaatttcctcactgaggactgtgaacattcttatattatttcatgtatattgaagaacattgttatgcaatgctttgtgtaaagttattgtgaagattttattgtctttatttttaccaaagatttcccatagtttgagcattcaaagcaataaaatataaaaatgaaaaaaaaaaaaaaaaaaaaaaaaaa

SEQ ID NO: 30877 - DNA, 2101 bp, Homo Sapiens
acgaacaggccaataaggagggagcagtgcggggtttaaatctgaggctaggctggctcttctcggcgtgctgcggcggaacggctgttggtttctgctgggtgtaggtccttggctggtcgggcctccggtgttctgcttctccccgctgagctgctgcctggtgaagaggaagccatggcgctccgagtcaccaggaactcgaaaattaatgctgaaaataaggcgaagatcaacatggcaggcgcaaagcgcgttcctacggcccctgctgcaacctccaagcccggactgaggccaagaacagctcttggggacattggtaacaaagtcagtgaacaactgcaggccaaaatgcctatgaagaaggaagcaaaaccttcagctactggaaaagtcattgataaaaaactaccaaaacctcttgaaaaggtacctatgctggtgccagtgccagtgtctgagccagtgccagagccagaacctgagccagaacctgagcctgttaaagaagaaaaactttcgcctgagcctattttggttgatactgcctctccaagcccaatggaaacatctggatgtgcccctgcagaagaagacctgtgtcaggctttctctgatgtaattcttgcagtaaatgatgtggatgcagaagatggagctgatccaaacctttgtagtgaatatgtgaaagatatttatgcttatctgagacaacttgaggaagagcaagcagtcagaccaaaatacctactgggtcgggaagtcactggaaacatgagagccatcctaattgactggctagtacaggttcaaatgaaattcaggttgttgcaggagaccatgtacatgactgtctccattattgatcggttcatgcagaataattgtgtgcccaagaagatgctgcagctggttggtgtcactgccatgtttattgcaagcaaatatgaagaaatgtaccctccagaaattggtgactttgcttttgtgactgacaacacttatactaagcaccaaatcagacagatggaaatgaagattctaagagctttaaactttggtctgggtcggcctctacctttgcacttccttcggagagcatctaagattggagaggttgatgtcgagcaacatactttggccaaatacctgatggaactaactatgttggactatgacatggtgcactttcctccttctcaaattgcagcaggagctttttgcttagcactgaaaattctggataatggtgaatggacaccaactctacaacattacctgtcatatactgaagaatctcttcttccagttatgcagcacctggctaagaatgtagtcatggtaaatcaaggacttacaaagcacatgactgtcaagaacaagtatgccacatcgaagcatgctaagatcagcactctaccacagctgaattctgcactagttcaagatttagccaaggctgtggcaaaggtgtaacttgtaaacttgagttggagtactatatttacaaataaaattggcaccatgtgccatctgtacatattactgttgcatttacttttaataaagcttgtggccccttttacttttttatagcttaactaatttgaatgtggttacttcctactgtagggtagcggaaaagttgtcttaaaaggtatggtggggatatttttaaaaactccttttggtttacctggggatccaattgatgtatatgtttatatactgggttcttgttttatatacctggcttttactttattaatatgagttactgaaggtgatggaggtatttgaaaattttacttccataggacatactgcatgtaagccaagtcatggagaatctgctgcatagctctattttaaagtaaaagtctaccaccgaatccctagtccccctgttttctgtttcttcttgtgattgctgccataattctaagttatttacttttaccactatttaagttatcaactttagctagtatcttcaaactttcactttgaaaaatgagaattttatattctaagccagttttcattttggttttgtgttttggttaataaaacaatactcaaatacaaaaaaaaaaaa

SEQ ID NO: 30878 - DNA, 9161 bp, Homo Sapiens
ctgaaaactggagagtgtgagagcgggaggagcccccgaccacacaaacccagcctggggaggaacctactagtggctgcaccctcttttttaatagcaccaattgtgtttcccaagatgatgtagagaatttcagtgctgtgtaccacgtcggaggcagaaattcctctgctgtcccaggagcaggcagggcagtttttatctggaaaagctaaaggtctcctcttttgtttgtgtttttgtgcctgcacaggacaaaagatccttcatcaccgaagtgacgttttagaaacagtggtcctgatcaacccttctgatgaagcagtcagcaccgaggtgcgcttaatgatcactgatgctgcccgacacaagctgctcgtgctgaccgggcagtgctttgaaaataccggagagctcattctccagtccggctctttctccttccagaacttcatagagattttcaccgatcaagagatcggggagttactaagcaccacccatcctgccaacaaagccagcttaaccctgttctgtcctgaagaaggggactggaagaactccaatcttgacagacacaatctccaagacttcatcaatattaaactcaattcagcttctatcttgccagaaatggaaggactttctgagtttaccgagtatctctcagaatcagtggaagtcccatctccctttgacatcttggaacctcccacatcgggtggatttctgaagctctccaagccctgctgttatatttttccaggagggaggggcgattctgccttgtttgcagtgaatggtttcaatatgctcatcaatggcggatcagagagaaaatcctgcttctggaagctcatccgacacttagaccgagtggactccatcctgctcacccacattggggatgacaatttgcctggaataaacagcatgttacagcggaaaattgcagagctcgaggaagaacagtcccagggctccaccacaaatagtgactggatgaaaaacctcatctcccctgacttaggagttgtatttctcaatgtacctgaaaatctcaaaaatccagagccaaacatcaagatgaagagaagcatagaagaagcctgcttcactctccagtacctaaacaaattgtccatgaaaccagaacctctgtttagaagtgtaggcaatactattgatcctgtcattcttttccaaaaaatgggagtaggtaaacttgagatgtatgtgcttaatccagtcaagagcagcaaggaaatgcagtattttatgcagcagtggactggtaccaacaaagacaaggctgaattcattctgcctaatggtcaagaagtagatctcccgatttcctacttaacttcagtctcatctttgattgtgtggcatccagcaaaccctgcggagaaaatcatccgagtcctgtttcctgggaacagcacccagtacaacatcctggaagggttggaaaagctcaaacatctagactttctgaagcagccactggccacccaaaaggatctcactggccaggtgcccactcctgtggtgaaacaaacaaaactgaaacagagggctgatagccgagaaagtctgaagccagccgcaaaaccacttcctagcaaatccgtgcgcaaggagtcaaaagaagaaacccctgaggtcacaaaagtgaatcacgtggaaaagccacccaaagttgaaagcaaagaaaaggtaatggtgaaaaaagacaagccagtaaaaacagagaccaaaccttcagtgactgaaaaggaggttcccagcaaagaagagccatctccagtgaaagccgaggtggctgagaagcaagccacagatgtcaaacccaaagctgccaaggagaagacggtgaaaaaggaaacaaaggtaaagcctgaagacaagaaagaggagaaagaaaagccaaagaaagaagtggctaaaaaggaggacaaaacacctatcaagaaggaggaaaaaccaaaaaaggaagaggtgaaaaaagaagtcaaaaaagagatcaagaaagaagagaaaaaagaacccaagaaagaggttaagaaagaaacaccgccaaaggaagtcaagaaggaagttaagaaggaagagaagaaggaagtgaaaaaggaagaaaaggaacccaaaaaagaaattaagaagctccctaaagacgcaaagaaatcatctactcctctgtctgaagcaaaaaaaccagctgctttaaaaccaaaagtacccaagaaggaagagtctgtcaagaaagattctgttgctgccggaaagccaaaggagaaggggaaaataaaagtcattaagaaggaaggcaaggccgcagaggctgtcgctgcagctgtcggcactggagccaccacagcagctgtcatggcggcagctggaatagcagccattggccctgccaaagaactcgaagctgagaggtcccttatgtcatctcctgaggatctaaccaaggactttgaagagttaaaggctgaagaggtcgatgtaacaaaggacatcaagcctcagctggagctaatcgaagacgaagagaaactgaaggaaactgagccagtcgaagcctacgtcatccagaaggagagagaagtcaccaaaggtcctgccgagtcccctgatgagggaatcactaccactgaaggggagggcgaatgtgaacagacacctgaggagctggagcccgtcgagaagcagggagtagacgacattgaaaaatttgaagatgaaggagccggttttgaagaatcttcagagactggagactatgaagagaaggcagaaactgaggaggctgaggagccagaagaggatggggaggaacacgtatgtgtgagcgcctccaagcacagccccactgaggatgaggaaagtgccaaggcggaggctgatgcatacatcagggagaagagggagtctgtggccagtggggatgaccgagccgaagaagacatggatgaggccattgagaaaggagaggctgaacaatctgaagaggaggctgatgaggaggacaaagctgaagatgccagagaggaggaatatgagccggaaaaaatggaagctgaagactatgtgatggctgtggtcgacaaggctgcagaggctggtggtgccgaggagcagtatggattcctcaccacaccaaccaagcaactaggagcccagtctcctggccgagaacctgcatcttcaattcatgatgagactttacctggaggctcagagagcgaggccaccgcttctgatgaggagaatcgagaagaccagcctgaggaattcactgccacctctggctacactcagtctactattgagatatccagtgagcccacccccatggatgagatgtctacccctcgagacgtgatgagtgatgagaccaacaatgaagagacggagtccccttctcaggaattcgtaaatatcaccaaatatgaatcttcattgtattctcaggaatactctaaacctgctgatgttacaccgctcaacggattttctgaaggatcaaaaacagatgccactgatggcaaggattacaatgcttcagcctctaccatatcaccaccctcttccatggaggaagacaaattcagcagatctgctttacgtgatgcttactgctctgaagtgaaagccagcaccactttggacatcaaagatagcatctcagctgtttcaagtgaaaaggtcagcccatcgaagagcccgtccctgagtccatctccaccatcacccttagaaaagacccccctgggtgaacgtagtgtgaacttctctctgacgcccaatgagattaaagtctctgcagaggcagaagtagccccggtgtctcctgaggtgacccaagaagtagttgaagaacattgtgctagtcctgaggacaagactctggaagtggtgtcaccatctcagtccgtgactggcagtgctggtcacacaccttactatcaatctcctactgacgagaaatccagtcatctccctacagaagtcattgaaaaaccaccagcagttccagtgagttttgaattcagtgatgccaaagatgagaatgaaagggcttcagtaagccccatggatgagcccgtgcctgactcagagtctcctattgaaaaagttttgtctcctttacgcagcccgcccctcattggatccgagtctgcttatgaaagttttctaagtgctgatgacaaggcttctggcagaggtgccgaaagtccttttgaagaaaagagtggaaaacaaggctctccagaccaagtaagtccagtttctgaaatgacttctactagtctttaccaagacaaacaggaagggaaaagcacagactttgcaccaataaaagaagactttggccaagaaaagaaaactgatgatgttgaagccatgagttctcaaccagcactggctctggatgaaaggaaattaggagatgtttctcccacacaaatagatgtcagtcagtttggatcttttaaagaagacactaagatgtccatttctgaaggtactgtctcagacaagtcagctactcctgttgatgagggcgtagcagaagacacgtactctcatatggagggtgtggcctcagtgtccacagcctcagtggctacgagctcatttccagagccaacaacagatgatgtgtctccatctctgcatgctgaggttggctccccacattccacagaagtagatgactccctttcagtgtctgttgtgcaaacacctaccacattccaggaaacagaaatgtctccatctaaagaagaatgcccaagaccgatgtcaatttctccaccagatttctcccctaaaactgcaaagtccaggacacccgttcaagatcacagatctgaacagtcctcaatgtctattgaatttggccaagaatctcctgagcaatcccttgctatggacttcagtcgacagtctccagatcaccctacagtgggtgcaggcgtgcttcacatcactgaaaatgggccaactgaagtggactacagtccttctgacatgcaggactccagtttatcacataagataccacctatggaggagccgtcctacacccaagataatgatctttctgagctcatctcagtatctcaggtagaggcctccccgtccacctcttctgctcataccccttctcagatcgcttctcctctccaagaagatactctatccgatgttgctcctcccagagatatgtccttatatgcctcactcacctctgaaaaagtgcaaagtctggaaggagagaagctctctccaaaatctgatatctctccactcaccccacgagagtcctctcctttatattcacctactttttcagattctacctctgcagtcaaagagaaaacagcaacttgccacagttcctcttctccaccaatagatgcagcatccgcagagccctatggcttccgtgcctcagtgttattcgatacaatgcaacaccatctagccttgaatagagatttgtccacacctggcctggagaaggacagtggagggaagacacctggtgactttagctatgcctatcaaaagcctgaggaaacaaccaggtccccagatgaagaagattatgactatgagtcttatgagaagaccacccggacctcagatgtgggtggctattactatgagaagatagagagaaccacaaaatctccaagtgacagtggctactcctatgagaccattgggaaaactaccaagacccctgaagatggtgactattcctatgaaattattgagaagaccacacggacccctgaagagggtgggtactcatatgacataagtgaaaagaccaccagcccccccgaagtgagtggttacagctatgaaaagactgagaggtctagaaggcttctggatgacatcagcaatggctatgatgactctgaggatggtggccacacacttggggaccccagctactcttatgaaaccactgagaaaattaccagtttccctgagtctgaaggttattcctatgagacatctacaaagacaacacgaacccctgatacttccacatactgttacgagactgcagagaaaatcactagaacccctcaggcatccacatattcctacgagacttcagacctatgctacactgcagaaaagaagtccccctcagaagcccgtcaggatgtcgatttatgcctcgtgtcctcttgtgaatacaagcaccccaagacagagctttcaccctctttcattaatcccaatcctcttgagtggtttgccagtgaagaacccactgaagaatctgaaaagcccctcactcaatcagggggagccccaccgcctccaggaggaaagcaacagggccgacagtgtgatgaaacccctcccacctcagtcagcgagtcagccccatcccagaccgactctgatgttcccccggagactgaagagtgcccctccatcacggccgatgccaatatcgactctgaagacgagtcggaaaccatccccacagacaaaactgtcacgtacaaacacatggacccacctccagctcccgtgcaagaccgcagcccttcgccacgccaccctgatgtgtccatggtggacccagaggccttggccattgagcagaacctgggcaaagctctaaagaaagatctgaaagagaagaccaaaaccaaaaagccaggtacaaagaccaagtcatcttcacctgtcaaaaagagtgatgggaagtctaagcccttggcagcttcaccaaaaccagcgggcttgaaagaatcctcggataaagtgtccagggtggcttctcctaagaagaaagaatctgtggaaaaggcagcaaaacccaccaccactcctgaggtcaaagctgcacgtggggaagagaaagacaaggagaccaagaatgctgccaatgcctctgcatccaagtcggccaagaccgccactgcaggaccaggaactaccaagacgaccaagtcatctgctgtgcccccaggcctccctgtgtatttggacctgtgctacattcctaaccacagcaatagtaagaatgttgatgtggaatttttcaagagagtgcggtcttcctactacgtggtgagtgggaatgaccctgctgctgaggagcccagccgggctgtcctggacgctttgttggaaggaaaggctcagtggggcagcaacatgcaggtgacactgatcccaactcatgactcagaagtgatgagggaatggtaccaggagacccatgagaaacagcaagatctcaacatcatggttttagcaagcagcagcacagtggttatgcaagatgaatccttccctgcatgcaagattgaactgtaaaaaccaaggccagccacaccacaggatctgaactttgtttccagaaattcttcaatttgaaatcaccttttctaaaaagtcaattcatctagttaagtcgctgaacaattacctgccaaatgctatactgtgtcatggtgatgcaagtcactaaatttctcagtttttgctgattgctaagggaaataacagtatttccacaatagggttcaaattcctgcaaaattacctaccccagttcatctctgctgaacatttggaaaccatgcactagccaacccaactgacttctgctaggtagaggcatttgtcttagagagagagagagcgcgggagagagtgagagagagtgagagcacaaagataacgcaggagagagagagagaaagaatgagaaagaaaaggaatgcaagagaaggagatgtaatgacagagagttctggtgagatacccagagagaaaaagagagagcagggtggggtaaggaggagaaaataaaccaacaattaggtctgcattttctcaggcagtaggcattctttagtctacataggcaaagttttccatttttgtcagtctgagtcatcaaaaagagtcttaattttctaaaacaagttggctagaagaaagtaaaaagaacaacacttgttatgagggcatgtgatattttcacatcttaattaagctccttcagtttgaaggctgcacactgacataatgtagtgagtgtagactggccatgcaagtggtttgggccccattcagaactctcagactctaaacacacaagtagattgatctaaggcatgctcccagcatttgtccacccacttagtccactctgagtcgattaacctgcatgcagcaacacccaagtccaccccaattaactgaagcaaataccaaagcagttgggagtacatatggtagacaatttgccttaggaagtgacttgaatgtacaaagatacttgatgcacttattttttaatgtgagacagcaagtttataaaacatccatataggattatagatacttaaaggaacacgtgggtgagcgtgtgtgggggtactagaagctgatctgattggtccaacagtttgatgctgagtcatgcgtgttgaatcccacttcagtgcacctgtggcctctcagtcaaacaagttgtgcctttcacagcttctttactactgcaagttcaagactgaaatggcttctatgatcagaactgggaaaacagtgaatcttatggtggaagaggttctcagcaagtgtacagtatttaccttcctttgtcttacattggctttttaaattttccattaatttcaacataattatgggaacaagtgtacagaagaattttttttttaagatatgtgagaacttttcatagatgaactttttaacaaatgttttcatttacaggaaattgcaaagaaaattctcaagtgatagtctttttttttaagtgtttcgtaagacaaaaattgaataatgttttttgaagttctggcaagattgaagtctgatattgcagtaatgatatttattaaaaacccataactaccaggaataatgatacctcccaccccttgattcccataacataaaagtgctacttgagagtgggggagaatggcatggtaggctacttttcagggccttgacaagtacatcacccagtggtatcctacatacttctttcaagatcttcaaccatgaggtaaaagagccaagttcaaagaaccctagcacaaatttgctttgggattttcttttctgga

SEQ ID NO: 30879 - DNA, 2766 bp, Homo Sapiens
ggaagtgaggggagggagaggccgagagaaatttcggtactgcgcatgaaccgagcgtgacgttgaggtttgaaataaccggcaaagagtaaaggctgaaactagcttcctgaaagcttcgtagggcccgagccctgtgagcccaggttctgcgcccactaggaggtgtcatgctgactgctttttttaaagccctagaatcttggcttcggcgtttggggtaagctccgttctcgttctcaagcgcgtttccgcgaactctcgcgggattgacgggccgtctcgagagccggcatctcctaggagctagtcctggtcctcggctaggcggcttggggtcgcggcgtaactggggagccagcctgacgccggcggaccccgcctgtgatcctggcaacgatggatgatgacttgatgttggcactgcggcttcaggaggagtggaacttgcaggaggcggagcgcgatcatgcccaggagtccctgtcgctagtggacgcgtcgtgggagttggtggaccccacaccggacttgcaggcactgtttgttcagtttaacgaccaattcttctggggccagctggaggccgtcgaggtgaagtggagcgtgcgaatgaccctgtgtgctgggatatgcagctatgaagggaagggtggaatgtgttccatccgtctcagcgaaccccttttgaagttgaggccaagaaaggatcttgtagagaccctcctgcatgaaatgatacatgcctatttatttgtcactaataacgacaaagaccgagaagggcatggtccagaattttgtaaacatatgcatcgcatcaacagcctgactggagccaatataacggtataccatacttttcacgatgaggtggatgagtatcggcgacactggtggcgctgcaatgggccgtgccagcacaggccaccgtattacggctatgtcaaacgagctactaacagggaaccctctgctcatgactattggtgggctgagcaccagaaaacctgtggaggcacttacataaaaatcaaggaaccagagaattactcaaaaaaaggcaaaggaaaggcaaaactaggaaaggaaccagtattggccgcagagaataaagataaacccaacagaggtgaggcccagctagtaatcccttttagtgggaaaggatatgttctaggagaaacaagcaatttaccttcacctgggaaactgatcacttcacatgccattaataaaacccaagatcttttaaatcaaaaccattcagcaaatgctgtaagacttaattctaaaatcaaggtgaaatttgaacagaatggttcaagtaaaaattctcatctggtctcccctgctgttagtaacagtcaccaaaatgttctaagcaactactttcctagagtatcatttgccaaccaaaaggctttcagaggtgtgaatggatctccaaggataagtgtaacagttggcaacatccctaaaaactcagtctcttctagttctcagagaagggtttcatcttctaagatatccctaagaaattcttcaaaagtaacggaatcagcatctgtgatgccatcccaggatgtgagtgggtctgaagatacattcccaaataaacgacctaggctagaagataagactgtttttgacaatttttttatcaagaaagagcaaataaaaagcagtggtaatgatccaaagtatagtacaaccacagctcagaattccagcagttcatccagtcagagcaaaatggttaattgcccagtttgtcagaatgaagttctggagtctcagattaatgagcacttggactggtgccttgaaggtgacagcatcaaagtcaaaagcgaagaaagtctttgaaaaaggtttcaaagtctcaagtaccacctgtattatctcactaatgtgctatgtcagccagtcaggaagttctggttaatactaagatttgtaggttataatctagttcacataaccaatagaaagtgtcctattttatatatacgcatataagattgtaattttaagatgttttgtgtctcagggtgctacattcactcttgccttaggtatactgtaacccaggttctgcctgtcgtgtataatttttagatacttttgttctttcttgctcttaaggattttaaaaacctgttaatctttttatttgtatactttcctaaaaatattcatatggggaatcctgtcaggtgtttggttatattgactatttattaatagtattagaactcattccctgaactgatgtaaatcttcatagtgtcagacatactgaccaaaaccacaatctagactacaaagtatattgttttagagtactcaaattgtattatttattaatttttttgtttgcaaaatcttaacaggaactgtattttctatattttaaagaattttatttgtcccacttttactaaacagtggcagcagattttaagttaaagaatatggaatatagtaaaataagtaaatttcttttggaatatttttagtaacaaatagccactataattctgtaggccaaattttatattgagtttagctgttttctcaaaatttagcagagtggttaaaattctgtgctgataagtaactgatacatataacataaacataacaaagttgcctagttgatgtaacagtggaaagttatctggaaatagtattttgaactttaagccaagtttaaaacattataataaaaggaataccatttgtacaaaaaaaaaaaaaaaa

SEQ ID NO: 30880 - DNA, 4563 bp, Homo Sapiens; identical to SEQ ID NO: 23649

SEQ ID NO: 30881 - DNA, 4127 bp, Homo Sapiens
acagcccgcatcccgccggggaagcgagcccagtccagcgctgcccgtccagtcctcgcccaagatttaaagcccgcaagttttgttcttgagaccagcgactttagctccgatgcgggaaggaaagccgacctccgatttggacatttaaagagctgggcttgaacttcgtgagtttcgctctaaactgcccttgaaatgaagctggacttggaggtggcatggaatattcacatgggagagccgcatgaggccgcccaccacgcttcctgaaggatgcccgtgtggaagaattttgacgtgccagtgtcctcgttctacagggtgttccattcttccgcaatctcagaaaaatgggactaaaagaaactattttgtaaaataagaagacttccatttttaatgaccaacatgtattaagatggacacctactctacgaaacacgaagttctatggtctcgaagaagcccgtgcctgtttaaaactgatcctaactaaaaacagacttgagtggatatgagaatgttggttagtggcagaagagtcaaaaaatggcagttaattattcagttatttgctacttgttttttagcgagcctcatgtttttttgggaaccaatcgataatcacattgtgagccatatgaagtcatattcttacagatacctcataaatagctatgactttgtgaatgataccctgtctcttaagcacacctcagcggggcctcgctaccaatacttgattaaccacaaggaaaagtgtcaagctcaagacgtcctccttttactgtttgtaaaaactgctcctgaaaactatgatcgacgttccggaattagaaggacgtggggcaatgaaaattatgttcggtctcagctgaatgccaacatcaaaactctgtttgccttaggaactcctaatccactggagggagaagaactacaaagaaaactggcttgggaagatcaaaggtacaatgatataattcagcaagactttgttgattctttctacaatcttactctgaaattacttatgcagttcagttgggcaaatacctattgtccacatgccaaatttcttatgactgctgatgatgacatatttattcacatgccaaatctgattgagtaccttcaaagtttagaacaaattggtgttcaagacttttggattggtcgtgttcatcgtggtgcccctcccattagagataaaagcagcaaatactacgtgtcctatgaaatgtaccagtggccagcttaccctgactacacagccggagctgcctatgtaatctccggtgatgtagctgccaaagtctatgaggcatcacagacactaaattcaagtctttacatagacgatgtgttcatgggcctctgtgccaataaaatagggatagtaccgcaggaccatgtgtttttttctggagagggtaaaactccttatcatccctgcatctatgaaaaaatgatgacatctcatggacacttagaagatctccaggacctttggaagaatgctacagatcctaaagtaaaaaccatttccaaaggtttttttggtcaaatatactgcagattaatgaagataattctcctttgtaaaattagctatgtggacacatacccttgtagggctgcgtttatctaatagtacttgaatgttgtatgttttcactgtcactgagtcaaacctggatgaaaaaaacctttaaatgttcgtctataccctaagtaaaatgaggacgaaagacaaatattttgaaagcctagtccatcagaatgtttctttgattctagaagctgtttaatatcacttatctacttcattgcctaagttcatttcaaagaatttgtatttagaaaaggtttatattattagtgaaaacaaaactaaagggaagttcaagttctcatgtaatgccacatatatacttgaggtgtagagatgttattaagaagttttgatgttagaataattgcttttggaaaataccaaatgaacgtacagtacaacatttcaaggaaatgaatatattgttagaccaggtaagcaagtttatttttgttaaagagcacttggtggaggtagtaggggcagggaaaggtcagcataggagagaaagttcatgaatctggtaaaacagtctcttgttcttaagaggagatgtagaaaaatgtgtacaatgttattataaacagacaaatcacgtcttaccacatccatgtagctactggtgttagagtcattaaaatacctttttttgcatcttttttcaaagtttaatgtgaacttttagaaaagtgattaatgttgccctaatactttatatgtttttaatggatttttttttaagtattagaaaatgacacataacacgggcagctggttgctcatagggtccttctctagggagaaaccattgttaattcaaataagctgattttaatgacgttttcaactggtttttaaatattcaatattggtctgtgtttaagtttgttatttgaatgtaatttacatagaggaatataataatggagagacttcaaatggaaagacagaacattacaagcctaatgtctccataattttataaaatgaaatcttagtgtctaaatccttgtactgattactaaaattaacccactcctccccaacaaggtcttataaaccacagcactttgttccaagttcagagttttaaattgagagcattaaacatcaaagttataatatctaaaacaatttatttttcatcaataactgtcagaggtgatctttattttctaaatatttcaaacttgaaaacagagtaaaaaagtgatagaaaagttgccagtttggggttaaagcatttttaaagctgcatgttccttgtaatcaaagagatgtgtctgagatctaatagagtaagttacatttattttacaaagcaggataaaaatgtggctataatacacactacctcccttcactacagaaagaactaggtggtgtctactgctagggagattatatgaaggccaaaataatgacttcagcaagagtgactgaactcactctaaggcctttgactgcagaggcacctgttagggaaaatcagatgtctcatataataaggtgatgtcggaaacacgcaaaacaaaacgaaaaaagatttctcagtatacacaactgaatgatgatacttacaatttttagcaggtagctttttaatgtttacagaaattttaatttttttctattttgaaatttgaggcttgtttacattgcttagataatttagaatttttaactaatgtcaaaactacagtgtcaaacattctaggttgtagttactttcagagtagatacagggttttagatcattacagtttaagttttctgaccaattaaaaaaacatagagaacaaaagcatatttgaccaagcaacaagcttataattaatttttattagttgattgattaatgatgtattgccttttgcccatatataccctgtgtatctatacttggaagtgtttaaggttgccattggttgaaaacataagtgtctctggccatcaaagtgatcttgtttacagcagtgcttttgtgaaacaattatttatttgctgaaagagctcttctgaactgtgtccttttaatttttgcttagaatagaatggaacaagtttaaatttcaaggaaatatgaaggcacttcctttttttctaagaaggaagttgctagatgattccttcatcacacttacttaaagtactgagaagagtatctgtaaataaaagggttccaaccttttaaaaaagaaggaaaaaactttttggtgctccagtgtagggctatctttttaaaaaatgtcaacaaagggaaaataaactatcagcttggatggtcacttgaatagaagatggttatacacagtgttattgttaaaatttttttaccttttggttggtttgcatcttttttccatattgttaattttataccaaaatgttaaatatttgtattacttgaattttgctcttgtatggcaaaataattagtgagtttaaaaaaaatctatagtttccaataaacaactgaaaaattatcatgaaaaaaaaaaaaaaaaaa

SEQ ID NO: 30882 - DNA, 4009 bp, Homo Sapiens
ccggagggggcggccgcggagcactggttggagcgccgcgccgcgcccgagcctcttgccttcgcgggcggcgccctggccgccggcagccttgtggccggtgccccgatccgccgcgctccggacccgggcaggcggggcgcgcccgctgcgcgcgggatgtggcagcccagacggccctggccccgcgtgccctggcgctgggcgctggcgctgctggccctggttggcgcggggctgtgccacgccggcccgcagcccgggtatcccgcgcggcccagcgccaggaacaagaactggtgcgcctacatcgtgaacaagaatgtgagctgctccgtgctggagggaagtgagagttttattcaggctcagtacaactgtgcctggaaccagatgccctgtccgtcggcgctggtgtatcgagtgaacttcagacctagatatgtcactaggtataagacagtgacacagttggaatggaggtgctgtcctggctttagagggggagattgccaagaaggtcccaaagaccccgtgaagaccctccgccccacgccggctcggcctcgaaatagcttgaagaaagccacagataatgaacccagccaattctcagagcccaggaagactttgtccccaactggtacagcacaaccaagctggggggtagatccaaaagaggggcctcaggaacttcaggaaaagaagatacaggtgctagaggagaaggttcttcgactcacaaggacggttcttgacctccagtcttcccttgctggagtgagtgaaaatctcaaacatgccactcaggatgatgccagtagaacacgggcaccagggctcagcagccagcaccccaagcctgacaccactgttagtggagacacagaaacgggccagagtcctggtgtcttcaacactaaggaatctggcatgaaggacatcaagtctgaattggctgaagtcaaagatactctaaagaacaaaagtgacaagctggaagagctggatggaaaagtgaagggctacgaagggcagctcagacagctccaggaagcagctcagggcccgacggtgaccatgacaaccaacgaactctaccaagcctatgtggacagtaagatcgacgccctgagagaggagctcatggagggcatggacagaaagctggctgacctgaaaaactcatgtgagtacaagctcactggcctccagcagcagtgtgatgactatgggagcagctacctgggagtgatagagctcataggggagaaggaaacaagcctgagaaaagaaataaataacctccgagcccggctacaggagccttcagcccaggcaaattgctgcgacagtgaaaagaatggtgacattggtcaacagatcaagacattggaccagaaaatcgagagagttgctgaagccaccagaatgctgaatggaagactggacaatgagtttgaccgccttatagttccagagccagatgtggattttgatgcaaaatggaatgaactcgatgcaaggatcaatgtgacggagaagaacgctgaagaacattgcttttacattgaggaaacccttcggggcgccattaatggagaggtgggtgacttgaagcagcttgttgatcagaaaatacagtctctggaagaccgtctggggagcgttctcctacagatgaccaataacactggtgcagagctcagtcccccaggggcagcagccctgccaggagtgtcagggtcaggagatgaacgggtcatgatggaattaaaccacctgaaggacggagttcaagttgttgaagacatttgcctgctgaacatccagggaaagcctcatgggatggaaggtgccttgccaaacagggaagaccgcgcagtacgcgacagcctgcaccttttgaaatctctcaacgacacgatgcacaggaagtttcaagaaaccgaacaaaccatccagaaacttcaacaggattttagttttctttattctcaattaaaccacacagaaaatgatgtgactcatcttcaaaaggaaatgagcaattgtagagcaggtgaaaacgctggcatgggtaggttcactaaggtgggtgagcaagaaaggacagtggacaccctgccgtccccccagcaccccgtggctcattgctgcagtcagctggaggagaggtggcagaggttgcagagccaggtcatctcggagctggatgcttgtaaggaatgcacgcagggggtccagagggaggtctccatggtggagggcagggtgtctcatatggagaaaacttgcagcaagctggactctatctcaggaaatcttcagaggatcaaggaggggctcaacaagcatgtcagcagcctgtggaactgtgtcaggcagatgaacggaacgctcaggtcgcattccagagacatttctggcctgaagaattcagtccagcagttctacagccacgtcttccagatttctactgatttgcaagatctggtcaaatttcagccatcagcaaaggcgccctcgcccccgccgcccgcagaggccccgaaggagccgctgcagcccgagcccgccccgccgaggcccagcggccccgcaaccgcagaggaccctgggcgacggcccgtcctgccccagcggccccccgaggagaggccgccccagccgccaggctccaccggggtcatcgcggagacgggccaggccgggccccccgcaggcgcaggcgtgtctgggcggggtctgccgcggggcgtggacggccagaccgggagcggcaccgtccccggcgcagaaggcttcgcgggcgcaccaggatacccgaagtcacctcctgtagcttccccaggagctccggtgtcttctctggtgtctttttctgcggggctcacccagaagcctttccccagtgatgggggcgttgtcctctttaacaaagtgctggtgaacgacggggatgtttacaaccccagcaccggggtcttcacggctccttatgatgggcgctacctgatcacggccaccctcacccccgagagagacgcctacgtggaagcagtgctgtcggtctccaacgccagcgtggcccagctgcataccgctgggtacaggagagagttcctggaataccaccgccctccaggagctttgcatacctgcgggggcccgggggcattccacctcatcgtgcacctgaaggcgggagatgcagtcaacgtcgtggtgactgggggcaagctggctcacacagactttgatgaaatgtactccacatttagtggggttttcttatatcctttcctttcccacctctaaggtggctggggagatgtcaggggaaagatagatagttgtaaaaactctaaagctttaatatattcggtttgtatgtaatggaagcacggggctagagtttccacataggccccaacataaaggccttccctcgctgttgaggccaccatgccttactgcatccagccaggctgcagggagtgaggcacacggtgaacatggccactgacttttctgccactctaactggacaactggaagacttggaaaggcctccacctgtatctacactctgagggccctggactgggcctgagcttgccacagaggctccgtctgactgtgggctgggaggagggaggcaggggagagccggtcacggtggctggtctttactgcagggcagcactgtggccagctgtctgtctttacactgcatgcagaagtttaaacactgaagtgccgaagtggcccgtgccgccgcacagagaccccgactttagtttgggctgttccacgcttggctcaccattgccgcctgggacttaacctgctcaggcgggccttcgcccagctgcaaatagggatgcgttagagactgttcccaaagcttgttgggctccttaaatggcatgtacaatttaagtgcaaagacagggagtgtcaataaagatggaaagccatttccagttaacttttgttaatttaa

SEQ ID NO: 30883 - DNA, 3021 bp, Homo Sapiens
gggcctactctgccgccgccgccgcccgcccgctccagccgccgccgccgccgccaccgccctccaggctccgggacccggcccgcgccaccgcccccgtgcgcgccccgccgccgccgccttcgccttcgccttttgtttcctccgctccggcgcccccgccccggctcgcgctttgcaggggacgcagcgcgcgcccccagcgggcccgggaaaagccgcggcgcgcgcgcgcgcctgcgcggcggacccctccttctcctccccgcgtgcgcgtgcccttcttggctgcgcgccggcgccgcctggcgggcgggaggggaggtggcaggcgcgtttgcaggaggggcgcacctcttcgctcgcgcacccccccggaaggtagaccgggaaggggaggcgggcgggcggagaggagagagtggcgcgcagtccagcgagggcgggggttggctatgtggggggtggtgcaccccgcagtctagacagtctgatccgggctgggggcgtgtacactcggcgcacctgcgagactacagagcctcgggccggcacgtgtggggagtgtggacacgtctgctgcgccccgcttctcgctgctgaggggaagggagggggcgggcaggtgcagcggccgggctagtgggagggggcggcggccatggagcgggtgaacgacgcttcgtgcggcccgtctggctgctacacataccaggtgagcagacacagcacggagatgctgcacaacctgaaccagcagcgcaaaaacggcgggcgcttctgcgacgtgctcttgcgggtaggcgacgagagcttcccagcgcaccgcgccgtgctggccgcctgcagcgagtactttgagtcggtgttcagcgcccagttgggcgacggcggagctgcggacgggggtccggctgatgtagggggcgcgacggcagcaccaggcggcggggccgggggcagccgggagctggagatgcacactatcagctccaaggtatttggggacattctggacttcgcctacacttcccgcatcgtggtgcgcttggagagctttcccgaactcatgacggccgccaagttcctgctgatgaggtcggttatcgagatctgccaggaagtcatcaaacagtccaacgtacagatcctggtaccccctgcccgcgccgatataatgctctttcgcccccctgggacctcggacttgggcttccctttggacatgaccaacggggcagccttggcagccaacagcaatggcatcgccggcagcatgcagccagaggaggaggcagctcgggcggctggtgcagccattgcaggccaagcctctttgcctgtgttacctggggtggaccgcttgcccatggtggctggacccctatccccccaactgctgacttccccattccccagtgtggcatccagtgcccctcccctgactggcaagcgaggccggggccgcccaaggaaggccaacctgctggactcaatgtttgggtccccagggggcctgagggaggcaggcatccttccatgcggtctatgtggtaaggtgttcactgatgccaaccggctccggcagcacgaggcccagcacggtgtcaccagcctccagctgggctacatcgaccttcctcctccgaggctgggtgagaatgggctacccatctctgaagaccccgacggcccccgaaagaggagccggaccaggaagcaggtggcttgtgagatctgcggcaagatcttccgtgatgtgtatcatcttaaccggcacaagctgtcccactctggggagaagccctactcctgccctgtgtgtgggttgcggttcaagagaaaagaccgcatgtcctaccatgtgcggtcccatgatgggtccgtgggcaagccttacatctgccagagctgtgggaaaggcttctccaggcctgatcacttgaacggacatatcaagcaggtgcacacttctgagcggcctcacaagtgtcaggtgtgggttgggagcagcagcggcctgccgcccctggaacctcttcctagcgacctgccatcatgggactttgcccagcctgctttgtggaggtcgtcccattcggttcctgacaccgccttttccctttctctaaaaaaatcattcccagcccttgaaaacctgggcccagcacactccagcaacactctcttctgcccagccccgccgggatatctgaggcagggctggaccaccccagagggcagcagggcctttacccagtggcctgttggctagcctgggcctccctggagagggttgacagtggaagggaacaggaggggcatttggcctgagacccctgcttttgggagaggctagcagggtggttcctgcccagcatgcccagctcctccctgggtgactcggagtctttcccatgtcagagcccccaaatgggggtagcaaggagcacctttctggaaccccctatagcatccaagtttctttctgggctctcttgccttttcccccctttcacagatggcacccctgggcatctgtccttgcctaggtgattttggaggttggtgccttcctgggaactagccaccagcttatctgcttcccttcccctggcatcacttcccataggcctggggtttctagactggggcctggccacccctttccccactccacgagtgagtcggcctccagagaagactggcacaattccaactagagtcaacccatgctgccctctgcccttcccactcagatctagatcctgctttcatttctggctagtgaagtagacttttgtgtttttgaggtttattagcaggtctgctcaggaaccaaactaatgagtagctttatattgggccaccccaatatatggctttgggggctgaaaaagcagatgtagaccccctccctcggatccttattggtgtgccctttagcactccgcagactctgcggggtgaacaggagtgatgataaaatttttcattctaaaaaaaaaaaaaaaaaaaaaa

SEQ ID NO: 30884 - DNA, 5503 bp, Homo Sapiens
ttcatctgtacctttcaagtattcaaatagaaaaatataaacaatgtaaataaaatagcaaaacaatgtaatatctcataaaactgcaatggtaaaagcatttatcctattgaaattccacaatttttatttgaaaatattatcgacatgtaattcaagtggcatttagaagaataatttaaaagcaacaactctatagaaagcttgtaaaatgattaagtagtttaaaccaaataaaacaatttctgagtcagtcatctccagtaggtctattttagtctcaagataaattcatttctggtgacaactgaagttcttagttatttgttagtatatattggagacatttacaataaagcttagagcacaatgggaaatgaaagtatcatgttttttttaagaccaaatgtattgcagaaatgtgagtaatttaatccgatgctacaatctgatcattctgatctaatctgatcatttaataacactaaataaaaccttcatctcacattctttggctgtttcttttaaaatatgggtttacggataaatcaaataaattcaaaacaaagtaataagcaaatgatttttttttctcagtaatctagtagagtattacatttagaagtaatctgtatctcagtgcagtaactatttaggactgtaagcgccgctgttcacctactggaagacaaatgcaaccgaaaacactcagatctcacacctcacgaagacccgcagatgccacaaactaactgctggactgcagcgaaacccgacccctgtttggaggcactccaggtttccggaggattgtcatctccatagctgcggcaagaaactaaataagacccatttatgcacagtgaagattctgagaggattctgcagcaaaacaacaatggccgctccacagagtcgccccagacgcggcgagctgatcctgctgtgcgcgctgctgggaacgctgtgggaaatcgggaggggacagattcgctactctgtgccagaagagacggacaaaggctccttcgtgggtaatatctccaaggacctggggctggacccccggaagctggcgaagcacggagtccgtatcgtctccagaggtaggacgcagctctttgctctgaacccgcgcagcggcagcttgatcaccgcgggcaggatagatcgggaggagctctgcgctcagagcccgcggtgtctgataaatattaacaccctggttgaggataaaggaaaactctttggggtagaaatagaaataattgatattaacgataataacccaaaattccaggtcgaagatctagaagtaaaaattaacgaaatcgcggttcctggagcacgttatccactcccagaagctgttgacccggatgtgggcgtgaactccctccagagctaccagctcagccccaatcaccacttctccctggacgtgcagactggagacaatggagccataaacccagagctggtgctggagcgcgccctggacagggaggaagaggctgctcaccacctggtcctcacggcctcggatggcggcaagccgcctcgctctagcacagtgcgcatccacgtgacagtgttggatacaaatgacaatgccccggtttttcctcacccgatttaccgagtgaaagtccttgagaacatgcccccaggcacgcggctgcttactgtaacagccagcgacccggatgagggaatcaacggaaaagtggcatacaaattccggaaaattaatgaaaaacaaactccgttattccagcttaatgaaaatactggggaaatatcaatagcaaaaagtctagattatgaagaatgttcattttatgaaatggaaatacaagccgaagatgtgggggcacttctggggaggaccaaattgctcatttcggtggaagatgtaaatgacaatagaccagaagtgatcattacgtctttgtttagcccagtgttagaaaattctcttcccgggacagtaattgccttcttgagtgtgcatgaccaagactctggaaagaatggtcaagttgtctgttacacacgtgataatttaccttttaaattagaaaagtcaataggtaattattatagattagtgacaaggaaatatttggaccgagaaaatgtctctatctacaatatcacagtgatggcctcagatctaggaacaccacctctgtccactgaaactcaaatcgctctgcacgtggcagacattaacgacaaccctcctactttccctcatgcctcctactcagcgtatatcctagagaacaacctgagaggagcctccatcttttccttgactgcacacgaccccgacagccaggagaatgcccaggtcacttactctgtgaccgaggacacgctgcagggggcgcccctgtcctcgtatatctccatcaactctgacaccggtgtcctgtatgcgctgcaatctttcgactatgagcagatccgagacctgcagctactggtaacagccagcgacagcggggacccgcccctcagcagcaacatgtcactgagcctgttcgtgctggaccagaatgacaacgcgcccgagatcctgtaccccgccctccccacagacggttccactggcgtggagctggcgccccgctccgcagagcgtggctacctggtgaccaaggtggtggcggtggacagagactcgggccagaacgcctggctgtcctaccgcctgctcaaggccagcgagccgggactcttctcggtgggtctgcacacgggcgaggtgcgcacggcgcgagccctgctggacagagatgcgctcaagcagagcctcgtggtggccgtccaggaccatggccagccccctctctccgccactgtcacgctcaccgtagccgtggctgacagcatccccgaagtcctgaccgagttgggcagtctgaagccttcggtcgacccgaacgattcgagccttacactctatctcgtggtggcagtggctgccatctcctgtgtcttcctcgcctttgtcgctgtgcttctggggctcaggctgaggcgctggcacaagtcacgcctgctccaggattccggtggcagattggtaggcgtgcctgcctcacattttgtgggtgttgaggaggtacaggctttcctgcagacctattcccaggaagtctccctcaccgccgactcgcggaagagtcacctgatctttccccagcccaactacgcagacatgctcatcagtcaggagggctgtgagaaaaatgattctttgttaacatccgtagattttcatgaatataagaatgaagctgatcatggtcagcaagccccgcccaacacggactggcgtttctctcaggcccagagacccggcaccagcggctcccaaaatggcgatgacaccggcacctggcccaacaaccagtttgacacagagatgctgcaagccatgatcttggcgtccgccagtgaagctgctgatgggagctccaccctgggagggggtgccggcaccatgggattgagcgcccgctacggaccccagttcaccctgcagcacgtgcccgactaccgccagaatgtctacatcccaggcagcaatgccacactgaccaacgcagctggcaagcgggatggcaaggccccagcaggtggcaatggcaacaagaagaagtcgggcaagaaggagaagaagtaacatggaggccaggccaagagccacagggcggcctctccccaaccagcccagcttctccttacctgcacccaggcctcagagtttcagggctaacccccagaatactggtaggggccaaggccatgctccccttgggaaacagaaacaagtgcccagtcagcacctaccccttcccccccagggggttgaatatgcaaaagcagttccgctgggaacccccatccaatcaactgctgtacccatgggggtagtggggttactgtagacaccaagaaccatttgccacaccccgtttagttacagctgaactcctccatcttccaaatcaatcaggcccatccatcccatgcctccctcctccccaccccactccaacagttcctctttcccgagtaaggtggttggggtgttgaagtaccaagtaacctacaagcctcctagttctgaaaagttggaagggcatcatgacctcttggcctctcctttgattctcaatcttcccccaaagcatggtttggtgccagccccttcacctccttccagagcccaagatcaatgctcaagttttggaggacatgatcaccatccccatggtactgatgcttgctggatttagggagggcattttgctaccaagcctcttcccaacgccctggggaccagtcttctgttttgtttttcattgtttgacgtttccactgcatgccttgacttcccccacctcctcctcaaacaagagactccactgcatgttccaagacagtatggggtggtaagataaggaagggaagtgtgtggatgtggatggtgggggcatggacaaagcttgacacatcaagttatcaaggccttggaggaggctctgtatgtcctcaggggactgacaacatcctccagattccagccataaaccaataactaggctggacccttcccactacataatagggctcagcccaggcagccagctttgggctgagctaacaggaccaatggattaaactggcatttcagtccaaggaagctcgaagcaggtttaggaccaggtccccttgagaggtcagaggggcctctgtgggtgctgggtactccagaggtgccactggtggaagggtcagcggagccccagcaggaagggtgggccagccaggccattcttagtccctgggttggggaggcagggagctagggcagggaccaaatgaacagaaagtctcagcccaggatggggcttcttcaacagggcccctgccctcctgaagcctcagtccttcaccttgccaggtgccgtttctcttccgtgaaggccactgcccaggtccccagtgcgccccctagtggccatagcctggttaaagttccccagtgcctccttgtgcatagaccttcttctcccacccccttctgcccctgggtccccggccatccagcggggctgccagagaaccccagacctgcccttacagtagtgtagcgccccctccctctttcggctggtgtagaatagccagtagtgtagtgcggtgtgcttttacgtgatggcgggtgggcagcgggcggcgggctccgcgcagccgtctgtccttgatctgcccgcggcggcccgtgttgtgttttgtgctgtgtccacgcgctaaggcgaccccctcccccgtactgacttctcctataagcgcttctcttcgcatagtcacgtagctcccaccccaccctcttcctgtgtctcacgcaagttttatactctaatatttatatggctttttttcttcgacaaaaaaataataaaacgtttcttctgaaaagctg

SEQ ID NO: 30885 - DNA, 11283 bp, Homo Sapiens
ggcgggaggagtaaagatggcggcgcgagggtctccgccctctgctccgggctgaagcgctctgagagaggcggcagcggcaactcgagccccaacagtaatttagtgttggtagttttggcagcagctgccgaggccggagcaatggcggaactggagcacctaggagggaagcgggcagagtcggcgcgaatgcggcgggcagagcagcttcggcgctggcggggctcgctgacagagcaggagcctgcggagcgacgaggcgcggggcggcagccgctgaccaggcgcgggagccccagggtccgcttcgaggacggtgctgtctttctggccgcctgctctagcggggacaccgacgaggtgagaaagcttctggcaagaggtgctgatatcaacacggtcaacgtggacggcttgacagccctgcaccaggcatgtattgatgaaaatttggacatggtgaagtttctggtggagaacagagccaatgtaaaccagcaagacaacgagggctggacaccccttcatgcagcagcttcctgtggctatctcaacatagcagagtatttcattaatcacggagccagtgtaggtattgtcaatagtgaaggtgaagttccctctgaccttgcagaagagccagccatgaaggatcttcttctggagcaagtaaagaagcaaggaattgatctagagcagtcaagaaaagaagaagagcagcagatgttgcaggatgcccgccagtggctcaacagtgggaaaatagaggatgtgaggcaggctcgctcaggggctacagcccttcatgtggctgctgccaagggctactctgaagtcctcagacttttaattcaggctggctatgaactcaatgttcaggattatgatggctggactcccctccatgctgctgcacactggggagtgaaggaggcttgctccatcctggcagaagcactttgtgacatggatattcgaaataaactgggccagacaccatttgatgtggctgatgagggtctcgtggagcatttggagttgctccagaagaagcagaatgtgcttcgaagtgaaaaggagacacggaataaactcattgagtcagatctgaacagcaagattcagagtgggttctttaagaacaaagagaagatgctctatgaggaggagacacctaagtcccaagaaatggaggaagaaaataaagaatctagtagctccagctcagaggaggaggaaggtgaagatgaagcttctgagtcagaaactgagaaggaggcagataaaaagccagaagcctttgtcaatcattccaactctgaaagcaagagtagtatcacagagcagataccagcaccagctcaaaataccttctctgcctcttctgctaggaggttctcttctggcctttttaacaagccagaagagcccaaagatgaatctccttcttcatggagattgggactgagaaaaactggcagccacaacatgctgagtgaggtggccaattccagggaacctataagggaccgaggctcttccatctatcgctcctcttcaagccctcgaatttctgctctactggacaacaaagataaggagagagaaaacaaaagctatattagttcactagcaccccggaagctcaacagcacaagtgatattgaagaaaaggagaacagagaatcagctgttaatctagtgaggagtggctcctatacccggcagctatggagggatgaagcaaaaggaaatgaaatcccacagacaattgctccctccacctatgtatcaacttacttgaaaaggactcctcacaaatcccaggccgacacaacagcagagaaaacagcagacaatgtctcttctagcaccccgctctgtgtgatcaccaatcgccctcttcctagcactgccaatggggttacagctactcctgtgctctccattactggaacagattcctctgtggaagccagggagaagaggaggtcctatctgactcctgtacgggatgaggaagcagagtctttacggaaagcacgctccagacaagctcggcagacacgaaggtctactcaaggtgtcaccctaacagaccttcaagaagcagaaaggacattcagccggtcgagggcagagaggcaagctcaggagcagcctcgtgagaagcccacagacactgaagggcttgaggggagccctgagaagcatgagccctcagcagttccagcaacagaagctggggagggccagcagccctggggcaggagtctggatgaagagcctatctgtcatcgcctgaggtgcccagctcagccagacaaacccaccacgccagcatctccttctacgtcaagaccctcactctacaccagttcccacctgctatggacaaatagattttcagtccctgattctgagagttcagagactaccacaaacactacaactgcaaaggaaatggacaaaaatgagaatgaagaagcagatttggatgagcagtcctctaagaggctgtccatccgagagaggaggcggcccaaggaacgacgaagaggcacaggcatcaatttctggacaaaggatgaggatgaaactgatggctctgaagaggtcaaagaaacgtggcatgaaagactttctaggttggaatcgggaggtagtaatcctacaaccagtgattcttacggtgaccgggcttcagcaagagcccgtcgggaggcccgggaggcccgcctagccaccctgaccagccgtgtagaagaagacagcaacagagattataaaaaactctatgagagtgctctgactgaaaaccaaaaactgaaaacaaaacttcaggaagcccagctagagctagcagatataaagtccaagcttgagaaggtggcccagcagaaacaagaaaagacctctgaccgatcatcagtgctggagatggagaaacgggagaggcgagccttggagcgcaaaatgtcagaaatggaggaagaaatgaagaacctccaccagctaaaacagattcaaaccttgaagcagatgaacgagcaactgcaggctgagaacagggccctgacccgagtggtggccagactctcggagtccatcgagtcctcggacacccaggagctctagttcttgcccctactctccaactcacttccctcctccactactccaggtgttaacagaactgaaatccgacaaccagaggctgaaagatgaaaatggtgccctcatcagagtcatcagcaaactgtccaagtaggctaggctccagatttatgaggaaagaaagggacagcatttgctgcccccacccctcttttccagtccttgccttccaaccaaaagaaatggatgttttggtggaaggacacttctttctatcaccctcttcagtcacctctatacactctacattttctctgcactttcaatgccctgttcttccaaacccctatcccaagttttatgacagttttaattgaagcatgattgtggtaattcgagccatctggagaatgctctggggagtacaccaggctcagctgtggacccctcaacttcctgctgctcagctactttgtccacattggatttggtccaaacatgtaagacttctaccctaatcagtatccttcagctttttacattaacccagtgtcctctgatataggtgagtcttgtggtagccactccaggatcctgattggggtgccaagagaaacagcaggatgttgaattgatcatcagatgccctctggaatggttagcatccaaggtgacagtgactgcattgaggcgctctattcttcttcacctctcaggaactgacttttattttttctatcaacacccagtaatctccctaactagttttaacccttattcctccctcatacctagccatttctccaaggcgcaaatggccctggcttcatttattcctttcctttctatccttttatatttttcccttccccaccccctcactcaatggtataaaagctaggacagagcacctgacctcagttgtctttggccattgtgggaagtcattattctggagacaagaaaatcatcactctggtgccttggtggcagcaccactgcctgctccctggaaggtagactatggcataagtgtcagctcattgttttcgtctcccacttatcttcccccttcaaagtgattttctttataagaaaatttgggctctgaatactccattctgcctcacttccttgaccttgttttcctctcttcgccctgacacctgcttctaatgagaaatgaagtcagtgcaaggaggaatgagaggtggggaggggagattgttgagagatggactaggaagtggaagcaggctggaaagacacatatggcgaaagtcaagtatctgaggccacttgcaacattgtgacaaagaagatggaagatagcagcctactgggctgtgagaatagtggtgaatttgattatttccagtggttagatttagcagagagatttactttcttagaaattaataggggaaatggcacttaatagaggtttaatggaatgaagtactttcaacccattgatgagagtcatggaagtttagagtggcaagacccagaggtcattaggtccagctttctattattgtgtcacagggacccctgctaccacagctttcacccatgggcatggtcaggtagcctctggtggctatgcatttattactcaaaagttgggcaactctaataacgagagagtttttcctcatatcagctgaagtctgcctgtggattctccttgtagtccagatctactatctgcaactctttaacggcacttgagatatgtgcagtgggtggtctccccctcagtcttactttgagctgctgttactctagtcctttaagtcattcctcatatggcatgcttttcttacctgtcacatcttggccatcctcctctagacaaaaccagcctttaaaatatcatgtccaggcctggaaagaatacaaatccagtgcaaaattaaaccattagttcttgatgataacctagcattaatacttacagtattttctttttgtaggagttttatcccttggttcacttgagtgtgcaagtcattaaatcctcatcattttagggttgccagtgatattcagtgtttagagtggttcattcccttaatatatactacctctgtctgttaattctttcctaacatgacatgtagctctccatggtcctccctctgaaacaccacatgctgtttaaactagaagctgtaattcaagatcccaattccaccaggtgcagtggctcatgcctgtaatcccagcacttcaggaggccgaggtggacagatcacgaggtcaggagttcgagaccatcctggctaacacggtgaaacccaatctctactaaaaatacaaaaaattagccaggcgtggtggcaggcgcctgtagtcccagctactcaggaggctgaggcaggagaatggcgtgaacccgggaggcggagcttgcagtgagccttgatcacgccactgcactccagcctgggtgacagagcaagactccatctcaaaaaaaataataataataaataaataaaaaatcccaattacagaacaggagatatgtttcctctgacaaaaccccatttttagagtgtataaaattctgtctttcatttccaaccatttttcaagagaagctgctactatcttgagacttcgtattatcatgggagtactgtaagttcagttctcagggaatgctaaattagagtaataagttttatatccttcattctgggagaggaaatcaacataaggtgttgactaattgattatcctggaacattttgaatattggggaaggaagatgatacttctttctcaagaaaagaaaattggattattaggaatacatcttgacccttttccactcaatagaccagggaaaggggttacagagagcctcctcagatctgtttgtgcctttcaaaagtactgggggcagattctcaaaactcttagattggtgttgcatccctgccacttcacatgacccttccatgttaaagctgacttttcttgccagaaagttttccttgtgacaagaaatttgcaagcttttcaatctcaggaatactggattctatagccaagaactcatgaaagtaagtgtaaactatcctaggtaatttcaggtactttctcttatgcaattaattttattaactgatttctggtctatctccagagataaaataccattccttcacaactgtattgtctggaagccccatgagatggtaattataggccttctactagccagcagttctctctggatactggcatcagcaggtctcctttttcttgtgctgcttggacaggtacctactgctggcctcttcagtggccacaatcctcagtcctcacctgctggtttggagactcatgagcaccccaggcagctcaagctgaataaatagctgcagacatggccaacaacatggggctcaggtctgtcacttaacttagagtctttacatgaaatatcagaatgggaaagagaatgttcctggtaaaactctgttttcattaatttgttatttttcaaaaaccgagccacacctttggaagtaatgatttggccattccagagattctggggctaaagtttgtttttccagggctgctgatccttttccagatagctccagagtatgatgaccccagccccatcccaatctctagcgaaagggttatgcaaatctcagggtgttgcctctaaagaatctaaagaatagacatgctttgggcttactcagtgtaccagattctctagtgggccattctcatttgatgttccctagaacctccctgtcttccaactgcaggatgtgtttacttctcttctgggcttcccctggtttctgtcctagttcccaccccaagtttaagaagacttagattcatttattgctatctgaggccactagtgagatttcagatctctcttttgcaacattttacccatttcccttccccaaaccatgtgcttattagatggttccactcaggaagcaaggaagctaaaactcaagttaatggtctgtggatcccacgaaagtgtgtgtaaactactgactgtttctccactagaggcatttaattgagccaaagatgatggaagaagaaactctcaaagccatgtactttgttaggtgtctggatttttggcctgtttgcagcctctcctagccacagacagacactgtctcctctcagagaaaggccagtgtttcggtccaggccactggtgagtgtcggcacccttgaggtgggcatggagtgagcagaagaagcctggagaagagagaactatttaaaagtgttgccagttattcagcttccaggcggctttgcacctccaaaggtgcaaaaaggaaaaagaaagcagaaaggattcagcatttaagcagaaagaaaagggaaattctactctaccagatgagccactggttccactggagcttatcagtgaagtaacactgcaggagccctggtatccttccctcagagatatcatcaggggccctcaaaccccattgtttatgccagcactgaccgcactttaagcacacacttaccaatcagaggtcgtgtaattggcctaaatctaggcccagttattactacaaatcttagtcaccatactctctcgcccaggctggagtgcagtggtgtgatctcagctcactgcaacctccacctcccaggctcaagggatcctctcacctcagctcccgagcagctaggactgcaggtgtgcaccaccatgcccagctaatttttgaatttttttgtagagatggggttttgccatgttgcccaggctggtctgaagctgctgggctcaagcaatccacctggctgggcctcccaaagcgataggattacaggcgtaagggcccacgcccagcctaccatactgattttcaaggcagggtctaacccttcataagatgtgagttcttccaacccaataagcaggcagctttgaggacaaaaaggcaacattaaaagataagaccctagaagtcagaacatctgtattccaaggccaccccttctccttttagtcatgtgactttgggcaggtcaccctccctgtctgtaaaatgaggttggactggataatctttatgtgccctttccttttggcttaaaattctgtgatttattcattcttaggaagatcagcatatttattgggatttctgcttcaaaaattctttctaacctcaaaaatccaagtccagaattttttgttttcttctggatttaaactgtttaatatgagcacatcaaggttgacttctcatcctttttgggaagtgaatttaatattgagggtaattgaatgatgttgcaatggctttccctcctgctggcttggtaagaatattaaagcctgcagaggtggaaattggagctcatggagaaatggatagaaagcaatttgttgcaggcagcctttggacaagttgttttaataggaaatagacctgctgcttcataggtttcctcaaccacctttcctcagctttcttaaaatgggatctacattggctcttcacacccaaatagcagactaatcgtttttctgcttagcaccgtctggttcattgtcttgaactctgccttacagcagcaagaaaattttcctcgacaagaacctcaatctttagttccattgagctccccctctggattttggacttaccagaagtaggaggttctgataccattcaagatggtctttccttcaaagcaggtctgaagaggagactaccaaagcagtgtttacaaacccagagtccacacaaccatattgcatagaacagcacttggctttcacaagcctcctacaggacctggtgtaattggagtgaaagggcagagaccctggaagtggaggtggctgtgtgctgcgatgggaagaaggcagaaggcccaggggctttggacatagagcagggtggaagctgcaagtactgggaaggaagagagtttcacagaaacaaagctttgtcacacagaaatgagttctgtctcactggtgacttcatccctcaggctccagctgagcagagattttaatcagcttccttaatgggtattgacactgctcaggaagcagtagaccctgtcagggacagctattgatcttttgtgttctgattagattggaaaatagatcaacttcattgtagtccaggaactgttggtcacagctactaggaatgaggtgatttctgagggctgagaaaaaacacagaatcttggccagcagccagcagctgcatggtgaaagatgcattcacttctcctttgagagttggggttgagggcaaacatagaacccaggtttggcttacaacccagtgtcccggaagccctccttcgggagaactgtaagtaagaggtgggtgtgtctaaagacaataccattaatgaatgttctggccttacctaaaaaggtttagcaatttggggataactcttggatctagcttatgtgcgttcacatgcacatttgctagcccagagcttttaaaatgaggtctggcatatacttgattacaaatgaaaactcagaaaccaattttatttattaaatcatatcttttgtttttccccctcccttctaatcccccaaaggacctatttgagctgttccccaattcatctgcttattttggaccatgaatctgccagagtgatattttctgttatttctcctccaaatttttccctgatgtttccaataaagatttacttgggtggccccttaaggtgacatcaggatgctcttatgtccttccagaataagcatacacttcactcctctccctttcatctccctctgcattcttaattccttgcttttctcacttggagccgagggtgctttagagaggtggttttccatgaatcagccaagattcctgtagaagttgggtataccaaccaccaccaccaccgccccctattccagtttcaaagctcctcggctatgctaatgtcccctcagagatgaggtttgacttttaggcccgtatgactcctccatagcctggccaaggagaccatgagtagccatgtctggtttactctttatcctgagactgtttatagcttaaaacagaagtgtgtcttcccagcacaaacctaatcaatcagtgtatcagtgcatctggtggcaacagctcagcccattcaaagagcaaggattcaggaaaggcacactgatggtggggagcctcttaagagcctctaatgttctcccaaaaccagagttgagagtcggagtgccagtcgtcggggcccactattcctgaataagggacatgcaagggccagaagtagcttgactctcgcctaaatatctgtgcctttgcctgtcctttctcccactctactgaaacccggaacagattcccgcttgccttctgatgaagagaggttaggtaaagagagtttggaggaaaaaagacaccaggaggcaggctgcggggtaggagagggttctgagaggaggcagcaatccagaatacctccttttctagccagcatcccttgaacttttgaaaggttgtgcctaccactggctggcacaccagggcaatgatttccctgcagaaggaaggaaagaatgtttcacccttgcatccttcttggagaagctacagcctgtgctcagttgagtggttcacactcagactttggctttatggttttccttcctccttgtctttgccctgaccttgatcaacaggggtgaaaagaaccaccctgaggtttccatgcctctcccattttagtggtagcattttgtgtctttactccacccttcaccctagttccaccaaggttcacacaccagatgtaactgtttttcagctgagttgtatggattaacttcagtccactgtaaatacacctgggatggggtggggttggggttgtttagggagaagcagccagacttgctttgtgaactgaatgtatttttatgcaattttgagtggcctttcaaccctaagatgaatggttttgttttactggttgttgttatatagttttgagtattctgtgtttgaaagtttgggaataataatattcacttctatatgatgcctgtaaacacaacagtatttataaatgagtaaataaaactgtgttttaactttg

SEQ ID NO: 30886 - DNA, 1736 bp, Homo Sapiens
gggggaggatcaaagtaggcaagatggcgtcgagcggcggggagccagggagtttatttgatcaccacgtccagagggcggtatgcgacacacgggccaaatatcgagagggacgacggcctcgtgctgtgaaggtatatacaatcaatttggaatctcagtacttattaatacaaggagttcctgctgtgggagtcatgaaggaattagttgagcgattcgctttatatggtgcaattgaacagtacaatgctctagatgaatacccagcagaagactttactgaagtttatcttattaaatttatgaacttacaaagtgcaaggacagccaagagaaaaatggatgaacagagtttcttcggtggattgcttcatgtgtgctatgctccagaatttgaaacagttgaagaaactagaaaaaaactacaaatgcggaaggcatatgtagtaaaaactactgaaaataaagaccattacgtgacaaagaagaaattggttacagagcataaagacacagaggattttagacaagacttccactcagagatgtctggattttgtaaagctgctttgaacacttctgcagggaactcaaatccttatcttccgtattcctgtgaattgcctttatgttatttctcctcaaaatgtatgtgttcatccgggggacctgtagacagagcaccagactcctctaaggatggtagaaaccatcataaaacaatggggcattataaccacaatgactctttgcggaaaacacagataaactctttgaaaaactcagtggcctgccctggtgcacaaaaggctattacgtcttcagaggcagttgacagatttatgcctaggacaacacaactgcaggagcgcaaaagaagaagagaagatgatcgtaaacttggaacttttcttcaaacaaacccaactggtaatgagattatgattggacctctgttaccagacatctctaaagtggatatgcacgatgactcattgaatacaacggcgaatttaattcggcataaacttaaagaggtatttcatctgtgccaaagcctccagaggacaagccagaagatgtacatacaagtcatccattaaaacaaagaagaagaatatagagtgccagcagcaacttagtattttctaaaaagaacatttattatttatttttagcctgtcattttaattcttcaagagattttactgctggtattttttgatgcactcctctttgtaatttcattcaagccatttgtctaaagtcatttctttgttttttgggagatggagtcttgctctgttgcccaggctggaatgcagtggcgtgatctcggctcactgcaacctccacctcccgggttcaagcgattctcctgcctcagcctcctgagtatctgggattacaggcgtgcaccaccatgcctggctaagttttgtgttttttttagtagagatgggttttcaccatattggtcaggctggtctcgaactcctgaccttgtgatacacctgcctcagcctcccaaagggatgagccaccgcgcctggcccatttcttctttttttgacccatacttaatgttgcagaaactattcttgtcataacattatctctcatgtacagtaattatatgtaaattaattgaagcaaatatggaaactttacaatagaaataaagataggcagccagcgtctgtttccaattataaaaaaaaaaaaaaaaaaaa

SEQ ID NO: 30887 - DNA, 2418 bp, Homo Sapiens
gggacccagacttgccgacctgtacgactctggccatggggaacagccactgtgtccctcaggcccccaggaggctccgggcctccttctccagaaagccctcgctgaagggaaacagagaggacagcgcgcggatgtcggccggcctgccgggccccgaggctgctcgaagcggggacgccgccgccaacaagctcttccactacatcccgggcacggacatcctggacctggagaaccagcgagaaaacctggagcagccattcctgagtgtgttcaagaaggggcggcggagggtgcctgtgaggaacctgggaaaagttgtgcattacgccaaggtccagcttcggttccagcacagccaggatgtcagcgactgctacctggagctattccccgcccacctgtacttccaggcccacggctcggaaggactcacatttcaggggctgttaccgctgacggagctgagtgtctgcccgctcgaggggtcccgagagcacgccttccagatcacaggcccactgcccgcacccctcctggtgctctgccccagccgggccgagctggaccgctggctttaccacctggagaagcagacggccctcctcggggggccgcggcgctgccactcggcacccccacagcgccgtctaacccggctgcggacggcgtcagggcacgaacccggcggcagtgctgtctgtgcctcgagggtcaagctgcagcacctgcccgcacaggagcagtgggaccggctcttggtcctgtacccaacgtccttggccattttctccgaggagctggacgggctttgcttcaagggggagctcccactccgtgccgtccacatcaacctggaggagaaggagaagcagatccgctccttcctgattgaaggccccctcatcaacaccatccgcgtggtgtgcgccagctacgaggactacggtcactggctgctgtgccttcgcgctgtcacccacagggagggggccccgccgctgcctggtgccgagagcttcccagggtcgcaggttatgggcagtggccgaggctcactctcctcaggcggacagaccagctgggactcggggtgcttggcgcccccctccacccgcaccagccactccctgcctgagtcctcagtgccatccaccgtgggctgctcctcccagcacacaccggaccaggccaactctgaccgtgccagcattggccgacggaggaccgagctgagacgcagtggcagcagccggtcacccgggagcaaggcccgggcagagggccgcggccctgtcaccccactgcacctggacctgacccagctgcacaggctgagcctggagagcagcccagatgcccctgaccacacttcggaaacatcacactcgcccctctatgccgacccctacacaccacccgccacctcccaccgcagggtcacagatgtccggggcctggaggagttcctcagtgccatgcagagtgcacctggacccacgccctcgagcccactcccctcggtgcctgtgtctgtgcctgcctctgaccctcgctcctgctcctccggccccgctggcccctacttgctctccaagaagggagccctgcagtccagagccgctcagagacaccggggctcagccaaggatggggggccgcagcccccagacgcccctcagcttgtctcctctgccagggaaggttcgcccgaaccctggctgcctctgacagatggtcggtcccccaggaggagccgggaccccggctacgaccacctctgggacgagactttgtcttcctcccaccagaagtgcccccagcttggagggcctgaggccagtggggggcttgtgcagtggatctgatggccgcggtgaggtgggttctcaggaccaccctcgccaagctccagggtacctgcccctctaacccacttcaaattacaagtcagggtctgaacccagtgtgatggggggagtctctggggccctgagttcagagcccgtccctcagctcctgttccttggtgccagcagctggggcagggaagggtgggaggggccccatccaaaggatgccctggccagcgaggctgggtcacaggtcagggaggtcctggccgtccacagggtcggccctcagctcagcccgccaggagtcagggaggagactcgctgggagtgggagggcagcacgggcgtgaaggtcggaggacagagaaaggtcagcagggtcagagtatgtgaggtcagagggcatgagggtcacaggtcagcaaggtgtgaggagcacaagccagggtgccccgaggaggagggtgggtgggtccttgtgtggcctggcgcgcgccacagggcagcacgggagacgttgacaccaccggacgagaaagaaaaaaaaaaaaaaaaaaaa

SEQ ID NO: 30888 - DNA, 5411 bp, Homo Sapiens
ggcggccaggtggaggacctgagcaagcagctcaagcgtgtggacggccaggtgcagggcatcgccacgcacgtgcagcacttctcccaggccagcgggcttgacctggccgcgctagagtggccggaggagcaggaggtgggcgtgcgggcgttcgatagggtgcggactgggagtatcatgaaggacgccgccgaggagctcagctttgccagggtacttttacagcgggttgatgaactagagaagctattcaaagatcgggagcaattcctggaactagtcagccggaagctgagtttggttcctggtgcagaagaagtcaccatggtcacctgggaagagctggagcaggcgattacggacggctggagagcctcacaagcgggctcagaaacacttatgggattttctaagcacggagggttcacttccttaacatcacctgaagggactctaagcggagactctaccaagcaaccaagtattgagcaggctctggattctgccagtggtcttggcccggatcggactgcatcaggatctggtggcacagcacacccctctgatggggtttccagtagggaacaaagcaaggtcccctctggtactgggagacagcagcagccgagggcccgtgatgaagctggcgtgccacgactccatcagtcttctacattccaattcaaatcagactcagatcgtcacaggagtagagagaagcttacctcgacacaaccaagaagaaatgcacgtcctggtccagttcaacaggacttacccttggccagagaccagcccagtagtgtgcccgctagccagagtcaggtccatctaaggccagatcgtcgtgggttagaaccaactggcatgaatcagcctggattagtgcctgctagcacttacccacatggtgtggtacccctcagcatgggtcagcttggtgtgccaccacctgaaatggatgatcgggaattgataccatttgtcgtggatgagcaacgtatgttgccaccatcagtacctggcagagaccagcaaggattggaactacctagcacagaccaacatggtctggtttcagtcagtgcatatcagcatggtatgacatttcctggcacagaccaacgcagtatggaaccacttggcatggatcagcgtggatgtgtaatatcaggcatgggtcagcaaggactagtaccccctggtatagaccagcaaggattgacattgcctgtcgtcgatcaacatggcctggttctaccttttacagaccagcatggtttggtatcacctggtttgatgccaattagtgcagatcagcaaggttttgtgcagcccagtttggaagcaactggcttcatacaacctggcacagagcagcatgatttgatccagtctggcagatttcagcgtgctttggtgcagcgtggtgcatatcagcctggcttggtccaacctggtgcagatcagcgtggtttggtccggcctggaatggatcagtctggtttggcccaacctggtgcagatcagcgtggtttggtctggcctggaatggatcagtctggtttggcccaacctggtagagatcagcatggtttgatccagcctggcacaggtcagcatgatttggtccaatctggcacaggtcagggtgtcttggtacagcctggtgtagatcagcctggcatggtccaacctggcagatttcagcgtgctttggtgcagcctggtgcatatcagcctggcttggtccaacctggtgcagatcagattgatgtggtgcaacctggtgcagatcagcatggtttggtacaatctggtgcagatcagagtgatttggctcaacctggtgcagttcagcatggtttggtccaacctggagtagatcagcgtggtttggcacaacctcgtgcagatcatcagcgtggtttggtcccacctggtgcagatcagcgtggtttggtccaacctggtgcagatcagcatggtttggtccaacctggagtggatcagcatggtttggcacaacctggtgaagttcagcgtagtttggtgcaacctggtatagttcagcgtggtttggtgcaacctggtgcagttcagcgtggtttggtgcaacctggtgcagttcagcgtggtttggtccaacctggagtggatcagcgtggtttggttcaacctggtgcagttcagcgtggtttggtccaacctggtgcagttcagcatggtttggtccaacctggtgcagatcagcgtggtttggtccaacctggagtggatcagcgtggtttggtgcaacctggagtggatcagcgtggtttggtccaacctggaatggaccagcgtggtttgatccaacctggtgcagatcagcctggtttggtccagcctggtgcaggtcagctgggtatggtgcagcctggaataggtcagcaaggtatggtgcaacctcaggcagatccacatggcctggtacaacctggtgcctatcctcttggtttggtacaacctggtgcatatttgcatgatttatctcaatctgggacatatccacgtggtctggtgcagccaggaatggatcagtatggtttgagacaacctggtgcatatcagccaggcttgatagcaccaggcacaaagcttcgtggctcttcaacattccaggcagattctacaggttttatatcagtacgtccatatcaacatggtatggtacctcctggcagagaacaatacggccaggtgtcaccactcctagccagtcaaggtttggcatcacctggtatagatcgaaggagtttggtaccaccagaaacttatcagcaaggtttgatgcatcctggcacagaccagcacagcccaataccactgagtacaggtttgggatctacacacccagatcaacagcatgtggcatcacctggcccaggtgagcatgaccaggtatacccagatgcagctcagcatggccatgctttctctctctttgacagtcatgattcaatgtatcctggttatcgtggcccagggtatctaagtgctgatcagcatggccaggaaggtttggatccaaatagaacacgagcctcggaccgacatggaattcctgcccagaaggccccaggccaagatgtcactcttttcaggagtccagactccgtcgaccgagtcttatcagaagggagcgaagtctcgagtgaagtcctgagtgagcgacgcaattcactgcgtagaatgagttctagtttccccacggcagtggagacatttcatctgatgggagagctcagtagcctctatgtggggctaaaggagagtatgaaggatctggatgaggagcaggccggccaaaccgacttggagaagatccagttcctgctggcacagatggtcaaaaggaccatacctcctgaactgcaggagcagctgaagaccgtaaagacgctagccaaagaagtttggcaggagaaagcaaaagtggaaaggctgcagaggatcctggaaggggaagggaatcaagaagcagggaaggaactgaaagctggagagctgagattgcagctgggtgtcctcagagtcaccgtggctgacatagaaaaggagctggccgagttgagggagagccaagacaggggcaaggctgccatggaaaattctgtctctgaagcctccctttacctgcaggaccagttggacaagctcaggatgatcattgagagcatgctgacctcctcctccacgctcctgtccatgagcatggccccgcacaaggcccacaccttggctcctggccagatcgaccctgaggccacctgtccagcctgcagcctggatgtgagccatcaggtcagcacgctggtgcggcgctatgagcaactccaagacatggtcaacagcctggccgtctcccgaccctccaagaaggccaagctccagagacaggacgaggagctgctgggccgtgtgcagagtgccatcctgcaggtgcagggtgactgcgagaagctcaacatcaccaccagcaacctcatcgaggaccatcggcagaaacagaaggacattgctatgctgtaccagggtctggagaagctcgaaaaggaaaaggccaacagggagcacctggagatggagatcgatgtgaaagccgacaagagtgctctggccaccaaagtgagccgtgtccagtttgatgccaccacggagcagctgaaccacatgatgcaggagctggtggccaagatgagcgggcaggagcaggactggcagaagatgctggacaggctgctcacagagatggacaacaagctggaccgcctggagctggacccagtgaagcagttgctggaggatcggtggaaatcgctgcgacagcagctcagggagcgccccccactctaccaggcagacgaggcggctgccatgcggaggcagctcctggcacatttccactgcctctcatgtgaccggcccttggagacacctgtgactggacatgccatccccgtgacccccgcgggtccaggcctacctgggcaccattccatccgcccctacacggtgtttgaactggagcaggtccggcagcatagccgcaacctcaagctgggcagcgccttccctcggggtgacctggcgcagatggagcagagcgtggggcgcctgcgctccatgcactccaagatgctgatgaacattgagaaggtgcagatccacttcgggggctccaccaaggccagcagccagataatccgcgagctgctgcacgcccagtgcctgggctccccctgctacaaacgggtgacagatatggctgattacacctactcaactgtgccccggcgctgcgggggcagccacaccctcacctacccctaccaccgcagccgcccgcagcaccttccccggggcctgtatcctactgaagagatccagattgccatgaagcatgatgaggtggacatcttgggcctggatggccacatttacaagggacggatggacacaaggctgccaggcatcctccgaaaagacagctcagggacctcaaagcgcaagtcccagcagcccaggccccacgtgcacaggccgccatccctcagcagcaatggccagctgccctctcggccacagagcgcccagatttcggctggcaacacctcagaaagatagaccttcctccgagggccgtctctcccagccgaacacagcccacccgcccagctccgcctcggtggcaaacagggggctggagaggcacgtggacatgcctcctggggaggggctcgaggagcccacgcgggggccgcggtccagcaccgctcagtgagcggaggtgtaaataaacattcaggaggaaaaaaaaaaaaaaaaaaaaaaaaaaaaaaaaaaaaaaaaaaaaaaaaaaaaaa

SEQ ID NO: 30889 - DNA, 4501 bp, Homo Sapiens; identical to SEQ ID NO: 24332

SEQ ID NO: 30890 - DNA, 4388 bp, Homo Sapiens
gaaaaggcggcggcccggctggggaagaggggcggaggaggcggttcggacggctgtgtggggtacggagcgtcgccgggacagagcggagcagctgggcacggcgtccagggcagctagggcctgggccgcggttcggccgcgccggccgagctggactggccattatggaggaggagctgcagcattcccattgtgtgaattgtgtcagtagacggtgcatgaccaggccagagccagggatttcctgtgatttgattggttgtccattggtttgtggtgcagttttccattcttgtaaagctgatgagcatcgacttttatgtccatttgaacgagtgccttgcttaaatagtgactttggatgtccatttaccatggcccgaaataaagttgctgaacatctagaaatgtgtcctgcaagtgtggtgtgctgtactatggaatggaatcgatggccagttagttatgcagaccggaaatcatatgaaaatctaagcagagatgtcgatgaagtggcacaattggatatggccttggctcttcaagaccaaaggatgctcttagaatccctcaaagtagccaccatgatgtcaaaagcaactgataaagtatccaaacctagagaacaaatctcagttaaatcaagtgtcccagaaataccacatgctaatggtttagtgtctgttgatgaagaatcttatggtgcactttatcaagctactgtagaaacaaccagaagtttggctgctgctttggatatcctgaatactgctacaagagacattggcatgttaaatacaagtgtcccaaatgacatggatgaacagcaaaatgcgagagaaagcttagaggatcaaaacttgaaagaccaagatcatctttatgaggaggaaataggagcagtaggtggaattgactacaatgacacaaatcagaatgcccagtctgaacaaaatggttcaagtgatttattatgtgacttgaatacaagttcttatgacacttctgctctttgtaatggctttcctttggaaaatatatgtacccaggtcatagaccagaatcagaatttacatggtgattcaaaacaaagtaacttaacaaatggagactgtgtggcatcatcagatggcacttcaaaaccttccagctcacttgcggtggcagcacaacttagggaaataataccatccagtgctttgcctaatggcacagttcagcatatcctcatgccagatgatgaaggtgaaggtgaattgtgttggaaaaaagtagacttaggggacgtgaagaatgtggatgtcttatctttcagtcatgctccttcattcaattttctttctaattcatgttggtctaaaccaaaggaagataaagcagtagatacatcagatttggaagttgcagaagatcctatgggcctccaaggaatagatctgatcacagcagcattgcttttttgtctaggagattctccaggagggaggggtatatctgatagccgcatggctgatatttatcacattgacgttgggactcagactttttcacttccatctgcaatattagctacaagtacaatggttggggagatagcttcagcttcagcttgtgatcatgccaatccacagctttcaaatccaagtccgtttcagacacttgggctggatttagtattggaatgtgtcgctaggtaccaacccaagcagcgttcaatgtttacctttgtgtgtggacagttatttagaaggaaagaattttcttcccactttaagaatgtgcatggtgacattcatgctggactcaatggctggatggaacagaggtgccctttagcttactatggttgtacctattctcagcgtagattttgtccatcaatacaaggagcaaagattatacatgaccgccatttgaggtcatttggagttcagccatgtgtatctacagtattagtggagcctgctagaaactgtgtgttgggattacataatgaccatctaagtagtcttccttttgaggtcctgcagcatattgcaggctttctcgatggcttcagcttatgtcagctctcatgtgtatccaagttaatgagggatgtgtgtggcagcctgcttcagtctcgtggcatggtcatactgcagtgggggaaaaggaagtatccagaaggaaattcatcatggcagataaaagaaaaggtatggcgatttagtactgcattttgttctgttaatgaatggaaatttgctgacatcctaagcatggcagaccacttgaagaaatgcagttacaatgttgtcgagaaacgggaggaagcaatccctttgccatgtatgtgtgtgacacgagaactcactaaagaaggacgttcactacgctcagttttaaaacctgtactttaaaagttgtaatattactagcacatatatgcaagcacctagtataatttctttgtaatatgtgaaactttattaatgtattaaatattacaactagctaaatttattgtcactgtgtatataatgttttgaagtgacatctatttttataaagtactgtttagttggaaaaagttgccttaatgtttgaaatgtgtgaaatttttggaacttgctggacagggtgatttaatttttagctacataattttaagaattagtattttcagtggtgtgcatattttggttcttaaatttttgcttcttaaactaaaaaaatcctgaccaatttatttgttgttttctgtgggttgcgacccatgcaatcaaaaagcaaaattttgattgagattttttacagcataggtttttcatataaaaatattctgaatttgttaagcactgccataatatcattataatgtttttgtcttttagtgcttccctatacaattgttaatgcacaaatgatctctaatatatacttacatacgtaaaatcataaagtttggtaatgcagtttatcgttttaaaaataatccacaaagatgtttttatctcacatacttacaactcaacacacagagtgaccatgtgcagctttcttttttgttagatgccacatccgaagactcatcgcagtgtgttatatgacaggacaaagcaaaaacaaacaaaaagcaagcctgtgaatataatttaatttgaaactgctcctggtattatatatttgctagttatctaatgttttaaaagaaaatatacctcatttaggtttgaattgggcgtattgtgtaaatttcaaatattcagaatgcaaagggcttgactattaaatgtttgcctttgatgtttataaacattacaactatgttgttttaagacatttaaaaacgtgaaatttgttatctttgtaaaatgacaatcatgtagaaacctgtcttggttgacaatctctttgaaacatttccgagttaatttcccataggcttcaccaccaagaaagtaagaattgcatctttacataatgatcaaggtataatggaaaaatatacctattcttgaagtagtttattatagttttcaaattgatttataccattattaacctgatgtggtctgcttaaaaaatgaatatatcagtatttagaaataaattgcaaaggtgggaatatatacttaaataatttgtcttaagtaaattagcatttggtagtctgaaatggtgacagattacttgttaaaattgtgaaaactctgttgtgtcctctcttcctacatttgtccctgagagtactccacgattactaggttcttgattcccttatatggcaatcaggcagaggcgttccttaagcattagagagttctgaagcttaagatttgttttggttggatgaagtccttagtacagttgaaaaacagagcattaaagactaatcaattgttttgcctcaccagtcattttaaatagtagaatacttatttctcagtgcttaaaatttctttttcaactgtgagattgaataaacagtctctatttctgtggaaaaaacaacagaaaagagatattaaataccataaaatgtaactctgccttttaaagttttgctgaagaatgtgtctgtggttaggatagcacaagcattaacttttgttttatagttatgctttttaaaattcattgtttttaaatttagacttcttatttccacactggattatgagatacttaacaatttttccaccttatatttcttttacacattttgctgttctcttttttgttattgttatgccaccataccattttgttaaaatgttttctttgtgaaacatttgttcaagttctaataaaattaatgttttcccttaacatggctcaataacttaaaaacgttcatttaaataaaattttaatacttgtttgacaaaaaaaaaaaaaaa

SEQ ID NO: 30891 - DNA, 3527 bp, Homo Sapiens
ggggtggaagaggcttctgcgttgttccttacccgcaacgatgaccatggctttgccttctttaaaattgaggcctccaactctgacgctgactggagaattgaaacccgaacacacattgggctcttttggcacttgactagagctaaaacctcgggattcagcgggcaagcgttgctcagcaacggcgcgtaggctgtgtgcggttggctggagccagaccccaccccggcctcggcccatgctctagaggggacgttgccccaatcctgaaggacttcggcactcgagacctgtggatgccgcgttgctgtggcctgcgggggtgatcatgaagccaggtgctactggcgagtccgatttggccgaagtgctgccccagcacaagttcgacagcaagtccctggaggcctacctaaaccagcacttgtctggctttggggccgaacgtgaggctacgctgaccattgcccagtacagagcaggaaagtccaatccaaccttttatctccagaagggctttcaaacatatgtgctcaggaaaaaaccaccaggttcacttcttcctaaagcacatcagattgatagagaatttaaagtccagaaagccttgttttcaattggattccccgttcccaagcctatactgtactgcagtgatacttctgtcattggaacagaattttacgtaatggaacatgtgcagggtcgaatcttccgtgatttaacaattcctggacttagcccagcagaacgttcagccatatatgtggccacggtagaaacattggctcagttacattccttgaatatacagtcactgcagctggaaggatatggtataggtgctgggtactgcaaaagacaggtatcaacctggacaaagcaatatcaagctgcagctcatcaggacatccctgccatgcaacagctatcggagtggctaatgaagaacttgcccgataatgacaatgaagagaatttgattcatggagatttcagactagataacatagttttccaccctaaagagtgtcgagttatagcagtgctggattgggagctgtcaaccattggtcatcctttgtcagacttagctcatttttccctgttctacttttggccaaggacagttccaatgataaatcaaggttcttatagtgaaaactcagggataccatcaatggaagaactgatttcaatatattgccgctgcaggggaattaattctattcttcctaactggaatttctttcttgccctttcatattttaagatggctggaatagcacagggagtatatagcagatatcttctgggaaataattcatctgaggatagctttttatttgccaatattgtgcaacctctggcagaaactggactacaactctccaaacgaactttcagtactgtactaccacagattgatactactggacagttgtttgtacagactcggaaaggtcaggaagttcttattaaggtgaagcatttcatgaaacaacacattcttccagctgaaaaggaggtaactgagttctatgttcaaaatgaaaattcagtggacaagtggggaaaacctttagtgattgataaactcaaggaaatggccaaagtcgagggtctctggaacttgtttttgccagctgtcagcggactcagccacgtggactatgccttgattgctgaagaaacaggaaaatgcttttttgctccagatgtctttaactgccaagcaccagacacagggaatatggaggttctgcacctgtatggaagtgaggaacagaagaaacagtggcttgagcctcttcttcaagggaacattacctcttgcttctgtatgacagaacctgatgtagcttcaagtgatgccacgaatattgaatgcagcatccaacgagatgaagatagctatgtaattaacggcaaaaaatggtggagcagtggagctgggaatcccaagtgcaaaattgcaattgttttgggaagaactcaaaatacttctctctccagacacaaacagcacagcatgattcttgttcccatgaacacacctggagtaaaaataataaggcctttgtcagtttttggctacacagataattttcatggaggacattttgagatccattttaatcaagtgcgagttcctgccacaaatctaatactaggtgaaggtaggggatttgaaatttcccaaggccgccttggacctggcagaatccaccactgtatgagaacagtaggtttggcggaacgcgctttgcagatcatgtgtgagcgggcaacacaaaggatagctttcaagaagaagttgtatgcacatgaggttgtggctcactggattgctgaaagccgcattgccattgagaagatccgcttgttgactctgaaagctgctcacagcatggacactctgggcagtgctggcgctaagaaagagattgcaatgatcaaagtggctgccccacgggctgtcagcaaaatcgttgactgggccatccaggtgtgcggaggtgctggtgtttcccaggattaccctctggctaacatgtatgctataacccgagttttgcgtttagcagatggacctgacgaagttcatctttcagcaatcgcaacaatggagctgcgggaccaagccaaaagactgacagccaagatataaggagggtggcactgccacatcccactggcagaaactctcctttatacaaacttcattggctccaacatttgaatctcatatttttgtagcagtttgagcacagggttaattattcatttgtggtaaagattatagcatctattttgatcagtgggttttattatttcaagggtcacacagggttaagttcagtaagaaatgctgtagctgttgtcattcaatctagtgcctccttgaggccaggagttcaggaccagcctgggcaacatagcgagacccccattgctacaaaaaatttaaaaatgaaacaagtgtggtggcacatgcttgtagtcctagctacttgggaggctgaggcaggaggattgcttgagtctaggagtttgaggttacagtaagctgtgatcgtgacatggcctccagcctgggtgaccgagtgagactgtttctaaaaataaaaacaaaaaataaatttcttcttgaggtggggtggaggtggggagcaagaatttgacctggctctgatccctggtgtgttgtgtgggcctctttaacgtttgccactgagccttaacctcactgtacttcactgtacttcacacgcattggtgttaacattttaatcttagaagaccctgacccactgagggtttgttgtgagaattgctgaagccacgtagaagcaccttgaaatctgtaaaaccacaagaaagtactttataaaaggtatccttatttgaagtggataaatcttgtaactcgaaaagttgtgatttagaagacaggattgtttttgaacattaggaattaaaggctatatctggtccttaaaaaaaaaaaaaaaaaaaaaaaa

SEQ ID NO: 30892 - DNA, 2965 bp, Homo Sapiens
ttccatcatggcggcgtccatttcgggctacaccttcagtgctgtgtgtttccacagcgccaacagcaacgcggaccacgaaggatttttactgggagaggtaagacaagaggaaacgtttagcatcagtgactcacaaatcagcaacacagaatttctgcaagtaattgaaatccataaccatcagccttgttcaaaactttttagtttttatgactacgcaagcaaagtgaatgaggagagtttggacaggattcttaaagatcggagaaagaaagtcattgggtggtacagattccggcgcaatacgcagcagcagatgtcctacagagagcaggttcttcacaagcagctcacccgcatcctcggcgtgcccgacctcgtctttcttctcttcagcttcatctccactgccaacaattccactcacgctttagaatatgtgctcttcagaccaaatagaaggtataatcagaggatatcactcgctattcccaatctaggaaatactagccagcaagagtacaaagtgtcttcagtgccaaatacttctcagagttatgccaaagtgattaaagaacatggtactgacttttttgacaaggatggagtgatgaaagacatcagggcgatttatcaggtttataatgcacttcaggagaaagttcaggcagtgtgtgcagatgttgaaaagagtgagcgagttgttgaatcttgtcaggcagaagtgaacaaattaagaagacaaatcactcagaggaaaaatgaaaaggaacaagaaagaagattgcagcaggcagtgttaagcagacagatgccgtctgaaagcttggacccagcgttcagtcctcggatgccgtcctctgggtttgcagctgaaggcagaagtacacttggagatgcagaggcctcggatcctcctcccccttactctgattttcacccaaacaatcaagaaagtactttgagccactctcgcatggaaaggagtgtctttatgcctcgacctcaagctgtgggctcttccaattatgcttccaccagtgccggactgaagtatcctggaagtggggctgaccttcctcctccccaaagagcagctggagacagtggtgaggattcagacgacagtgattatgaaaatttgattgaccctacagagccttctaatagtgaatactcacattcaaaggattctcgacccatggcacatcccgacgaggaccccaggaacactcagacctcccagatttaactaaacaaaagaaactctccacctagcactgtttttcttcattgcttactgagagggtttttgagaacttaatctggggggagaactgctttctcagataccttaactcccgagaagagagtccttgtgcacagaacttgtgggagcctccatccgctgctctttacctttggatacagtgtgcaagtttcatgacagaatcattaagataatcaaattgtcctaattctggtgcgattcatggatatactggtaaatttaggcaaagtgaaacttatcagcgtagtttctgttctttaaaataaattggaaattagagactaagcacaattagtctataaatgttctataaatcaaaaacttacctcttgcactatcatgccttgaaatttactttttcaaagggaaacaagtttagcagcagccttcaaagaacttctttctatgatgagccaaattcatctttgccagaaaagaaattttgataattccaagaagcctgattagaacaaatcagatataccttctcttgtctgcatgactttgtgagataaaagagagggcttccaacttttttctactagcttgatatgtattatcacttaaaatggttgcctttaaaaaaaaaaagtagagatactaattaccagtaagtaatcatccaaataaatacgtcataaaataaattaattattttttctttgatggattacagtgactactgtgttgcactggcacatttatggtctctgttctggaatcttggaggacacacagcagtggagaacagaaggagtgagttttataatgaacagattccagacacggtaggtttagctgagttcatacagaggagatataactcatttagatcttctgacaaatcctagtgttagttttatctgtggaggaaagacatttaataataaactgtttgggaatcttggtgaataaagattcattttcaagctgaataaccatacttattttattttaagttgccatttggggaataattgcagtatgtgtagagactctcttgggatgcacttatatttttatttaatgactacttgttttctagttttgcccacaacgtctgaaaccactaagacattcaggagcatgttgagcttctggtttggaaacagcaagacccaccatttatgacaaggacagccatgaggttaatacttggagtttaactgccttccctttgaactagttaaaatctgtaagaataaggaagttgttgaaggcttaaaatctgggttctgaaaaagtagtttcagtttataggatacacatttactcactgagctccagttccaatactaaattagacagtatcatatagacggaaaatgaaatgctagaactgccgttctttggatcgccactctatgggggtctgtcttttaactactctcctggttatgttggccttacaccactgccatttgatttaaaacgctgcagacactttatctgcaaatgtgttccagttgttatcagctacctactacgcagcttcagcgccagtgtgaatttatttttttttaagtgccattaccgtctcctctgttcagattttgacattcaggaaaatatttttattttgatgccatactgaaatctacaatgtatatctgacaaagcagttaaatgtgacaataaaaaacttatttaatcatgaaaaaaaaaaaaaaa

SEQ ID NO: 30893 - DNA, 6010 bp, Homo Sapiens
ccgcggagggagcgagctaggagcgtccacgcccaacgcagtcaccgtcccacggcctcagagagcgaaccgcggctccaccgtcggcggggcgacccccccctccggaccccgcccgcaccccgccccccctccgccgccgtcgcggcggcggggccaggcggcccgagccgtgcagtcggaggtccttgtgcatgaagacagatttgttctatggcctcggagttgggtgccagggatgatggaggctgcactgagctggcaaagcccctctatcttcagtacttggagagggccctccggttggaccattttctgcgacaaacgtcagctatcttcaataggaatatttctagtgatgacagtgaagatggactggatgacagtaatccattattgccccagtctggggatcccttaatacaagttaaggaagaacctccaaattcattgcttggtgaaacttctggagcaggcagttctggaatgttaaacacatattctctgaatggagttctacagtcagaatcaaaatgtgataaggggaatttatataatttctctaagctgaagaaaagcagaaagtggctaaagagcattctgctaagtgatgaatccagcgaggctgattctcagagtgaagacgatgatgaagaagaactcaatctcagcagagaagaacttcacaacatgcttcgactacacaaatataagaaacttcaccaaaataagtatagtaaagacaaggagttgcagcaatatcagtactacagtgcaggcctgctctccacatatgaccctttctatgagcaacaacggcacctacttggacccaagaaaaagaaatttaaggaggaaaagaaacttaaagctaagttgaaaaaagtgaagaaaaaaagacgaagagatgaagaactttcctctgaagaatcccctcgtcgccatcaccaccagaccaaagtctttgccaagttttctcacgatgcacctccccctggcactaagaaaaagcacttatccattgagcagctgaatgctcgtcgcaggaaagtatggctcagcattgtgaaaaaggaactaccaaaggcaaataagcagaaagcttcagctcgtaacctgtttctcaccaatagccgaaagcttgctcaccagtgcatgaaggaggtgcgtcgagctgccttgcaggcccagaagaactgtaaggaaaccttgcctcgtgcccgccgcctcaccaaggagatgcttctgtactggaagaaatatgagaaagtagagaaggagcaccgcaagagagcagagaaggaagctttggagcagcggaagttggatgaggaaatgcgggaggccaagaggcaacagcgaaaactcaacttcttaattacccagacagagttgtatgcccatttcatgagtcgcaaacgagatatgggtcatgatggtatccaggaagaaatcctaaggaaactggaagacagttctacccagagacaaatcgatataggtggaggagtggtagttaacatcacacaggaggattatgatagtaaccattttaaagcccaggccctgaagaatgctgaaaatgcttaccatattcaccaagctcggacaaggtcatttgatgaagatgcaaaagaaagtcgagcagctgccctacgggcagcaaacaagtctggcactgggtttggggagagttatagcctggctaacccatctatccgggctggtgaggatattccacagcccacaatttttaatggcaaattgaaaggttatcaactgaaaggcatgaattggttggccaatctatatgaacagggtattaatggcattcttgctgatgaaatgggccttggtaaaacagtacagagcattgcccttctggcccatctggctgagagagagaacatttggggacctttcttaataatttcacctgcgtctacacttaacaattggcaccaggagtttactagatttgttcctaaatttaaggtgctaccatattggggaaatcctcatgatagaaaagtcatcagaaggttctggagtcagaagaccctctacactcaggatgcccccttccatgtggttattaccagctatcagctggtggtgcaggatgtaaagtatttccagcgggtcaagtggcaatacatggtactggatgaggctcaggcgctcaagagtagttccagtgttcgttggaagatcctcttacagttccagtgtcggaatcggcttttgctaaccgggaccccaattcagaacaccatggcagagctttgggctctgctgcatttcattatgccaacattatttgattcacatgaggaatttaatgaatggttttccaaggacattgagagccatgccgaaaacaaatctgctattgatgagaatcaactttctcgcttacacatgattttgaagccatttatgctgaggagaatcaagaaagatgtggaaaatgaattatctgacaagattgagattctaatgtattgccaactgaccagccgacagaagctgctatatcaggcactaaagaacaaaatttccattgaggatttattgcagtcttctatgggctctacccaacaagcacagaacaccaccagcagcctcatgaatctggtcatgcagtttaggaaggtgtgtaatcacccggagttatttgaacggcaagaaacttggtctccatttcatatttccctaaagccataccacatttcaaagtttatctaccgtcatggacagatcagggtcttcaatcattcacgagacaggtggttaagggttctttctccatttgcaccagactatatccaacggtctctctttcacagaaaaggtattaatgaagaaagctgtttctctttccttcgctttattgatatatctccagcagaaatggcaaaccttatgcttcagggacttttggccagatggttagctcttttcctgtctctgaaagcctcctacaggctccatcagctacgctcctggggagcgccagaaggggagagccaccagagatacctgaggaacaaggatttccttcttggggttaattttccactctcctttccaaacctttgcagctgccctttgttaaagtctcttgttttcagcagccactgtaaagcagtgagtggctactcagaccaggttgtccatcagcggagatcagctacctcctcgctgcgtcgctgcctgctcactgagctgccatcttttttgtgtgtggccagtccacgagttaccgcagtgccattggattcttactgcaatgaccgaagtgcagaatatgaaaggcgagttctgaaggaaggagggagtctggcagccaagcagtgtttgttgaatggggcccctgaactggctgcagactggctaaatagacgatcacagttcttcccagagccagctggaggtctgtggagcatcagacctcagaatggctggtctttcatcaggattccaggcaaggagagcctcatcactgacagtggaaagctgtatgcccttgatgtcctgctgactcggctcaagtctcaagggcatagggtccttatctactcccagatgaccaggatgatagacctactggaggaatacatggtttacaggaagcatacctacatgaggcttgatggctcatccaagatctcggagaggcgagacatggttgctgattttcagaacaggaatgacatctttgtgttcctgttaagcacacgagctggaggactgggtatcaatctcactgctgcagacacagtgattttctatgatagcgactggaaccccactgtggaccagcaggccatggacagggcccaccgcttagggcagacaaagcaggttactgtgtaccggctcatctgtaaaggcaccattgaagaacgcattctgcaaagagccaaggagaagagtgagattcagcggatggtgatttcaggtgggaacttcaaaccagataccttgaaacccaaagaggtggttagtcttcttctagacgacgaagagttggagaagaaactgaggctgcggcaggaagagaaacggcaacaggaggaaaccaaccgagtgaaagagcgcaagcggaagcgggaaaagtatgcagagaagaagaaaaaagaagatgaattggatgggaaaaggagaaaagagggtgtgaacctggtgatcccatttgttccctcggctgataactccaacctctctgctgacggagatgactccttcattagcgtggactcagccatgccaagccctttcagtgagatctccatcagcagtgagctgcacactggctccattcccctggacgagagcagcagtgacatgctggtcattgtggatgacccagcctcctcagcccctcagtctcgagctaccaactctcccgcatccataacaggctccgtctcagataccgtgaatggaatttccattcaggaaatgccagctgcaggacgtggtcactcagcccgaagccgaggccgccccaaaggttcaggaagcacagccaaaggagcagggaagggccggagccgaaagtccacggcaggcagtgctgctgcaatggcaggagccaaagccggggctgcagcggcctctgcagctgcctatgccgcatacgggtacaacgtgtctaaaggaatctccgccagcagtcctctgcagacatcccttgttcggcctgctggccttgctgactttggaccttcaagcgcctcttctcctttgagttcccctttgagcaagggaaataatgttcctgggaatcccaagaacctccacatgaccagcagcctagccccagactctctggtccggaaacagggcaaaggcaccaacccctctggaggacggtaaccatctgggccctccgacttccttcaaccaaaccagggctagagtcctgacctgccagtggtctttggatggcttgccccgtgcagcatcttgcatcctgagtcagaagtggaaatgtccagcaggggaaggacaggcaggtggatggtgtgagcacttttatcatctgtgtctcatcaggagcatctggggtgcctgtaggaggaaggccacagggcatggatcagccccactgcatctcaagtgaactgtatagccaagtcttaaacctctcacggggcaagcctgacacagaccccctttagatgctcaggcatactgtttccatcccgattccactcttcggctctgacacgtcccttgcaaagtctccgcaggtgctgtgaagagccttccatggtagagatttctcttaagagtgtgatttctcatagggctagtaagggagattgtatacctgttgtccacagtcttcaggcagctccccaggtctctgaaccccagagtgtcatcattggagagagcagtgactgcgagagatggtggaggccgctaagcatggtagaggctagaggaagtctatccacaggcagttgtgttcccagcaattcctcccatcctgcatggttcacaccaagagaaccttcagatcctaccagcaaccgtagcaccttccacccaggggactcccagaagccagtaaagagaccaggagccacctcaatcagcagtgtttgcatgggaggtgtttctgcctgtccctgcctgatgtccctggtggagcaggtacctccgggcgggcaagcctctgatttgcacacctgaaaatcgcggaattgagtttcgatagattgatttttaaaacttttttggagtagggggtataggggaatcatttaatttaaatcattaagattcccctgctcaaacccagattcctgtgtacagatgctatttagagggaatcagaaaaatgccaagccttttctctttgaatgtgctatttttataactgaacttgtacatatgtataaagagagacacatcttccttttactaactggataaaaaaatcttaaataaaatggagtgagataattttatgtaaaaaaaaaaaaaaaaaaaa

SEQ ID NO: 30894 - DNA, 3345 bp, Homo Sapiens
ccttcaggcctgaatgtggcggctgcctctgcgaatggacggcgtgggaagagaatggcttctgcaaggaaagccagccgtcccatgcgtgatgtttttggtgacttcagtgatgtttccttggaagattcaacaatggaagaaatcagaaacttccagatcagtagaaatcttaccaaaatagcacctggtcatagcagatttctaaaaagaaaccaaactctagatgagaaacacttactcctgaaagagaaccctgtgctcgggagtggacccaggcttgcctcatgtagaccgcccaccactgcctccaggatccgagccaatgccgcactcatgaagctggcccagctggaaacccggatcatgaatcggaagctgcagaggaatttgtctgacacggaatctgactcaatgaccgccgatgctggtcttccaaagagagctgacagaatcctctctgggggtgcactcgaactcgcgtcccagaacacagacaaaacttcccagaatcaagcccgtgaacttcctgtcaccgaaaataatgcacagaacgcgaaggtcagtaggtttctaaagaagaaacaagcacctgttgaaaacatatcccctgaagcacctgctgggaaagagaggactttgcaaacccccaaacagaaagaacctgctagaacatttgattctccagacagtgacgaagaagaaatgaaagtattgctaggaagcttgatggactcttctagagaaaaaaacacgaatcaaggcttcagcagcgctaacgtcagcgaggaagaagaaagaaaactattttcggtcccatctcaactgagagcatttactgtacccagcgtggaactctccagcgcaaagccttctcagacatcacacctgccaacctccctggcagcagacagaacccttcacagcactcgctcaagagcagactacccacagagtcacgtttccagtgacaccgcctcccacacgccgtcagtttccatcacaggcgccttttcaaactcagtgtctttaaagatggggcatgtcaagcttgtgtcctccccgggaaggagtgaggctgagactgtggacgagccagtctcagaaggtgctgatgacagcctcgacgagtttagaataaatattttatcgcttgacggtctggctccagctgtcagtgagaactccgatttggaacaggaagaggaaagtgctcagagacaaaaaacagctggcaaaatcttcagagccgaggcgtccactgggcaggatgccccgaggcaggcccaggcgaggagctgggcatcacagggaaaggccgcctctgcagagggggatgagagcgaggtctcggagcatctcagtgccagctcggcttctgccatccagcaggacagcacttccagcatgcagccaccatctgaagcccccatggtgaacacagtcagctcagcttattcggaggattttgaaaactctccaagtctgacagcatctgagccaaccgcccattccaaggagtctcttgacagaacactggacgctttgtctgaatcctcttcaagtgtgaagacagaccttccacaaacagccgagtctaggaaaaagtcgggcaggcacgtgacaagagtgcttgtgaaggacacagctgtgcagacgccagatcctgccttcacctacgagtggaccaaggtggccagcatggcagccatggggcctgccctgggaggcgcctacgtggacccgacacccatcgccaatcatgttatcagtgcagatgcaatagaagccctgaccgcttacagcccggccgtgctggcactccatgatgtgctgaagcagcagctgagcctgacgcagcagttcatccaggccagccggcacctgcacgcctccctcctgcgctccctggacgcggactccttccactaccacaccctggaggaagccaaagagtacattaggtgccacagacctgccccactgaccatggaggatgccctggaggaggtgaacaaggagctgtgagcgccagcaggtggagcttgacgtgacgtcttaacaaaagcaaagcaccgcagcttcccagagttaccagcgcagcacttaagacaggatcttacggcggggtggggctcctggaccgtgaccggcgtcgtcttcctggggagtacgacttggaccgggaccgcgactgggaccgggagcggcttctggaggagcgcgacctgctccgacttctgcagggaagggtgcccaagggtcagcagcagccaggcgtcgtggggaggccacaggaaggggcctcaggcactgccctgaggcagcctctgcctacctagatctggagcgggagtaggaacgggagcaggagcgcgaccttgaccttgagtacgagcctgaagacttggaggatcttgagttggagcgggaggaagaacgccctcgactcttggatctgctccgagacctcgagggtccgctgtggggagaggcctgatgatcaggtgccccagtggatgggctgcacccagcccaccctggccctcaggttcctagaccaccccagatgcaggggctctggctgtggatgtggcgccatagccacagcaacggtaccaagttcctaaatagtgtggccgagcctgctgctgtgtgaattcaggccttgtggaaaacaccgccccataggcacaggctgtgtgagggtggacgtgatgagtgtatctggggtctgctcccacccatcacaagctgtggaccctggccccccggccactgcagacatctgcgcttttacctgttcctcttctcctggcctttcctccgccgggcccgcatttttgctcggaagaactcatagaggccgttctgctcccagccttcactgtaagacacggcattccgtgtgtgaccacgtgacacccacccacaaggaagtcgtgaaaaagtcatcaggagttaatccacagaaccttggagagtacatggccctgtggctgtgggctccgagcatgggcgcagtagagcttggttcagtgttcccacagggctgtcctcctgcagcccagtggctcctctggtgcccacgcccttgccaccctgctgttccgctgaggtggtggggacccatggtctgtggaactgggaaacaggaacactgactcatgggtggacaggcctgcagcccagcacaggaaggaggggtgaccactgggaagggtgggctgagggccctgtggcagccggctgcttgagacgtgccgccgtgccacaccttccctaacttcttctgatgtgtctccattaaaacgcccttcattgaaaaaaaaaaaaaaaaaaaaa

SEQ ID NO: 30895 - DNA, 9390 bp, Homo Sapiens
gaggcggtggcggcggaggcggcaccgattgctgtgtcggccccagtgcggccgaagtcgcggtagagcgtagccccacgcccctcccccgtccgcgccctccctctttccctggggatggagaaggcgacggttccggtggcggcggcgacggctgcagaaggagaagggagccccccggcggtggcggctgtggcgggcccccccgcggcggcggaggtcggcggcggcgttggcggcagcagcagagctcgctcggcctcgtctcctcgtgggatggtgcgagtctgcgacctgctcctgaagaagaagccgccgcagcagcagcaccacaaggccaagcgtaaccggacttgccgaccccccagcagcagcgaaagcagcagcgacagcgacaacagcggcggcggtggaggcggcggtggaggcggaggtggcggcggcggcaccagcagtaacaacagcgaggaagaagaggacgacgacgacgaggaagaggaggtttctgaggtggagtctttcattttggatcaggatgatttggaaaatccaatgctggaaacagcttccaagttgctcttatcaggtactgctgatggtgcagacctcaggacagtagatccagaaacacaggctagactggaagctttactagaagctgcaggaataggaaaattgtccacggctgatggtaaagcctttgcagatcctgaagtacttcggaggttgacatcgtctgttagttgtgcgttggatgaagctgctgctgcacttacccgtatgagagctgaaagcacagcaaatgcagggcagtcggacaaccgcagtttggcagaagcctgttcagaaggagatgtaaatgctgtgcgaaagttactcattgaagggcgaagtgtaaatgaacacacagaggaaggggagagcctcctttgtttagcttgttctgctggatactatgagcttgcacaggttttgttggcaatgcatgcaaatgtggaagataggggaatcaaaggtgacattacacctttaatggctgctgctaatggaggacatgtcaaaattgtgaagttgctgctagctcataaagcagatgttaatgcacagtcttcaacaggcaatacagcacttacatatgcttgtgctggaggctatgtagatgttgtaaaggtgctcttggaatccggtgctagtattgaggaccataatgaaaatggtcatacccctcttatggaagctggaagtgctggacatgtggaagtagccagattgctgctagaaaatggggctggcattaatacgcattctaatgaatttaaagagagtgcccttaccttagcttgttacaaaggacacttagagatggtgcgatttcttttggaagcaggcgcggatcaagagcataaaacagatgaaatgcacactgctctgatggaggcttgcatggatggccatgttgaagtagctaggttacttcttgacagcggtgcccaagtgaacatgcctgctgattcatttgagtcaccattaactttggctgcatgtggtgggcatgtggaacttgcggctttacttattgaaagaggagctagcctggaagaggtcaatgatgaaggttatacaccattgatggaagcagctcgagaaggacatgaagaaatggtggcattacttcttggtcaaggagcaaatatcaatgcacagacagaagaaactcaagaaactgccttgactctggcttgctgtggaggctttctggaagtggcagactttctaattaaggcaggagccgatatagaactagggtgttctacccctttaatggaagctgctcaagagggtcatttggagttagttaaatacttattagctgcaggagctaacgttcatgcaacaacagcaacaggggatacagcactaacatatgcctgtgaaaatggtcatactgatgtagcagatgtcttacttcaggcaggcgcagatctggaacatgaatctgaaggtggaagaactcctttaatgaaagctgcaagagctggtcatgtttgtactgttcagttcttaattagtaaaggagcgaatgtgaatagaaccacagctaataatgaccatactgtactgtccctggcttgtgcagggggtcatctggcagtggtggaactacttttggctcatggggcagatcctactcaccgtttgaaagatggctcaactatgttgatagaagcagcaaaaggtggccatacaagtgttgtttgctatctcttggattatcctaataacttgctttcagcccctccaccagatgtcactcagttaactcccccatcccacgatttaaatagggctcctcgtgtaccagttcaagcactgcccatggttgttccacctcaggagcctgacaaaccacctgccaatgttgccaccactcttcccatcaggaataaagctgcttctaaacaaaagtccagcagccatttgccagcaaacagccaggatgtacagggttacatcaccaatcagtctccagagagcattgtagaagaggctcagggaaagttaacagaactggaacagaggataaaagaagccatagaaaagaatgcacagctgcagtccttggaactggctcatgctgaccaacttaccaaggagaagatcgaggagctcaacaaaacaagggaggaacaaattcagaagaaacaaaagattttggaggaactacagaaagtagaacgagagttacaactgaaaactcagcagcagctaaaaaagcagtatctagaggttaaagctcaaagaattcaacttcagcaacagcagcaacagtcttgccaacacctgggattactaactcctgttggagttggagagcagctttctgagggagactatgcacggttacagcaagtggatcctgttttacttaaagatgaaccccagcagactgctgctcagatgggttttgcgccaatccagcctctggcgatgcctcaagctttgcctctggcggcaggtcccttgcctccagggtccatcgcaaatcttacagaactgcaaggagtgatagttggacagccagtactgggccaagcacagttggcagggctggggcaaggaattctgacagaaacacaacaagggttaatggtagccagccctgctcagaccctcaatgacacgctggatgacatcatggcagcagtcagtggaagagcatctgcaatgtcaaacactcctacccacagtattgctgcatccatttcccaacctcagactccaactccaagtcctatcatctctccttcagccatgcttcctatctaccctgccattgatattgatgcacagactgagagtaatcatgacacggcgctaacacttgcctgtgctggtggccacgaggaactggtacaaacactgctagagagaggagctagtatagagcaccgagacaagaaaggttttactccactcatcttggctgccacagctggtcatgttggtgttgtggaaatattgctggacaatggtgcagacattgaagcccagtctgaaagaaccaaggacacaccactctccttggcttgttctgggggaagacaggaggtggtggagctattgttagctcgaggggcaaataaagagcacaggaatgtttctgattacacacctctaagtctggctgcttctggtggctatgtgaacatcatcaaaatattactaaatgcaggagctgagattaactctagaactggtagcaaattgggcatctctcctctgatgttagcagctatgaatgggcatacagctgctgttaagctcctgttagacatgggctctgacataaatgctcagatagaaaccaatcggaacactgcccttactttagcctgcttccaaggaagaactgaagtggttagtcttctgcttgatagaaaagcaaatgttgaacacagagctaagactggtctcacaccactaatggaagctgcctctggtggatatgcggaggtgggccgagttcttttggataaaggtgctgatgttaatgcccctccagttccctcctcaagagatacagctttaaccatagcagcagataaagggcattacaaattctgtgagcttcttattggcaggggagctcatattgatgtacgtaacaagaaggggaacactccattgtggctagcagcaaatggtggacacctcgatgtggttcagttactggtgcaagcaggtgcagatgtggatgcagcagataaccgcaagataactcctcttatggcagcatttagaaagggtcatgtgaaggtggtgcgctacttagtcaaagaagtcaatcagtttccatcagattctgaatgtatgagatacatagcaaccatcactgataaggagatgctgaagaagtgtcatctttgtatggagtcaatagtacaagccaaagatagacaggctgctgaagcaaacaaaaacgccagcattttgttagaggagttagacttggaaaagttaagggaagaaagtcggaggctggctttggctgcgaaaagagaaaaaagaaaagagaagagaaggaagaaaaaggaagaacaaagaaggaaactagaagaaattgaagccaaaaataaagagaactttgaactccaagctgctcaagaaaaagaaaagcttaaagttgaagatgagcctgaagtcttgacagaacctccaagtgccacaaccactactaccataggtatatctgcaacctggacaactttggcaggttctcatggtaaaagaaataataccataactacaaccagttcaaagaggaaaaacaggaaaaataaaattactccagaaaacgttcaaattatatttgatgatccactaccaatttcatacagtcagccagagaaggtgaatggagagtccaagagcagcagtaccagcgagagtggggacagtgataacatgaggatttccagctgcagcgatgaaagtagtaacagcaacagcagtcgtaagagtgacaatcattcaccagctgtggtcactaccactgtgagcagcaaaaagcagccatcagttcttgttacatttccaaaggaagagagaaaatctgtttctggcaaggcttcaataaaattgtcagaaactatcagtgaagggaccagtaattctctatctacttgtacaaaatctggtccatctcccctttcttctccaaatgggaagttaacagtagcaagtcctaagcgtgggcaaaagagggaagaaggatggaaagaagttgtaagaaggtcaaagaaagtatctgttccatcaactgtgatatccagagtgattggaagaggaggctgtaatatcaatgctattcgggagtttactggtgcacacatagatattgataaacagaaagacaagactggagaccggataatcactataaggggtggcactgaatcaacaagacaagcaactcaattgattaatgctttgatcaaggatccagacaaagaaattgatgaacttattccaaagaatcgtttgaaaagctcctcagcaaattccaaaatagggtcatcagcacctaccaccactgctgctaacacttccttaatgggaattaaaatgacaactgtagctctgtcatcaacatctcaaactgccacagcactcactgtgcctgcaatttcttctgcatccactcacaaaaccattaagaacccagtgaataatgtgaggcctggttttccagtttctcttccattagcatatcctcctccacagtttgcacatgctttgcttgctgctcagactttccagcagatccgtccaccaaggttgcccatgacccactttggaggtacttttccaccagctcaatccacttggggtccgtttcctgtcaggcctttgagccctgccagagctactaactcgcctaagcctcacatggtgcctcgccatagcaatcagaatagcagtggttctcaggtgaattcagcaggttctttaacttcaagcccaacaactacaaccagttcatcagcttcaacggtgcctggtacatctacaaatggcagtccaagttcaccttctgtccgaaggcagctttttgtcacagttgtgaagacatccaatgccaccacaacaacagtcacaaccacggcaagcaacaacaacactgcacccacaaatgccacatatcctatgcctactgccaaagaacactatccagtatcatccccatcttccccatcaccaccagcccagccaggaggggtttctagaaacagccctttggattgtggatcagcatctccaaataaagtggcatcttcctccgaacaggaagcaggtagtccaccagtagtagaaacaacaaacactagacctccaaacagcagcagttcttctgggagttcatcagctcattctaatcagcaacaacctccgggatctgtttctcaggaaccaagaccacctcttcagcagtctcaggttcctcccccggaagttagaatgactgttcctcctttagcaacaagttctgctccagtggcggtgccttctactgccccagtgacttaccctatgcctcagacaccaatgggatgcccccagcctactcctaaaatggaaacccctgctattagaccaccccctcatggcacaactgcccctcacaagaattcagcttcagtgcaaaattcatctgttgcagtcctcagtgtcaatcacattaaaagacctcacagtgttccctcttctgtccagctaccttcgaccttaagtacacaaagtgcttgtcagaattcagtacatccagcaaataagcctattgctcccaatttcagtgcccccttaccatttgggccctttagcacattgtttgaaaacagccctacttctgctcatgccttctggggaggatctgttgtttcatctcagtcaacaccagaatctatgctatcaggaaaatcctcatatttgccaaattcagatcctttacatcagtctgatacttccaaagctccaggttttagaccaccattacagagacctgctccaagtccctcaggtattgtcaatatggactcgccatatggttctgtaacaccttcttcaacacatttgggaaactttgcttcaaacatttcaggaggtcagatgtacggacctggggcaccccttggaggagcacccgcagctgctaactttaacagacaacatttttccccgcttagtttgttgactccgtgttcatcagcatcaaatgattcttctgcacagtcagtatcctcgggagttcgtgcaccatctcctgccccatcatcagtaccgttagggtcagaaaagcccagcaatgtgtctcaggacaggaaagttccagtccctattgggactgaacgttctgcacgtatcaggcaaactggaacgtcagctccatctgttattgggagcaatttgtctacatcagtaggacatagtggcatctggtcctttgaagggattggtggcaatcaagacaaagtagactggtgtaaccctgggatgggaaatcctatgatccacagaccgatgtctgacccaggagtattttcacaacatcaagcaatggagcgagatagtacaggaattgtaactccttctggtacattccatcagcatgttcctgcaggctacatggactttcctaaagttgggggtatgcctttttctgtgtatgggaatgcaatgattcctccagtagcacctatccctgatggtgctggaggacccatatttaatggccctcatgctgcagacccttcttggaactcactgataaagatggtttccagctccacggaaaataatggccctcaaacggtgtggactggaccctgggcacctcacatgaacagtgtgcatatgaaccagcttggctgatgaggatcagcttgttagcctgcagattccttttcatttggaggaaatcacaagtggccgaaaaaaaaaattatgctcccaaatcattctactgatgtgcttgactgaagtgtgtaggctttttgcagaagatcttactaactgacctattttctgtgaacatttgtgactgcccattccccatcatcatccgttttaccttagttagcatttttcttatcatttttctttttttctttccctcttcccctttggacataactttctgttgaagctgttctttggctggttggttttagtactgtaaactgcttctgagcaaacacggaaatttagcaaaattatgtaaacttgatcctgaagttttagaatggcaaataaatgtacaattgtttacataacagaaaaggctaagcagaaagtaaatttcaatatgtcagtatagaggctctactttatgtagacttaaattaatgtgagatatgtaccttcatattcagaaatctggatgtttccttcatacattaaactattaataagcataacttttctactggtgtaatttaagtataaagtaaaataatgggcattatcattggatgtttccccacattggcttttaaaatacccatcttgctttctttttggtttatttgtagcaaggcacatatagaagaagaaatttctggcttttccatgttgttttattaccttttctcacttttaaaactaatacagacttatctcctcactcctttttctctccttacctttaccactaataccagtaaaattatctttctgatagtgaaaaggttctgtcaagattttcactgtaatggctgctacagagatggaccatcttcatcatcaccagtggtttcttctaattataaaatgtttaaactttctgagaatttaaaaagccaccactgttcccagtcagcatatacaagctcttaatattctgtttattaaataattcaatgtactattttatattggatgatattgattcttaacattggcttttcagtcatcaacagtcaacataaaaatttcaattttcagtaatttagtggaaaatatcttatttcttttttcaattttaaaggcttcctgcttttttacccttgtatattatcagtgaaaaggatcaacagttaatttgagccaagtaataaaagaaattctgcatttgtcacgaagacaatttatggtagacagataaatacacagattacagtgtaaagtctccatttaacctgtttataaaagatacaaggccacactaaactactcagtgggatttatatattccatccacttgaaacaataaacagtaatgtatccaagaagattatgtgtcctaccctgtctcatggaaaaattaattatatggttgaaatgtaaaagaaagtaagcataaaaatcgagtaatgtataaaaaaaaaaaaaaaa

SEQ ID NO: 30896 - DNA, 10389 bp, Homo Sapiens
atgaccaatgggtctgtgttttggaccggcgaagcccaatggcgcgacagggaaggcgggcccgagatgggttagggtgtccttgcagggtgtctgagctaaacttcaccaaataatagctgtttgtattttggctgctgcaggagccattttagaaataaatatcttccttcaatagatgaaaatgaaaatacagaaaaaagagaagcagttgtcaaatttaaaagttttgaatcactccccaatgtctgatgcctctgtcaattttgactacaaatctccatccccatttgactgcagcactgatcaagaagagaaaattgaagatgttgctagtcactgtctgcctcagaaggacctgtatactgctgaagaggaagctgctaccctttttcctaggaaaatgacatcccataatgggatggaggacagtggaggaggaggtactggagtgaagaagaaacggaagaaaaaggagccaggagaccaagagggtgcagcaaagggaagcaaggacagagagcccaagccaaagaggaaacgagaaccgaaagagccaaaggaacccagaaaggccaaggagccgaagaaggccaaggagcacaaggagccgaagcaaaaagatggggcaaagaaggcacggaagccccgggaggcctcgggcaccaaggaggccaaagagaagaggagctgcactgactctgcagccaggacgaagtccaggaaggccagcaaggagcaaggaccaaccccagtggagaaaaagaagaaaggaaaaaggaaaagtgaaactacagtggagagtttagagctggatcagggcctgacgaacccatctctgcggagtcctgaggagtccactgagtctacagacagccagaaacgacgctcgggaaggcaagtaaagcgcagaaaatacaatgaggacctggacttcaaagtggtggatgatgatggggaaacaattgctgttcttggagctggtcgaacatctgcactctcagcctctacactggcctggcaggcggaggagcctccagaagatgatgcaaacatcattgagaagatcctggcatctaagactgtccaggaggttcacccaggagaacctccgttcgacttggagctgttctacgttaagtatagaaatttttcctacttacattgtaaatgggccacaatggaagagctcgaaaaggatcctcgcatcgcacagaagatcaagcgatttaggaataaacaagcccagatgaagcacatttttacggagcctgatgaagacttgttcaatccagactatgtagaagttgatcgcatcttggaggtggcccacaccaaggatgcagaaacaggggaggaggtaacacattacctggtgaagtggtgctcactaccatatgaagaaagcacgtgggagctagaggaagatgtagatcctgcaaaagttaaagaatttgaatctcttcaagttctccctgaaattaagcatgtggagcggcctgcttcagactcctggcagaaacttgagaagtctcgcgagtataagaacagtaaccagctccgggagtaccagctggaagggatgaactggcttctttttaactggtataacagaaaaaactgtattttggctgatgagatgggcctagggaaaaccatccagtccatcacattcctttcagaaatatttctgagaggaatccacggcccttttctcattatcgcccctctctccaccatcactaactgggagcgggagttccggacatggacagagatgaatgccattgtgtaccacggcagccagatcagcaggcagatgatccagcagtatgaaatggtgtacagagacgcccagggaaaccccctttcaggagtcttcaagttccacgtcgtcatcacaacatttgaaatgatcctagcagactgcccagagttgaagaagattcactggagctgtgtgataattgatgaagcccacagactgaagaataggaactgcaaacttctggagggtctaaagcttatggccctggaacataaagtgcttctcactggaacacccttgcagaactctgtggaggagctcttcagtttgttaaattttctggagccatcacagtttccttcagagaccgctttcttggaggaatttggagatctgaaaacagaggagcaggtaaagaaactgcagtctatcctaaaaccaatgatgcttcggcggctgaaagatgatgtggaaaagaaccttgctcccaaacaagagacgatcattgaggtggaactgaccaatatccagaaaaagtactaccgtgccatcctcgagaagaacttttccttcctgaccaagggggcaaatcagcacaacatgcccaatctcatcaacaccatgatggagctgaggaagtgctgtaaccatccctacctgatcaatggagcagaggagaaaattctagaagatttccgaaaaacccacagccctgatgcccctgactttcagctgcaggccatgattcaggcagcaggaaagcttgtgttgattgataaactactccctaagctgattgcaggtggccacaaagtactcatcttctcccagatggtgcgctgcctcgacatcctagaagattacctcatccagagaagatacacctatgagcgaattgatgggcgagtacggggaaacctgcgccaggcagccatcgaccggttctgtaagccagattcagaccgctttgtctttcttctgtgcaccagagcgggaggcctggggatcaatctcacagctgctgatacctgcatcatatttgattctgactggaacccacaaaatgacttgcaggctcaggcccgatgtcaccgcataggccagagcaaagctgtgaaggtgtatcgcctcatcactcgaaattcctacgagcgcgagatgtttgacaaggccagcctaaagctggggctggacaaggctgttcttcaggacatcaaccgaaagggcggcaccaatggggtacagcagctctcaaaaatggaggtggaggacctactccggaaaggtgcttatggagccttaatggatgaagaagatgaaggctccaagttctgtgaagaagacatagaccagattctgcagaggcgaacgcacaccatcaccatccagtctgaggggaaagggtccacttttgccaaggctagctttgtggcttcaggaaacagaacagatatttccttagatgatcctaacttttggcagaaatgggctaaaatagctgaactagacactgaagcaaagaatgaaaaggaaagcttagtgatcgaccgacctcgcgtgagaaagcagaccaaacactacaactcgtttgaggaagacgagctcatggagttttcagagttagacagcgactcagacgaaaggcccacgagatccaggcgcctcaatgacaaagccaggcgctacctccgagcggagtgcttccgggtagagaagaacctgctcatctttggctggggccggtggaaggacatcctgactcatggccgattcaagtggcatctgaacgagaaggacatggagatgatttgccgtgccctcctggtgtactgtgtcaagcattataagggggacgagaagatcaagagtttcatttgggaactgatcacacctaccaaagatgggcaagcccagaccctccagaaccactcaggcttatctgccccagtccccagagggaggaaggggaagaagacgaagaaccagttgctaatcccagagctaaaggatgcagattggctagccacctgcaaccccgaggtggtcttgcatgatgatggctataagaaacacctcaaacagcactgcaacaaagtacttttgcgagtccggatgctgtactacctaaaagctgaaatactgggagaagcagctgagaaagcatttgaaggatctcctgccagggagctggatgtacctctgcctgacatcgactacatggagatcccagtggactggtgggatgctgaagccgataagtcacttctcattggcgtgttcaagcatggttatgaaaggtacaatgccatgcgagcagacccagcactttgcttcctggagaaagttgggatgcccgatgagaagtccctttctgcagaacagggtgttacagatgggacctcagacattcctgaaagaggcaacacagataaagaagacaatgctgaggacaaagtagatggcctccagaaacaaacggagagttccagtgatggaggtgatggcgtttttagcgaaaagaaggatgacagccgggcagcccaggatggctccgacccagacaaatcgccctggccagtttcctccgccctcacagctcgtctcagacgtctggtcactgtttaccagcgctgcaaccgcaaggaactgtgccggcctgaaattctgggaccaggtaaccaaggatattgggttcaggaagagatgttcaggagaacctcagaaatggacctcatcaacaaggaagcccaaaagaggtggactaggagagaacaagcagacttctatagaacagtgtcttcctttggtgttgtttacgatcaagaaaagaaaacctttgactggacacagttccgcatcatttcccgtttggacaagaagtcggatgagagcctggaacagtatttttatagttttgtggccatgtgccggaatgtctgtcgtctacccacatggaaagatggcggtcccccagataccaccatctacgttgaacccatcactgaggaacgtgctgcaagaactctgtaccgcattgaactgttacggaaagtccgagagcaagtgctcaagtgccctcagctgcatgaacgcctccagctgtgcaggcccagcctctacctcccagtctggtgggagtgtgggaagcatgatcgagacctgctcatcggcactgccaaacatgggctgaaccgcactgactgttacatcatgaacgacccccagctgtccttcctggatgcctatagaaactatgcccagcataaaagatctggcacccaggcaccaggaaatctctgttgcctttaccagaccaactccaagttatatgaatctcttacatattctcaaatgagtaggacttcagagtcccttgaaaatgaacctgaaaatctagtgagagtagaaagcagagatgatcatctcagcctgcctgatgtgacatgtgaaaactttatttctaaagttcaggatgtcatttccatcaaccatgatgaaagtctgctgcctgagtccttagagagcatgatgtatggtaagaaggtgctcagccaagaaccaagctcttttcaggagagcccaagtaccaatactgaatctagaaaagatgttattaccatctcaataagcaaagatgggaactgccagtctggtggccctgaggcagaaatagcttctggccctacttttatgggtagcttagaagcaggaggagtagctcaagcaaacatcaaaaatggaaaacatttgttgatgtctatttcaaaggaaggggagctctgctgcagtgaggcaggacagagacctgaaaacattggccagctggaagccaagtgtttagcttccccttccttgaatccaggaaatgaaagtgggtttgtagatatgtgcagtcttagtgtctgtgactccaaaagaaacctgtcatcagatcagcaattaattgatttattggaaaacaaaagcttagaaagtaaattgattttgagtcagaaccacagtgatgaggaggaagaagaggaggaaaacgaggaggaaaacttagccatggcagtaggcatgggggaaaggccagaggtattgcatctcacggagcccactactaacatctcaagggaaaagaaccaaggcttccaagatgaaaccaagaaaggaagcttagaggtggcaaaccagactcctgggctacagagggctttccccgctccagcagcctgtcagtgccactgcaaacacatggagaggtggatgcatggcctcgagaatgatgaatttgaaatcgagaaacccaaggcttatatcccagatctgttcaaaagtaaaaccaatactatcgccatggagggtgaacccactgctattccatcacagccgtttaaagtgaagcatgagcttttaaaagaaccttggaaagaaagtgcagaggggcaaaacgttttccccacatatcctcttgaaggaagtgagctcaaatcagaagacatggattttgagaataaagatgattatgatagagacggaaactgccatagtcaagattatccagggaagtactctgaagaggagagcaagagctcaacatcgggcatcacaggagacattggggatgagctacaggaggctcgagctcccactattgctcagctgctacaggagaaaactctctattccttctctgagtggccaaaggaccgcgtgataattaaccgcctagataatatctgccacgtggtgttaaaggggaagtggccctctagccagcagtatgagccctcaggcacactgcccaccccggtattaaccagcagtgctggttctcgaaccagcctctcagagccggaagcagcagaacacagcttcagcaacggcgcagcattggcggcccagatccacaaggagagcttcttagctccagtattcacaaaggatgaacaaaagcacaggcgtccctatgagtttgaggtggagagggatgcaaaggctcggggcctggagcagttctctgccacccacgggcacacccctatcatcctcaatggctggcatggggagtcagctatggacctctcctgctcatcagaggggtccccaggagccacatcccctttcccagtgagcgccagcacccctaagattggggctatcagttcacttcagggagcccttggcatggacttgtctgggattctgcaagctggcctgatccatcctgtgactggacagattgtcaatggaagcctcagaagagatgatgcagccacgaggaggcggagagggaggcggaaacatgttgaaggagggatggacctcatctttttgaaggagcagacacttcaggcgggaatcttggaagtccatgaagacccagggcaggccaccttgagcaccacacaccctgaggggccagggcctgccacctcggctcctgagccagctacggcagccagcagccaagccgagaaatccattcccagcaagagtctgcttgactggctaaggcagcaggctgactactccttagaagttcctggctttggggcaaatttttcagacaaaccaaagcagaggaggccacgctgtaaagaacctggaaaattagatgtcagctccctgagcggggaagagagagttcctgccatccccaaggagccaggactgagggggtttcttccagaaaacaagttcaatcacactctggctgagcctattcttcgagatacgggcccccgcaggagggggaggcggcctcggagcgaactcctgaaggctccttccattgtggcagactctccctctggaatggggccactgttcatgaatggactgattgctgggatggacctggtaggacttcagaacatgagaaatatgccaggcatccccctcaccgggctggtggggtttccagctggctttgccacgatgccaacaggtgaagaggtcaaaagtaccctgagcatgctgcccatgatgctgccaggcatggctgctgtgccccagatgtttggtgttgggggactcctcagtccacccatggcaaccacctgcacttccactgctccggcgtctctatcaagcacaacgaaaagtggtacggcagtgactgaaaagactgcggaagacaagccgagtagccatgatgtgaaaacagacactttagctgaggacaagcctggtccaggtccattttctgatcagtctgaacctgcaataactactagtagtcctgtggcttttaacccatttctcatcccaggagtatctcctggactcatttacccatccatgttcctctcccctggtatgggcatggctctgccagccatgcagcaggccagacactcggaaatagtaggtctggagagccagaagaggaagaagaagaagacaaagggggacaaccccaactcccacccagagcctgctcccagctgtgaaagggagcccagcggtgatgagaactgtgccgaacccagtgcccctttgcccgcagagagagaacatggggcacaggctggggagggggcactcaaagactccaacaacgacaccaattagaacttttttcatttaagaaattattgtgacttgtaagtttcttatcccataaaggtttgttacttccctcacttcacctccataagaacctgtgtttccataagtaagattacgtacctgatttcctgtctgagaactatggtaacagatgttaatagttgcagggtctcaccacttcattagataagtgttgtctacctagtctaggaggcacagaattctcattctgttatccagttcattccagcaatcatagttaatacagtacttggtgacacgccctacccccttctcttccaagtttcccactcacttgaggaggaaaaatggcaaaagaaagctgtctagggttttaccattgaagggtggaagaacagagacaaagaggagctctttttctgtgagctgggttgcacaggaagaatgtcacagggaaccaaaaagcacagaaaaaggaagtgctggtgcatatttttgagttaaaatatttccctattttatcatgattactaagtgagtagtatagacagaagtatataactaatggttgaaaatacatatattcatttctttataaaaaacaaaaaccttaccggtagtaatataatttcccccttggtggtttttcagacacctgcagcaagaagaaatactgactgactaggcattattttctatacatccctctcaccagtgaaaagattcctcttgctgcgagaaagctttacccaccatgagttattgctgtcgacgggggtggggcaaggacccgcgctccgtagagctacacgctgcttcacaagcacacggctagcgctctgctctcacctggttcgcttacagatttctctagccattaatttgcctctctgtgtttaaagagcaccaggaccgaatggattttcacttcaggctttccttcaccaagaataaggttctttctggagcctgcaagaagacagttgcccaacactttgacacttgctagtaggtcctttgatcaagagtgtctgaggctgtcaaatgtgtgccaccctttataatacagctatgaaaagttacttctccattaatttctccattctgtttatatcttacagttggacccaaattccaaattatcagttaatcgaaactacattgcaagtcaacattattttctcttcttcctcagcttctccatgtttaggaactgagaaagaacctgcctaagcagcacttccccatgtcctttcaccttcatgttaacgtcccttctgatggtctcactcttcacaggtagttcacactctgagacttgaagtaagctcatggttcagtactctgggggcgcagggctgcgcaggacccttggaaatgttgcaagtgttactagtaccagtttcactttttgttgtcacaatttactgtattttttactttttctgttacagttttgctaatttatcagaaggtccaaaagtctgacataactatttcattttgcattatttatttatgatgcttttttcattgtcttttatacatttgggattataaattatgtaaatgttaaaatgagcatctcaaagaagtctgttaaatcatgactgaaaaaaatcaatcagatgtatcttcaaaaagtggagtcccagttttatgaatcagagatataaaccagaaattctataactgatcatagaagaagaatccagtaattgaacaaatcctatttaatgacatccttgtagcatagatggtctataatgctgaccacagatttcttagaaatgctgctctctctatttaactaacattttgttcagttttgcctccagtggaagcagaaagggttttttcagctgttaaatcctaaaaatcaatataatttatttatgtaagaaaaataactcaatcaatatatttttgaaccttttaagtactaattttctttttatcaagtagaaaaaaaaatgtatttgccctaaatccttaaaatacaaatgctataaaaattcctgtatcttgaaagccttactgcaaatgagtattatagacatccagcagagtctggttttctttgt

SEQ ID NO: 30897 - DNA, 2821 bp, Homo Sapiens
ccacgcgtccggtgacggacccccgccgcccgcggctcgggacccctgcctaccctccttcttgcccgccgggctgtggaactagcgcgtgccccctcgccggcctcgacgtctcccgtccgcccctcactcgtggcagggcgcagctcctggtccgtcacctgcgcgccgccccacgcggccgggctgcgggtctagggggtccgcgtctccctggctttccaagggctaatgccgtgattctagagcggctgggcgtctagggcctcgcttcaaggttactgactttttatgatgtttggtggctatgagactatagaagcatacgaagatgatctttatcgagatgagtcatctagtgaactgagtgttgatagtgaggtggaatttcaactctatagccaaattcattatgcccaagatcttgatgatgtcatcagggaggaagagcatgaagaaaagaactctgggaattcggaatcttcgagtagtaaaccaaatcagaagaagctaatcgtcctttcagatagtgaggtcatccagctgtcagatgggtcagaggtcatcactttgtctgatgaagacagtatttatagatgtaaaggaaagaatgttagagttcaagcacaagaaaatgcccatggtctttcttcttctcttcaatctaatgagctggttgataagaaatgcaagagtgatattgagaagcctaaatctgaagagagatcaggtgtaatccgagaggtcatgattatagaggtcagttcaagtgaagaggaagagagcaccatttcagaaggtgataatgtggaaagctggatgctactgggatgtgaagtagatgataaagatgatgatatccttctcaaccttgtgggatgtgaaaactctgttactgaaggagaagatggtataaactggtccatcagtgacaaagacattgaggcccagatagctaataaccgaacacctggaagatggacccagcggtactattcagccaacaaaaacattatctgtagaaattgtgacaaacgtggtcatttatcaaaaaactgccccttaccacgaaaagttcgtcgctgcttcctgtgctccaggagaggacatctcctgtattcctgtccagcccccctttgcgaatactgtcctgtgcctaagatgttggaccactcatgtcttttcagacattcctgggataaacagtgtgaccgatgtcatatgctaggccactatacagatgcttgcacagaaatctggaggcagtatcacctaacgaccaaacctggaccacccaaaaagccgaagaccccttcaagaccatcagccttagcatattgctatcactgcgcgcaaaaaggccattatggacacgaatgtccagaaagagaagtgtatgacccgtctccagtatctccattcatctgctactatgatgacaaatatgaaattcaggagagagaaaagagactaaaacaaaaaataaaagtactcaagaaaaatggggttatcccagagccatccaagctaccttatataaaagcagcaaatgagaacccccaccatgatataaggaagggccgtgcctcatggaaaagcaacaggtggcctcaagaaaataaagaaacacaaaaagaaatgaagaacaagaatagaaactgggagaagcacaggaaggctgacagacatcgtgaagtggatgaggattttcccaggggccccaaaacctactcttctcctggcagttttaaaacccagaagccttctaagccctttcaccgttcatcacattaccacacgtcaagagaagacaagtctcccaaggaaggcaagaggggcaagcagaagaaaaaggagaggtgctgggaagatgatgacaatgataacttatttcttattaagcagagaaaaaaaaagtcttaagccgtcaggcagcctctgatgtggcttttcattgttcatttggcctttgtgtctataaccttctggcactgtgtttattatctatgattaaataaagtgagtttttggttttgtttttttaatttcagccattcctagagttactgaatatccatggagatctcaattctctgtgtccaacaggatattaggtaagaaagtacaaagataaacctggacttctcctattccaatatgtcatctttactcagaatcctagggataggtagaagaattcatcttttcaagaaagtgttttaaaaatactttggaaaaaaaactgcatcaaaggtaatttatcctcaaattaaatccttgcaggaagagaaattaacactaagaaaaagtcatcaatatttttcaactttttttttttttttttttactttggaaaggacaataactataaacctatatccagattttctttctgctgaagctgttgtcagaatcttcctttggacaaaacatcactagctgactataaaaacaaaagtgtcatcattgaagccctgaagaggcagggaattgagcttcagcaaaatacaggaaaagaactatccagtataaatgtcagaagacagatttcctaaacaagtaaaagagacatcaaaaattttaacataatcacaatgaaatcattttttaccacttttacagcggtgtttcaagcggactgtcactcagatctgcagagatgaatattactcaaaaaatttttttgttctcttgcatttttttcaactaccgcaaagctatacagatttttttgtacttgtggatcttttgtacttctcataacctaatgtcagactaagaaaaataaaatatctgagagtaaaaaaaaaaaaaaaaaaaa

SEQ ID NO: 30898 - DNA, 2587 bp, Homo Sapiens
aaagttgctagctgggggcagagacggccacgcggttgcaggagtaagagatccctctgtggcgaattggccaacggctcctttcaaccctgcctcgttggtggccactggagaagcgcggggggctcccccagacagccgtggggacaagttagagccagcactttaccccgggccttgcgtgtagcttcccctcccctactctcggtgccctggtgtctggaggggggttgtgggggtgtgcccgccttacatggtccaccacccgggcaaccctctgggcttgtgttccatctcactcttgcttcctgtactgtggtcaaggggaaccactgcatcatgtcccggtatagctaccagagtctcctggactggctctatgggggcgtggaccccagttttgcaggcaatgggggccccgactgtgctgccttcctctcttggcagcagcggctgctggaaagtgtggtggtcctgaccctggctctgttggagatcctggtggccctgcggcacatcctgaggcagacgaaggaggacggtaggggtagccctggcagccagccagagcaggtgacccagcggccagaggaaggcaaggagagcctgagcaagaatctgctcttagtagccctgtgcctgaccttcggggtggaggtgggctttaagttcgccaccaagaccgtcatctacctgctcaacccctgtcacctggtcaccatgatgcatctcccctttgaattggagatttactacattcagcatgttatgctctacgtggtacccatctacctgctttggaaaggaggtgcttacactccagagcccctcagcagtttccggtgggctcttctctcaactggcctcatgttcttttatcacttcagcgtcttgcagatcctcggcctggtcaccgaagtgaatttgaacaacatgctgtgtccggccatctcagacccattctacggcccctggtatcgcatctgggcctcgggacaccagactctcatgaccatgacccacgggaagctggtcatcctgttctcatacatggctgggcccttgtgtaaatatctgctggatttgctccggcttccagccaagaaaatagactgaaggtgcttatttttttttttttcctccctgaggaagcaagtcgtgacttgacttggagaacacccagttcttgataaaatcatgggagagggcagtaggatgtttggtgtatttctttttcctcctttctgtccctttcttctaccactcttcctttcccagctcttccccctacgatgtctccttgagcctggggtgtagtgctgggcgctggattttcctccttccctttggctctctcctcaaacttcatcgcattcatagaagctgcttgcagggtcgccgggctaaccagggtgatcggcgaactttaccgtacagtacctcagtctagctgtcagatcaccccttttgctgtagcctctgttgaggtttttatatttgtgatcattggtaattcagtgtcctatgaagtgggcacagctccccacagagagcaagttgtcagcaggtctctgtgcactggtattggggcagggcagtgccctgggggtaagctaggtggctcagggagtggcagaagggccatttttccctctgccaaaaagacttccttggatttgtagatgttgacccagagtcctctgtcccctcctgaagaggattttcttactggtttctactgaaggggaggtaggggaggaggaaaaaaggaccatgtgtgatgctgttagacaagacactgacgctgattatggagggtctcctgcaggcccttgtgggctccttggcaaggccccaggctgggaaggagctccccccactgcccatcctgcccgctttgtggcgggtagagtcagtgacagggaggcagccctccttttgtgtatatagagtgagctgatttgggctcaggaaaacctagtcgcttgttgctctcgtctgtgacatttttgtacactggtttgctactcatggcaagaaacagacaaagccccatgaaaaataaaacaaaacaaaagtcatttcaaacaaagctgttgttttgaaaactcttgctttcttttggtgtccattttgtgttctattttaaagaatctttcatttatattggtgttattgtagtgaagagaatgtgataggctgatctgtaatggtttctgtcaggagcttagcaaatgcctctgcccctcttcccctacccctgtccttcctcagttcccagctgggattgctatgcactgggcagacccgtcactgtctcccctgaacccccacacagtggcttcccttagaaccagtctttgtactctccctaaacagcagcaggcttaggatttttgtcaggctggttcttgcgtgctctgtgcccccaccagtttgctcacctcttggggcattttgtaatgtgttttctctgtcttgtaaaaccttttgattgtaccgaaatggtatctgcagtcgcctttggaaataaatggtcattaatttgtgtacttagcattctgaaaaaaaaaaaaaaaaaaaaaaa

SEQ ID NO: 30899 - DNA, 5224 bp, Homo Sapiens; identical to SEQ ID NO: 25146

SEQ ID NO: 30900 - DNA, 4199 bp, Homo Sapiens
agaaaaggaggaaggagaacattgctgtagcttggatctacaacctaagaaagcaagagtgatcaatctcagctctgttaaacatcttgtttacttactgcattcagcagcttgcaaatggttaactatatgcaaaaaagtcagcatagctgtgaagtatgccgtgaattttaattgagggaaaaagggacaattgcttcaggatgctctagtatgcactctgcttgaaatattttcaatgaaatgctcagtattctatctttgaccagaggttttaactttatgaagctatgggacttgacaaaaagtgatatttgagaagaaagtacgcagtggttggtgttttcttttttttaataaaggaattgaattactttgaacacctcttccagctgtgcattacagataacgtcaggaagagtctctgctttacagaatcggatttcatcacatgacaacatgaagctgtggattcatctcttttattcatctctccttgcctgtatatctttacactcccaaactccagtgctctcatccagaggctcttgtgattctctttgcaattgtgaggaaaaagatggcacaatgctaataaattgtgaagcaaaaggtatcaagatggtatctgaaataagtgtgccaccatcacgacctttccaactaagcttattaaataacggcttgacgatgcttcacacaaatgacttttctgggcttaccaatgctatttcaatacaccttggatttaacaatattgcagatattgagataggtgcatttaatggccttggcctcctgaaacaacttcatatcaatcacaattctttagaaattcttaaagaggatactttccatggactggaaaacctggaattcctgcaagcagataacaattttatcacagtgattgaaccaagtgcctttagcaagctcaacagactcaaagtgttaattttaaatgacaatgctattgagagtcttcctccaaacatcttccgatttgttcctttaacccatctagatcttcgtggaaatcaattacaaacattgccttatgttggttttctcgaacacattggccgaatattggatcttcagttggaggacaacaaatgggcctgcaattgtgacttattgcagttaaaaacttggttggagaacatgcctccacagtctataattggtgatgttgtctgcaacagccctccattttttaaaggaagtatactcagtagactaaagaaggaatctatttgccctactccaccagtgtatgaagaacatgaggatccttcaggatcattacatctggcagcaacatcttcaataaatgatagtcgcatgtcaactaagaccacgtccattctaaaactacccaccaaagcaccaggtttgataccttatattacaaagccatccactcaacttccaggaccttactgccctattccttgtaactgcaaagtcctatccccatcaggacttctaatacattgtcaggagcgcaacattgaaagcttatcagatctgagacctcctccgcaaaatcctagaaagctcattctagcgggaaatattattcacagtttaatgaagtctgatctagtggaatatttcactttggaaatgcttcacttgggaaacaatcgtattgaagttcttgaagaaggatcgtttatgaacctaacgagattacaaaaactctatctaaatggtaaccacctgaccaaattaagtaaaggcatgttccttggtctccataatcttgaatacttatatcttgaatacaatgccattaaggaaatactgccaggaacctttaatccaatgcctaaacttaaagtcctgtatttaaataacaacctcctccaagttttaccaccacatattttttcaggggttcctctaactaaggtaaatcttaaaacaaaccagtttacccatctacctgtaagtaatattttggatgatcttgatttgctaacccagattgaccttgaggataacccctgggactgctcctgtgacctggttggactgcagcaatggatacaaaagttaagcaagaacacagtgacagatgacatcctctgcacttcccccgggcatctcgacaaaaaggaattgaaagccctaaatagtgaaattctctgtccaggtttagtaaataacccatccatgccaacacagactagttaccttatggtcaccactcctgcaacaacaacaaatacggctgatactattttacgatctcttacggacgctgtgccactgtctgttctaatattgggacttctgattatgttcatcactattgttttctgtgctgcagggatagtggttcttgttcttcaccgcaggagaagatacaaaaagaaacaagtagatgagcaaatgagagacaacagtcctgtgcatcttcagtacagcatgtatggccataaaaccactcatcacactactgaaagaccctctgcctcactctatgaacagcacatggtgagccccatggttcatgtctatagaagtccatcctttggtccaaagcatctggaagaggaagaagagaggaatgagaaagaaggaagtgatgcaaaacatctccaaagaagtcttttggaacaggaaaatcattcaccactcacagggtcaaatatgaaatacaaaaccacgaaccaatcaacagaatttttatccttccaagatgccagctcattgtacagaaacattttagaaaaagaaagggaacttcagcaactgggaatcacagaatacctaaggaaaaacattgctcagctccagcctgatatggaggcacattatcctggagcccacgaagagctgaagttaatggaaacattaatgtactcacgtccaaggaaggtattagtggaacagacaaaaaatgagtattttgaacttaaagctaatttacatgctgaacctgactatttagaagtcctggagcagcaaacatagatggagagtttgagggctttcgcagaaatgctgtgattctgttttaagtccataccttgtaaataagtgccttacgtgagtgtgtcatcaatcagaacctaagcacagcagtaaactatggggaaaaaaaaagaagaagaaaaagaaactcagggatcactgggagaagccatggcattatcttcaggcaatttagtctgtcccaaataaaataaatccttgcatgtaaatcattcaaggattatagtaatatttcatatactgaaaagtgtctcataggagtcctcttgcacatctaaaaaggctgaacatttaagtatcccgaattttcttgaattgctttccctatagattaattacaattggatttcatcatttaaaaaccatacttgtatatgtagttataatatgtaaggaatacattgtttataaccagtatgtacttcaaaaatgtgtattgtcaaacatacctaactttcttgcaataaatgcaaaagaaactggaacttgacaattataaatagtaatagtgaagaaaaaatagaaaggttgcaattatataggccatgggtggctcaaaactttgaacatttgagcttaaacaaatgccactctcatgcattctaaattaaaaagttaaaatgattaatagttcaggtggaagaaataagcatactttttgggttttctacacattttgtgtagacaattttaatgtcagtgctgctgtgaactaaagtatgtcatttatgctcaaagtttaattcttcttcttgggatattttaaaaatgctactgagattctgctgtaaatatgactagagaatatattgggtttgctttatttcataggcttaattctttgtaaatctgaatgaccataatagaaatacatttcttgtggcaagtaattcacagttgtaaagtaaataggaaaaattattttatttttattgatgtacattgatagatgccataaatcagtagcaaaaggcacttctaaaggtaagtggtttaagttgcctcaagagagggacaatgtagctttattttacaagaaggcatagttagatttctatgaaatatttattctgtacagttttatatagttttggttcacaaaagtaattattcttgggtgcctttcaagaaaattaaaaatactactcactacaataaaactaaaatgaaaactcaaaaaaaaaaaaaaaaaa

SEQ ID NO: 30901 - DNA, 2085 bp, Homo Sapiens
cagcctcggagggtgagcgtcatggcggcttcttgccctctcccggtgaccccggacctgcccacgctgcgtgccaagttgcagggactgctgcagttcctgagggatgccctgtccatttccaatgcacataccgtggatttctacacagaatccgtgtgggaggagctggtcgacttgccaccggagacagtgctggctgcgctgaggaagtcagcgtcggagacggaggccctgccctcagagacgcgccccctagtggaagcagagtgggaagcaggtatgactgattttcccaaaatattttgtgaaacttctcagaagttggtgagtgtggaagcctttgctctggctgcgaaatactattctgtacaaaacttgggaatatgtactccttttgaacagttgcttgtagcccttcgaggaaatcaaaaccagagaattggtgaaaatcagaaggcagttgagtttatgaatatgaagaaatctcatgaagttcaggcaatgtcagagctgattagcagtattgctgactactatggaataaagcaggtgattgacttgggttccggtaaaggctacctaagctcttttttgtccttgaagtatggcttaaaagtttatggaattgattcttcaaataccaatactcatggagctgaggagagaaacagaaaattgaagaaacattggaaactctgtcatgctcagtcaagattagatgtcaatggactagcattaaaaatggcaaaagaaaggaaagtgaaaaataaagttaaaaataaagctgatactgaggaagtgtttaacaacagtcctacaaatcaagaaaagatgcctacctcagctattttgcctgatttttctggctctgtaatttctaatatcagaaaccaaatggaaacccttcattctcagccacatcaagaagaaaatttgtgttttgaaaattccttttctcttataaaccttttgcctattaatgctgtagagcctacttcttcacagcaaatacccaacagagaaacatctgaagccaataaagagagaagaaaaatgacatcaaagtcaagtgaatcaaatatatattcacctttaacctcttttatcactgctgattcagaactccatgacattattaaagatttggaggattgtttgatggtgggtctccacacttgtggtgatctggctccaaatactttgcgaatatttacctccaactctgaaatcaagggagtttgcagtgtgggttgttgctaccacctcttatctgaagaatttgaaaaccagcataaagaacgtactcaggaaaagtggggatttccaatgtgccactatttaaaggaagagagatggtgctgtggtcgtaatgccagaatgtcagcatgtttggcattggagcgggttgcagctggccaagggctgcctactgaatcactcttctatcgtgctgttcttcaggatattattaaagattgttatggcatcaccaaatgtgatcggcatgttggtaaaatttattccaaatgttcttcttttctggattatgtcagacggtctctaaagaagcttggattagatgagtccaagctgccagaaaaaattataatgaactactacgagaagtataagcctcgaatgaatgagctggaagcttttaatatgttgaaagttgtactggctccctgtatagagactttgattcttctggatcgactttgttacctgaaagagcaggaagatattgcatggtctgctcttgtgaagttgtttgatcccgtgaaatctcccagatgttatgctgttattgccctgaagaagcagcagtgatttccattgaagcaaattattagatgtatttctctatgagacctgttgctgagattgcttttctaaacatatatgtcctgttatacaaaaatttttaaatgactgttatgtattttaaataataaaataatggctaacaacaaaaaaaaaaaaaaaaaaaaaaaaaaaaaaaaaaaaaaaaaaaaaaaaaaaaaaaaaaaaaaaaaaaaaaaaaaaaaaaaaaaaaaaaaaaaaaaaaaaaaaaaaaaaaaa

SEQ ID NO: 30902 - DNA, 2044 bp, Homo Sapiens
cagcctcggagggtgagcgtcatggcggcttcttgccctctcccggtgaccccggacctgcccacgctgcgtgccaagttgcagggactgctgcagttcctgagggatgccctgtccatttccaatgcacataccgtggatttctacacagaatccgtgtgggaggagctggtcgacttgccaccggagacagtgctggctgcgctgaggaagtcagcgtcggagacggaggccctgccctcagagacgcgccccctagtggaagcagagtgggaagcaggtatgactgattttcccaaaatattttgtgaaacttctcagaagttggtgagtgtggaagcctttgctctggctgcgaaatactattctgtacaaaacttgggaatatgtactccttttgaacagttgcttgtagcccttcgaggaaatcaaaaccagagaattggtgaaaatcagaaggcagttgagtttatgaatatgaagaaatctcatgaagttcaggcaatgtcagagctgatcagcagtattgctgactactatggaataaagcaggtgattgacttgggttccggtaaaggctacctaagctcttttttgtccttgaagtatggcttaaaagtttatggaattgattcttcaaataccaatactcatggagctgaggagagaaacagaaaattgaagaaacattggaaactctgtcatgctcagtcaagattagatgtcaatggactagcattaaaaatggcaaaagaaaggaaagtgcaaaataaagttaaaaataaagctgatactgaggaagtgtttaacaacagtcctacaaatcaagaaaagatgcctacctcagctattttgcctgatttttctggctctgtaatttctaatatcagaaaccaaatggaaacccttcattctcagccacatcaagaagaaaatttgtgttttgaaaattccttttctcttataaaccttttgcctattaatgctgtagagcctacttcttcacagcaaatacccaacagagaaacatctgaagccaataaagagagaagaaaaatgacatcaaagtcaagtgaatcaaatatatattcacctttaacctcttttatcactgctgattcagaactccatgacattattaaagatttggaggattgtttgatggtgggtctccacacttgtggtgatctggctccaaatactttgcgaatatttacctccaactctgaaatcaagggagtttgcagtgtgggttgttgctaccacctcttatctgaagaatttgaaaaccagcataaagaacgtactcaggaaaagtggggatttccaatgtgccactatttaaaggaagagagatggtgctgtggtcgtaatgccagaatgtcagcatgtttggcattggagcgggttgcagctggccaagggctgcctactgaatcactcttctatcgtgctgttcttcaggatattattaaagattgttatggcatcaccaaatgtgatcggcatgttggtaaaatttattccaaatgttcttcttttctggattatgtcagacggtctctaaagaagcttggattagatgagtccaagctgccagaaaaaattataatgaactactacgagaagtataagcctcgaatgaatgagctggaagcttttaatatgttgaaagttgtactggctccctgtatagagactttgattcttctggatcgactttgttacctgaaagagcaggaagatattgcatggtctgctcttgtgaagttgtttgatcccgtgaaatctcccagatgttatgctgttattgccctgaagaagcagcagtgatttccattgaagcaaattattagatgtatttctctatgagacctgttgctgagattgcttttctaaacatatatgtcctgttatacaaaaatttttaaatgactgttatgtattttaaataataaaataatggctaacaacagaaggttataatccatttttccattgtcaaagcatacattaataaaagaagaacctgtcataataatat

SEQ ID NO: 30903 - DNA, 2905 bp, Homo Sapiens
agcgttgggccgcggtcgcggggccgtctcaggctgccgtcccgcccctcccgtccggccgccgccgccgccaccgccgccaccgcctgggggttggttgaggcggacggcggggtccgggccggagtacgtcgttcccgctgcgctaggggaagcgggcagtcagaaaaatgggtaagaagagtcgagtaaaaactcagaaatctggcactggtgctacagcaactgtgtcaccaaaggaaatcttgaacctgaccagtgagctgctgcagaaatgcagcagtccggcgcctggcccaggaaaagagtgggaagagtatgtgcagatccggactctggttgagaaaatacggaaaaagcaaaaaggtctgtccgttacttttgatggaaaaagagaagattactttcctgatctaatgaaatgggcctctgaaaatggggcttctgtcgagggttttgaaatggttaacttcaaagaagagggctttggtttgagagcaacaagagatatcaaggcagaagaattgtttttatgggttccacgaaaattgctaatgactgttgaatctgctaaaaattcagtgttggggcccttatattctcaagaccgaatccttcaagccatgggaaacatcgcactggcctttcatttgctgtgtgagcgagccagccctaactccttctggcagccctatattcaaaccctccccagtgaatatgacactcctctctactttgaagaagatgaagttcggtatcttcagtccacacaagctatacatgatgtcttcagccagtataaaaacacagctcgacagtacgcctacttctataaagtcatccagacccatcctcatgccaacaaactacccttgaaggattctttcacttacgaggactacaggtgggcagtctcttctgttatgacgaggcaaaaccaaattcccacagaggatggttcccgcgtgaccctggctctgattcctttatgggatatgtgtaaccacaccaacggcctgatcactactggttacaacctggaagatgaccgctgtgagtgtgtggctctgcaggattttcgggctggagagcagatttacattttttatggcactcgatccaacgcagagtttgtgatccacagtggttttttctttgacaataactcacacgacagagtgaaaataaagcttggagtgagtaaaagtgacagactctacgccatgaaggccgaggtcttggctcgtgccggcatccccacttccagtgtttttgcattgcattttaccgagccgcccatctctgctcagcttttggcttttctccgagtattctgtatgactgaagaagaactgaaagaacacttgctgggagacagcgctattgatagaatcttcaccttggggaactcggaatttcctgttagctgggacaacgaggtcaaactttggacatttcttgaagatagagcctcacttcttttaaaaacatataaaacaactattgaggaagataaatccgtcttgaaaaaccacgatctttctgttcgtgcaaaaatggccatcaaattgcgcttaggtgagaaagagattttggaaaaagcagtaaagagtgcagctgtcaaccgggaatactatcgccaacagatggaggaaaaggctccgcttcccaaatatgaagagagtaaccttgggctgttggagagcagcgtgggggactcgaggctccccctggtcttgagaaacctcgaggaggaggctggagtgcaggatgccttgaacatcagagaggcaatcagcaaagcaaaggccacagaaaacgggcttgtaaacggtgaaaactctatccctaatgggaccaggtccgaaaatgaaagtctcaatcaagaaagtaaaagagcagttgaagacgccaaaggatcttcttcagacagcactgctggagttaaggagtagctcgaggtgaagctggatgggggatccagtggagcaggagttgacggacagtccgttcacatcgctgtgtttccttgttaacatttttctttctgcagagaggaagatatgtttttgctgctttatataaaaatggtttttttaagttattttaaaaatctagcttccctttttgattaagattgccatcttgcttttaggcaaaacaaaccaattaacaaacaaccacaagaaagggagaagaggtgcctgtgggagattttgcagacctattgtgggtataggtattttcttcctggggaagaattcagttcccgtctcagctgtacttttgtgggcctgtcatcttgatgaccagaatgaaagcttgctctgcctcctgccagccagaattggtggcgggacttggggatacagcgtgaaggtggggaagttgcacagcagaaaacagaattgaagttgggaaactctagagtctgggcaaaatgtttggttttttctcttaaaaaaaataacaccccattaccaaaagaaaaggtaaggtggcaaccttatttttaatagtttgaaatgatgataatcctaattatataaaaatatatatataaacacacatatatatagtgatttctaaagatttgtttacttttgtgttttgttttactgtactaagaacttgtcctttctccttgaatcaaagtaggacatgcatcatcctcctaattttaaatgttggctctgattttaaagtggtgcatttgattccagccttggtaatggagagtttgcaaacacacagcggcccacagcttcacgtggtggtgtgcagtgtgaggcagctccttggctttcctggttttcacaacaagctagagattttcaaagctacacttttgagtaaaaacccttattaaaagaaaaacatgattaataaaaaaaaaaaaaaaaaa

SEQ ID NO: 30904 - DNA, 1612 bp, Homo Sapiens
gcgtgctggcccggggtggcaggagccgcagaggcttgggctgcagaaaaaggatcctgtttgctgtgtaatcctgagaatggactgcaagagaggaaaaactgggcgtctgcttgggaatctattgtggaaacccagggtgtttcccgaccagtccctgggcgccaactagagtatggactgaccaggtacctggatggagacctgagctggagaaggagatgcgcttgggaggaaattgcagaggccgtcaacatggaaaagcagccccagaacagcaggagaggcctcgccccccgagaggtgccgccagctgttgggctgctgctgatcatggccctgatgaatactctactctacctctgcctcgaccacttcttcatcgctcctcgacaatccactgtggaccccacacactgtccctatggtcacttcaggataggacagatgaaaaactgctcaccttggctgtcctgcgaggagctgagaacagaagtgagacagctgaagcgtgttggggaaggagctgtaaagagagtctttctgtctgagtggaaggagcacaaagttgcactctcacagctcaccagcctggagatgaaagatgatttcctccatggactgcagatgctgaaatctctccaaggcacacatgttgtcacgctgcttggctattgtgaggatgacaacactatgcttactgaatatcaccctctaggttccttgagtaacctggaagaaacactaaacctttcaaagtaccaaaatgtgaacacgtggcagcacaggctggagctggccatggactatgtcagcatcattaattacctgcaccacagccctgtgggcacacgggtcatgtgcgactccaacgacctgccgaagacactgtcccagtatctgctaacaagcaacttcagcattttggcaaatgacttggacgccttacccctggtgaaccacagctccgggatgctggtgaagtgcggccacagggagctgcatggggatttcgtggctccagagcaactgtggccctatggagaggacgtgcctttccacgatgatctcatgccctcatatgatgagaagattgacatttggaagatcccagacatctccagtttccttctggggcacattgaagggagtgatatggtccgattccatttgtttgatattcacaaagcatgcaagagccagactccctcagaaagacccactgcccaggacgttctggagacctaccagaaggtcttggatacacttagagatgccatgatgtctcaggcaagagagatgctgtgaaaaccagtccagccaatgaaggtgggattgaagggctgaatggaagttacagcattctactctgatggtggagttttttgcctgagtttcgtgttttattgttttttttatggcttagccatgtggttcgttgtccacatccacatgtacgtttgtatgtagtccacattggttgttagattttttttttttttctttgagatgcggtcttgctctgttgctgaggctggagtgcagtgatgtgatcttggctcactgcagcctctgcctcccaggttcaagcaattctcccacctcagcctcc

SEQ ID NO: 30905 - DNA, 9040 bp, Homo Sapiens
gggcatgtgggctgaggcaggcttgcccagggcaggcgggggttcacagccccccttccgcaccttctcggccagcgactggggcctcacccacctagtggtgcatgagcagacaggcgaggtgtatgtgggcgcagtgaaccgcatctataagctgtcggggaacctgacactgctgcgggcccacgtcacgggccctgtggaggacaacgagaagtgctacccgccgcccagcgtgcagtcctgcccccacggcctgggcagtactgacaacgtcaacaagctgctgctgctggactatgccgctaaccgcctgctggcctgtggcagcgcctcccagggcatctgccagttcctgcgtctggacgatctcttcaaactgggtgagccacaccaccgtaaggagcactacctgtccagcgtgcaggaggcaggcagcatggcgggcgtgctcattgccgggccaccgggccagggccaggccaagctcttcgtgggcacacccatcgatggcaagtccgagtacttccccacactgtccagccgtcggctcatggccaacgaggaggatgccgacatgttcggcttcgtgtaccaggatgagtttgtgtcatcacagctcaagatcccttcggacacgctgtccaagttcccggcctttgacatctactatgtgtacagcttccgcagcgagcagtttgtctactacctcacgctgcagctagacacacagctgacctcgcctgatgccgccggcgagcacttcttcacgtccaagatcgtgcggctctgtgtggacgaccccaaattctactcgtacgttgagttccccattggctgcgagcaggcgggtgtggagtaccgcctggtgcaggatgcctacctgagccggcccggccgtgccctggcccaccagctgggcctggctgaggacgaggacgtgctgttcactgtgttcgcccagggccagaagaaccgcgtgaagccaccaaaggagtcagcactgtgcctgttcacgctcagggccatcaaggagaagattaaggagcgcatccagtcctgctaccgtggtgagggcaagctctccctgccgtggctgctcaacaaggagctgggctgcatcaactcgcccctgcagatcgatgacgacttctgcgggcaggacttcaaccagcccctggggggcacagtcaccattgaggggacgcccctgttcgtggacaaggatgatggcctgaccgccgtggctgcctatgactatcggggccgcactgtggtattcgccggcacgcgaagtggccgcatccgcaagatcctggtggacctctcaaaccccggtggccggcctgccctggcctacgagagcgtcgtggcccaggagggcagccccatcctgcgagacctcgtcctcagccccaaccaccagtacctctacgccatgaccgagaagcaggtgacgcgggtgcctgtggagagctgtgtgcagtacacgtcctgtgagctgtgtctggggtcacgggacccccactgtggctggtgtgtcctgcacagcatctgctcgcggcgggacgcctgtgagcgagcagacgagccccagcgctttgctgcggacctgctgcagtgtgtgcagctgactgtgcagccccgcaatgtgtctgtcaccatgtcccaggtcccacttgtgctgcaggcctggaacgtgcctgacctctcagctggcgtcaactgctccttcgaggacttcacggaatctgagagcgtcctggaggatggccggatccactgccgctcaccctccgcccgggaggtggcgcccatcacgcggggccagggagaccagcgggtggtgaaactctacctaaagtccaaggagacagggaagaagtttgcgtctgtggacttcgtcttctacaactgcagcgtccaccagtcctgcctgtcctgtgtcaacggctcctttccctgccactggtgcaaataccgccacgtgtgcacacacaacgtggctgactgcgccttcctggagggccgtgtcaacgtgtctgaggactgcccacagatcctgccctccacgcagatctacgtgccagtgggagtggtaaaacccatcaccctggccgcacggaacctgccacagccacagtcaggccagcgtggatatgagtgcctcttccacatcccgggcagcccggcccgtgtcaccgccctgcgcttcaacagctccagcctgcagtgccagaattcctcgtactcctacgaggggaacgatgtcagcgacctgccagtgaacctgtcagtcgtgtggaacggcaactttgtcattgacaacccacagaacatccaggcgcacctctacaagtgcccggccctgcgcgagagctgcggcctctgcctcaaggccgacccgcgcttcgagtgcggatggtgcgtggccgagcgccgctgctccctgcgacaccactgcgctgccgacacacctgcatcgtggatgcacgcgcgtcacggcagcagtcgctgcaccgaccccaagatcctcaagctgtcccccgagacgggcccgaggcagggcggcacgcggctcactatcacaggcgagaacctgggcctgcgattcgaagacgtgcgtctgggcgtgcgcgtgggcaaggtgctgtgcagccctgtggagagcgagtacatcagtgcggagcagatcgtctgtgagatcggggacgccagctccgtgcgtgcccatgacgccctggtggaggtgtgtgtgcgggactgctcaccacactaccgcgccctgtcacccaagcgcttcaccttcgtgacaccaaccttctaccgtgtgagcccctcccgtgggcctctgtcagggggcacctggattggcatcgagggaagccacctgaacgcaggcagtgatgtggctgtgtcggtcggtggccggccctgctccttctcctggaggaactcccgtgagatccggtgcctgacaccccccgggcagagccctggcagcgctcccatcatcatcaacatcaaccgcgcccagctcaccaaccctgaggtgaagtacaactacaccgaggaccccaccatcctgaggatcgaccccgagtggagcatcaacagcggtgggaccctcctgacggtcacaggcaccaacctggccactgtccgtgaaccccgaatccgggccaagtatggaggcattgagagggagaacggctgcctggtgtacaatgacaccaccatggtatgccgcgccccgtctgtggccaaccctgtgcgcagcccaccagagctgggggagcggccggatgagctgggcttcgtcatggacaacgtgcgctccctgcttgtgctcaactccacctccttcctctactaccctgaccccgtactggagccactcagccccactggcctgctggagctgaagcccagctccccactcatcctcaagggccggaacctcttgccacctgcacccggcaactcccgactcaactacacggtgctcatcggctccacaccctgtaccctcaccgtgtcggagacgcaactgctgtgcgaggcgcccaacctcactgggcagcacaaggtcacggtgcgggcaggtggcttcgagttctcgccagggacactgcaggtgtactcggacagcctgctgacgctgcctgccattgtgggcattggcggaggcgggggtctcctgctgctggtcatcgtggctgtgctcatcgcctacaagcgcaagtcacgagatgctgaccgcacactcaagcggctgcagctccagatggacaacctggagtcccgcgtggccctcgaatgcaaggaagcctttgcagagctgcagacagacatccacgagctgaccaatgacctggacggtgccggcatccccttccttgactaccggacatatgccatgcgggtgctctttcctgggatcgaggaccaccctgtgctcaaggagatggaggtgcaggccaatgtggagaagtcgctgacactgttcgggcagctgctgaccaagaagcacttcctgctgaccttcatccgcacgctggaggcacagcgcagcttctccatgcgcgaccgcgggaatgtggcctcgctcatcatgacggccctgcagggcgagatggaatacgccacaggcgtgctcaagcagctgctttccgacctcatcgagaagaacctggagagcaagaaccaccccaagctgctactgcgccggactgagtcggtggcagagaagatgctaactaactggttcaccttcctcttgtataagttcctcaaggagtgcgctggggagccgctgttcatgctgtactgcgccatcaagcagcagatggagaagggccccattgacgccatcacgggtgaggcacgctactccctgagtgaggacaagctcatccggcagcagattgactacaagacactgaccctgaactgtgtgaaccctgagaatgagaatgcacctgaggtgccggtgaaggggctggactgtgacacggtcacccaggccaaggagaagctgctggacgctgcctacaagggcgtgccctactcccagcggcccaaggccgcggacatggacctggagtggcgccagggccgcatggcgcgcatcatcctgcaggacgaggacgtcaccaccaagattgacaacgattggaagaggctgaacacactggctcactaccaggtgacagacgggtcctcggtggcactggtgcccaagcagacgtccgcctacaacatctccaactcctccaccttcaccaagtccctcagcagatacgagagcatgctgcgcacggccagcagccccgacagcctgcgctcgcgcacgcccatgatcacgcccgacctggagagcggcaccaagctgtggcacctggtgaagaaccacgaccacctggaccagcgtgagggtgaccgcggcagcaagatggtctcggagatctacttgacacggctactggccaccaagggcacactgcagaagtttgtggacgacctgtttgagaccatcttcagcacggcacaccggggctcagccctgccgctggccatcaagtacatgttcgacttcctggatgagcaggccgacaagcaccagatccacgatgctgacgtgcgccacacctggaagagcaactgcctgcccctgcgcttctgggtgaacgtgatcaagaacccacagtttgtgttcgacattcacaagaacagcatcacggacgcctgcttgtcggtggtggcccagaccttcatggactcctgctccacctctgagcacaagctgggcaaggactcaccctccaacaagctgctctacgccaaggacatccccaactacaagagctgggtggagaggtactatgcagacatcgccaagatgccagccatcagcgaccaggacatgagtgcgtatctggctgagcagtcccgcctgcacctgagccagttcaacagcatgagcgccttgcacgagatctactcctacatcaccaagtacaaggatgagatcctggcagccctggagaaggatgagcaggcgcggcggcagcggctgcggagcaagctggagcaggtggtggacacgatggccctgagcagctgagccccagctgtgatcatccagcatgatgcagcgtgaggacagctgagcagggaccgggacagccctcaccgcatgcgtgtggagtgtccggtggtgctcgggccgccgcagtgcagcgactgcccggccctccctcccctgcctcacccggtcgggtcccggctcttcctgtgtggaggtgatggtacctgccacaccacagctgcgcacacagctgcttgctcaggggccgggacagcactgggtgctcaggctggccaaggaccttcattgcctggcaagagctgcccagtggccttcatgggagaagggctgacctctgaggggctgaggggtgaggccagggccctccagggggaggggtagccagcttgggctgtccccttgagaccaggacaagaggctgggggtgtcagcattcccagctttccaagctgcccccaggcggcagagtctgagggtcccggggcccggttggcagctggagaaagaggcaaaaagcccgtagccgggcaagaggagctcaagtcggtctgggcccgttgccaccgactcccacctccagcacccatgcccgctgcaccgctgccatcctcagattcaccgcgtgctctgcgcggccgaggccggagcaccacatccacctcgccccagagaggctctgctccctcctatggaggggctgtgggccaggctgctcagactcctgggtggcttccagacggaccgggcagcccctctccgtcctcagggctgtgcctctgggagccactgggccaggggccccgggtcgcagagagcacgttcccgttatttattcccctccgcgtcctacacaggctgccctggcagctgtcttcaagggtaggctgagctccccaccctggagcccctgagggcggcccctgagcactcctctctctccactctctctgtccctgccccagcggcttccagtgtggcatctcagcagtgtcctggcccctccagagcagtgggacatctggggactgtttttgtgtttaggggaaaaaattctgctgcactctgcttgggccttgaggtctgtggcagggctcctctggcccgcagtggcctggatctatctgggccatgagtgacgggcagtgaccagagggactggaggccagcggtgtccacccttgccctcagcaagagagaatgcattcttaaaagaaagctgtacatgtatatatatgcatatatatatatgtggctctagcctcaggctccagccccagtggggtactgtacagttaactgaagaagaattttaaagacgatttgaacaagaaaatgaaggcagtgggaaagcaatgccaaatggttgtggagaaagtggccggagcctccctggagtggagcagccctgaagcctgtgccccccgacctgcgggccgctgttttggtttgacatgacaaggaaaggacttcctgctgaccctgagagcctctggggtgccgcggcaccacggggcatgcatgattgtgctagcgtttagtctgagttgatctttttaaaactgcaagtgttgaatactagaggttgttagacccttttttatgttttttaattaatcagtcacttgtaaaagcaaacaagcggtccatccccttttcaaggtcacttttttgatggtaccgaagatcccatggacattaagggacagctaactgtggccagactcagccccatgtccttggccaggcccaaggagaggactcggccccatggggtgtgccagtcttgcagtccgccccagctgagtagcgtgagccagatgacgccacagagacccgcctcttccctgaacgcgggtcggtgtggagtcagtgactgctgactcagggagctccttggccccgtgggcactgtgccagggctggggccttctgctgctgccacacccagctcaggcctgggccagcccctgcccccagcccactgagggggtgggcttactccctgggcagtcttgggggccagagctgaggccagtccatattacagtggctgggctgtttttttcagtagcccctagcattggctgggattcctgttcctgggtgcgcctccacctcccttctgatgtttcctggctatggtggggtgggaacctcagtttcccccaaagtcttccctggatgctggcttcaggttgaagtccctggttcttccagttcctcacgggttaggtaggggctcctgcatcaccttcagaatccagttccaacccccactctccttaggccttgtgctctgctctgccctgccaggctgcccttgtccatgtgagtagcatgggcgggtggtggggacggcagtggtgatgaagggggtgcaccacaggcctcatgaagcagttcccacatgggcgtgtggctggggcgtggccaccacagagcacatggctgtgtctaggcgcaagcactttagcagtatctgtttacatgcgcaaggatcaagccgactacctgtgctgtctactgggacagcagtctccgagctactccgtacctccctctgccaggtcgtggagttaggccccagtccctacttgtcactggttcccactgtgctcctaactgtgcagcacctgggagctctggcctggggctggaggccctggtaggagctgcagttggaggccgttctgtgcccagcagcggtgagcggctcccatgggccctgtgtctgcagggagccagggctgcggcacatgtgctgtgaaactggcacccacctggcgtgctgctgccgccacttgcttcctgcagcacctcctaccctgctccgtgtcctccctctccccgcgcctggctcaggagtgctggaaaagctcacgcctcggcctgggagcctggcctcttgatatacctcgagcttcccctgtgctccccagccccaggaccactggccccttggcctgaggggctgggggccccacgacctgcagcgtcgagtccgggagagagcccggagcggcgtgccatctcggctcggccttgctgagagcctccgccctggctttctccctgtctggattcagtggctcacgttggtgctacacagctagaatagatatatttagagagagagatatttttaagacaaagcccacaattagctgtcctttaacaccgcagaaccccctcccagaagaagagcgatccctcggacggtccgggcgggcaccctcagccgggctctttgcagaagcagcaccgctgactgtgggcccggccctcagatgtgtacatatacggctatttcctattttactgttcttcagatttagtacttgtaaataaacacacacattaaggagagattaaacatttttgctaaaaaaaaaaaaaaaaaaaaaaaaaaaaaaaaaaaaaaaaaaaaaa

SEQ ID NO: 30906 - DNA, 4633 bp, Homo Sapiens
gccctccattgtctccacggcggcgaggagcgccggcgagcgcagcccgggaccgagcggggcggcgcggctggcggggccggcggcggctgaagcgagagcgcgacgcgacgcgaccgcggcttcccgagctgcgcctggccgcccagcgccgcggcccgcccgaggcctggaggggtccgggccgccgtccatggtcgcggcgtcctgaggcgggggacgcgcccggcgcccccggccctcctccgcctcctcccgcggggcgggcggcctcctccggcgcctccccgcgcccgcccgccgctcgccgccgcctccctccctccttccctgcggctcccccggctttcggagcccgggggcggcctgtggcgcgcggagcccgcgccggactgcgcctctttggaccttgaggggaaacatgcgtttgccttggatcgtttgaaattctgagtttgggatccccgcccgcccgcctgcctcttccgccccgcgggttttttccttttttccttttgctttttttccttttctccctccgggtctcctttttgactccctccccctttatgctcgcccagccctccccctgctgctgagaagtgggggagggtctcggcctccaggttcccgccccaccggggcccgggcgagcatggggggcaagcagagcacggcggcccgctcccggggccccttcccgggggtctccaccgatgacagcgccgtgccgccgccgggaggggcgccccatttcgggcactaccggacgggcggcggggccatggggctgcgcagccgctcggtcagctcggtggcaggcatgggcatggaccccagcacggccgggggggtgccctttggcctctacacccccgcctcccggggcaccggcgactccgagagggcgcccggcggcggagggtctgcgtccgactccacctatgcccatggcaatggttaccaggagacgggcggcggtcaccatagagacgggatgctgtacctgggctcccgagcctcgctggcggatgctctacctctgcacatcgcacccaggtggttcagctcgcatagtggtttcaagtgccccatttgctccaagtctgtggcttctgacgagatggaaatgcactttataatgtgtttgagcaaacctcgcctctcctacaacgatgatgtgctgactaaagacgcgggtgagtgtgtgatctgcctggaggagctgctgcagggggacacgatagccaggctgccctgcctgtgcatctatcacaaaagctgcatagactcgtggtttgaagtgaacagatcttgtccggaacaccctgcggactgacctgcgggcttgcttgctgactcctctcaaagggacagagcgcccctgctccagggaggaggctcaccggaccctggggcagagctgagcttgggacaccagcgggaacagggcaccccttctgcactgacttccagatcatggttctcccttcctccctgaggacaccaaattggatgagagcaagtttgagagaagaatgaatcaactgctatccttcccctcacccctcagcccaggagggaaagggcattttctttttcatctttgaaaggcattgtgggtctgtctttaaagtgtttacaaaaaaaaattatataaaaaaaaagtctagtgtcgactggtgttttccctcgtgatgtttacagcttgctgtttgctgcccagccataacccactcagtgacagacgaacacagctaaggcctcgctgccagccttctgacggcgggcgagcacacggtctcttcccctgccccaactggccctctccaccaccaacttctctactttgggtttgtttggttttttccctctatttttctggctggttttttgctcttttctccccttgagaccctaatatcttgacttcattgccaaaaaacaacccattgagaactttcttcctactgatcccatctcttttcccttctttcctcctggttccggtcagttcagaggatttaacaatcacaagtgtcctgcaaaaatgcctgaacattattcttaggccctcgtggattttttttttcagaaaacttaaacaaaaaaagacttactaagaaatatgtacagctacccctgttttcaggcactatgtttgagaacattttagccattgatgttcacacgtggcatcagcccatgcaagataggtttctgtatttatatattaaaatacaaaaaaaaacttataaaatgtttaaaaaaatgttcaaagcttgggagaaaagctttcttcattagtcaaggtgttttgatatggtattaaaatgtctaataaaagatggcactgcgtgattttattttaatgaagtgttatacaatcaagaaatgggggcaagggcctgccccccactccctcacctacctccttagcattccttcaggctgctactcggggctccaggtgtgtgaattggtcctcagatagtcaggcctgggtggagggagtggcaagtcaggcgtgcctcctacaagcttcctaacctcttaagcatcatggaaccagtcagccctctgtggagtcattgtgccggacctctgaaaagatctgcaggggccaagatgttgcagccaccggaggctgcaaggatgtgggttcttccaggtgtgggcccagcccccctccttccagcctttgctccccatcccacgttccactcgccctgcctgttgttcagtttgcgtctcagtgctgactcacgggcatgcttcattgaggcccaggaagaggccctggtttggggctgtgccagctcagagcccttgaaccagaaccaactgctcaggctcacaaaagttggcaaaatgcgggctgggcaggcagctcggggcagggagcagcagtgcaggcctggcctgtgtccccgtgcccagcgggctcccggagcagcattccagagcctcctgcagagccagcgaaggaaagctctagagggagacgactccaccgcctctctgctctgacccttctcaggcccgcctgatgtgctggaccatccccctgctgccacggcccctggctccgcagtcaccctccatcagatgcttccagaagcacctactctgtgcaagggcattcacaacaggccagtgggcaaacgtgagccagggccagcggagaaacactaaagaagactcggtggttcagagcctgggtctcagcgcgggacccgtctggggtgaagaccttggggctgttgtgagtcggtggcaggaacgtgggctctagactgtgcattcaggctctcctacttggcagaatgatcttggggaaacgacttcatctgaacttcagatatttcacatgtgaagcggggacaaaaccatgcagctcagaggtccctgtgggggctgggggagctgccctgcaggtcttggcacatgcacagcaggctccccatagctttgtcaccacaaagggcactgttctattcacagcacctcctgcttctgcctggcaactgtgtctccctgtgctatatttaattccaccagcaaagctggcgaggcagggcccagccctgaaggagatctccttgcctgacccctggacctggaaatggaggcttcatgtgcccgccttggcggcttaagcctgctgctttggcagtgccatgggtgagccgagcagctgtgaggtgggtggggcagggctgtagcccacgccgggtgctattccaggctctaggggctggtgctcatccccacccccagcgacttccgtcctacctggcatgctgcagccctctgccggctgtggtgtcctctgaatttggacccaggttgcctgctcttgttgtgggggtgggattggggctgtctgtgtttcccaggtggagctcatgtttgtgatcctctatctggacagctctccagaatcctgtgttgcccctgttctgcctttctgggatgggagagaaggtgagggagccggcgagcaggttctaccctctctgctaagggcctagcacactttgatgaggttcctggacgtgagaccctcacaaagaccaaccattcctctaatagccatttaacggtactgcagttcatgggaaaatgtcctcattcttaggagatagatgctggattatataggtgaatgccttcaagaaatgtgtaatttaattccaaatagttccccccaaaatacacaaagcaaataaggccaaaatgttcattgttgaatctgcagtggctggtatttcagtgaacagtgtacttgttctttcaacttttctgtatgtttggaatttttcttaataaaagattgtgggaaatggtcatttgctgagcgcctcctagttgccaggcactggagggcgcatcaaagaagagtcctacccaggagggagagcgcagctgctgcaggattctcgcctggaagagtgggtggctggctggctggctggaaggggaggggcgagagggctgtctcggtgatgagcacacgcgtgctggggtggtttggggagagggctgagatttgtcaccagtgagcccttggcacggtctctgctccccaccagggcagcacgggacagaaacgtcacggaggagtagcctc

SEQ ID NO: 30907 - DNA, 1666 bp, Homo Sapiens
tacaaaaaaaaacttataaaatgtttaaaaaaatgttcaaagcttgggagaaaagctttcttcattagtcaaggtgttttgatatggtattaaaatgtctaataaaagatggcactgcgtgattttattttaatgaagtgttatacaatcaagaaatgggggcaagggcctgccccccactccctcacctacctccttagcattccttcaggctgctactcggggctccaggtgtgtgaattggtcctcagatagtcaggcctgggtggagggagtggcaagtcaggcgtgcctcctacaagcttcctaacctcttaagcatcatggaaccagtcagccctctgtggagtcattgtgctggacctctgaaaagatctgcaggggccaagatgttgcagccaccggaggctgcaaggatgtgggttcttccaggtgtgggcccagcccccctccttccagcctttgctccccatcccacgttccactcgccctgcctgttgttcagtttgcgtctcagtgctgactcacgggcatgcttcattgaggcccaggaagaggccctggtttggggctgtgccagctcagagcccttgaaccagaaccaactgctcaggctcacaaaagttggcaaaatgcgggctgggcaggcagctcggggcagggagcagcagtgcaggcctggcctgtgtccccgtgcccagcgggctcccggagcagcattccagagcctcctgcagagccagcgaaggaaagctctagagggagacgactccaccgcctctctgctctgacccttctcaggcccgcctgatgtgctggaccatccccctgctgccacggcccctggctccgcagtcaccctccatcagatgcttccagaagcacctactctgtgcaagggcattcacaacaggccagtgggcaaacgtgagccagggccagcggagaaacactaaagaagactcggtggttcagagcctgggtctcagcgcgggacccgtctggggtgaagaccttggggctgttgtgagtcggtggcaggaacgtgggctctagactgtgcattcaggctctcctacttggcagaatgatcttggggaaacgacttcatctgaacttcagatatttcacatgtgaagcggggacaaaaccatgcagctcagaggtccctgtgggggctgggggagctgccctgcaggtcttggcacatgcacagcaggctccccatagctttgtcaccacaaagggcactgttctattcacagcacctcctgcttctgcctttctgggatgggagagaaggtgagggagccggcgagcaggttctaccctctctgctaagggcctagcacactttgatgaggttcctggacgtgagaccctcacaaagaccaaccattcctctaatagccatttaacggtactgcagttcatgggaaaatgtcctcattcttaggagatagatgctggattatataggtgaatgccttcaagaaatgtgtaatttaattccaaatagttccccccaaaatacacaaagcaaataaggccaaaatgttcattgttgaatctgcagtggctggtatttcagtgaacagtgtacttgttctttcaacttttctgtatgtttggaatttttcttaataaaagattgtgggaaatggtc

SEQ ID NO: 30908 - DNA, 4635 bp, Homo Sapiens
ctccaataccgcaggagggcggtcttccccggctcgccaactcggctgctctgggggattcgtgcgcggtaagaagctgcgcggtagcgcggtgaggtgaggttctcagccaccaaagctgcagggtctcgtcgttcgttccctctggcctggcggaacttgcgtgggaagctgggaggacagaaggcttagccgctgggtccctgagctggctggagcgcgggctgtctaggggcggcgacctcagctgttgggctccggctgctgggggctgtgcgtccagccgccctggaatccgcctgtgggtgggccgcttggctctcccacttcaccctcttgataacccagagcctcccccttcccacgtacgtaggggaaggataatctacttccttttgaacagcttcggtccccactatgacagtcgcataaacttcagcgaagagtgcgctggtaaagtggcatggagtttctcacaccaattcattgggtccacccttcagcttctgtggaaggggtctttctgttactaggagctgagacttggggggttgccagggatgctggtcttaaaaggtgataatttaggccgggcgcggtggctcacgcctgtaatcccagcactttgggaggtcgaggcgggcagatctcctgagctcaggagttcgagaccaccctgggcaacatggtgaaaccccttctctactaaaatacaaaaaattagctgggcgtggtggcacgcgcctgtaatcccagctattcgggaggctgaggcccgagaatcgcttgagccctggcggcagaggttgcagtgagccaagatcgcccactgcactccaggttgggctacagagtgagactccgtctcaacaacgaccacaacaacaacaaaaaaggtggtggcttaatacagccatgctccccttaagaactggtatagttatgagaaatggttgggccgtttcgtggttgtgtgaacatcatagtgtacttgcacaaacctacacagctgggccgtatgggatagcctgttactcctagtctacagacctgtacagtataactactaaatactgtaggcagttgtaaaaggatggtgtgtatctaaacacagaaaagatactgtaaaaatatagtgtaaaagaaaacatggtacagctgaatagggcacttacgcatggagcttgcagggctgtcggtagctattaagtgagtcagtgagtggtatgtgagtgtgaaggcctacgatattatttagggtattactgtacactactgtagactttataaatgcggtatgcttagtctaagtttattaaaaataaggtaataaccttagcttactgtgcttttttaactttataaacttttaaattaattttaactccttgacctttttttttttttttgagacggagtttattctctctgtctctcatttttgagacagagttttgctcttgtcacccaggctggagtgcagtggcgcaatctcagctcactgcaacgtccacctcttgagttcaagcgattctcctgcctcagcttcccaggtggtgcgcgcctgtagctgggactacaagagtgcgccaccacgcccagctaatttttgtatttttagtagagatggggtttgaccatgttggccaggatggtctcgatatcctgaccttgtgatccacctggccttggcctcccaaagtgctgggattacaggcgtgagccaccatacccggcccactcttttgtaataacacttagcttaaaatgctaatgtgttgtatagctatataaaaatattttctttattcccttacattattctatagctttttcctgtaaaaattttttttgttgttataaactaagacacacacattgtgcctacaccgggtcaggagcatcaatatcactcttttcttcctccacatcttgtcctactggaaggttttcaggggcagtaacatgaatggagctgtcatctcctataataactgcttttttctggaatacttataattgtctagtattatgtacagtacatcattgtaagcattatgcttgtatatgactggcatcccaggtttgtttacaccagcattaccacagacatgagtaatgtgttacactacaagttatgagggctacaaagtcaataggaatttttcagctccattataatcatctgagaccagtatcatgtgtgcagtcgctgttgacctaaatgttatgtagcatgtgactagctgatgaatctttgattatggctgaatgttctcattcattgcaggaaaaaaatatcctccaaatcactaggtagtatgtaagtgaccaaaacttttttccattttatgttggagccaaatcattagtgttaggataaattacttctttatgtatgtgctctaaaatgaaaagttatttctgaatattaaagcatatgtattaagagtataaaaacaagatacagattttggtgtgaaatatatcttatgattcaagtcataatttaaatagaattgaagatgatgtgaaatcactgggctggaagtagcttataccttgattagtaagaggaagcccgggatcatcctgtgatggtaaacacttttatatgttttacttataactttgccaggaaatttcaacaaacttcatattaaaggacatgatttctgtatacttagtaatctgctatgcaaattgttgcattgaaatggcagacgaagcaagaagattgggagaaagtagctgtgggacttggagataggaaaataaacagccgggaaaactgcagaatgtgggaggaataattgcattcattgtattactatctgatttatattttatgaaataatttggtttcttaagatagtttttcaattttaagcacaccttttttaactggtgtggcagcttttctggtaagtggtagatttatgttagaagcatgtctatgcagcatattatagcattaaatatgtatacagatatctaactgaaataaaaagtgttttaataattaaaagtttaacatatgggcatatgtgacatatagtgatatagcatgtctctttagttttgttgtttttgttgttgatggctaaccacccatgcttgtcttaaaaattgataaggtaccactgatgaaattatgaccaggtgggcccgagttagtaccacatataacaagagacccttgcctgcaacatcatgggaggacatgaagaagggatcctttgagggaacaagccaaaacctaccaaagcgtaaacaacttgaagccaataggctatccctcaaaaatgatgcaccccaagcaaaacataaaaagaacaaaaagaaaaaagagtacttaaatgaagatgtgaatggattcatggaatacctaagacagaattcacagatggttcacaatgggcaaattatagcaacagacagtgaggaagtaagggaagaaattgcagttgctttaaagaaagacagtcgacgggaaggaagaagattaaaaagacaagcggcaaagaaaaatgcaatggtgtgtttccattgtagaaaacctggtcatggaattgcagattgccccgccgcccttgaaaatcaagacatgggcactgggatatgttacaggtgtgggtccacagagcacgaaataaccaagtgtaaggctaaagtagacccggctcttggcgaatttccttttgcaaaatgttttgtttgtggagaaatggggcacctgtctagatcttgtcctgataatcccaaaggactctatgctgatggtggcggttgcaaactttgtggctctgtggaacatttaaagaaagattgccctgaaagtcagaattcagagcgaatggtcacagttggtcgctgggcaaagggaatgagtgcagactatgaagaaattttggatgtacctaaaccgcaaaaacccaaaacaaaaatacctaaagttgttaatttttgataacagctagcactatcatgagttactacctcattgttactttctaaaccaggcccgcttcacgagttagagttgagctcccctgtagccaggactatgctgtagatatcagtatgatctgggtgtggccaaaaacaattttctttattctgtctatcaaatagtacttctaccactgtttggagaaaattgaagaaaagaataagatgattaaatgaattctctaaaagaacatattttaagagacagaacttagacataaccaagtagttgtatacctgattgtaacaatcatcttttataaaagcaaaattatgcataaatgtaaaacacccctaaacaaagggaacaaatgaatttttggttatattgttttcttggctcaaagtatcaatttattattataatagaaatttataagttgctagaaagtctatatttttaaagtacggaataaaaatatgttttctattaagcaatagaaatatttttgtgtataatttttctgaatacttgattctcgattgaaatatccattgttcgttaatatccatgtaacaatcccattggaaacaagatttttttgaatcctagatgagaataaacagggatttggtttttgttttagttttgaaaaaaaaaaaaaaaaaaaaaaaaaaaaaaaa

SEQ ID NO: 30909 - DNA, 1059 bp, Homo Sapiens
cgctgctggttgaggctgtgtgggtcggggacgggccgaggcgatggcggagaagtttgaccacctagaggagcacctggagaagttcgtggagaacattcggcagctcggcatcatcgtcagtgacttccagcccagcagccaggccgggctcaaccaaaagctgaattttattgttactggcttacaggatattgacaagtgcagacagcagcttcatgatattactgtaccgttagaagtttttgaatatatagatcaaggtcgaaatccccagctctacaccaaagagtgcctggagagggctctagctaaaaatgagcaagttaaaggcaagatcgacaccatgaagaaatttaaaagcctgttgattcaagaactttctaaagtatttccggaagacatggctaagtatcgaagcatccggggggaggatcacccgccttcttaaccagctcaccctccctgtgtgaagatcccctgggactgcgatgcggcgtgaggctgggactgcgagtgctgacgccaccttcctgctgaggtgggactgggccctggacacacccctcagcccctctgtcctcattgtttggcctcatgggaccgaggggctggaggagaggcggagctgtgccccagctgttccagcagcttgtctggcgtcaactggctttcagagtgctgacccctcatcactgtggggatcattctctctgagggcagatgaggcgcaggaaaatagtcttggaaatgttaaatatgatgggtaaattaaaagttttacaacattctacctaatatttttcttttaacatactctttctgttctattgtattatggtgtccgaaagctaaataacgactaggaaaaatttttttaaaaaaagaaaaatcagtttaatgtgggaagtacttaagtggtattatattttacattttcaagtatagtgcataaagaatgttttaaatgtaactgttttcatggatttcaattagacatgcctataataaactaagtatgtggcttaaaaaaaaaaaaaaaaaaaaaaaaaaaaaaaa

SEQ ID NO: 30910 - DNA, 5355 bp, Homo Sapiens
cggcctggccgcgtcccccgcgcgggccatcttggtcacggccggcggcggacagagccgcggaggaaccgcgagaccccagggcccagagcaggtccagccacccgtctggctccgtagtccgcgaagtctgcagtaaaggagccgcgtgggaccggggccgaagtccctagggcctggcaccgcgtgcccctctctcgggccctcggcttgggggtctcgcagcgccctgccgtcgtgcaccccacactgcccccatttctacaggggcccacctggtcaccacaccctcttggtccacccgcggatctcagcgtgtggctgacctctggccagcatggtgcagccgcagacgtccaaagctgaaagcccagccttggcagcgtctccgaatgcccagatggatgacgttattgacaccctgacctccctgcgcctcaccaactcggcgctgaggcgggaggcttccaccctgcgggcggagaaggccaatctcaccaacatgctggagagcgtgatggcagagctgaccttgttacgcaccagggcgcggatcccgggggctctgcagatcaccccgcccatctcctcaattacttcaaacgggactcgacccatgaccacacctccaacctctctgcccgagcccttttccggggacccaggccggttggcggggttcctgatgcagatggacagattcatgatcttccaggcctcccgcttcccgggtgaggccgagcgtgtggccttccttgtgtctcgactgactggggaggcggagaagtgggctatcccccacatgcaacctgacagccccttgcgcaacaactatcaggggttcctggcagagttgcggagaacctacaagtctccgctccggcatgcgcggcgcgcccaaatcaggaagacttctgcctctaatagggctgtgcgagagaggcagatgctctgccgccagctggcctctgcgggcacggggccttgcccagtgcatccagcttccaacgggactagtccagcgccagccctgcctgcccgagcacggaatctttaagaatccgccagcacttggtagcgtctgcagccacccaggtagcatacgctctttgctgtgtagaagaaatgcccatacgacagctttgcccctgtttgaagacctcccttcttgcctctccagacgtgttccccgaggagatcttccttccgtccttcctggcgccctggttgcccaccttgccgtgcttcctcttacgtgctagctttgtacctatcgctcactgcatgctcgcctccctcttgctggcatcccggcctgtttcaatgactaccgctctgctacttaggcacagggactccgccgcacgctgacggaccacgagggctgaccccttccagcctgacttggttcatggaggctcctactctgccctctccaagctcccctggcggctccccacctggttgcccagttcctattgatgagctctggacagaaagatgcccgtttggccaggctggtggcttgatgggtgtacctggagagggggtctggcttcctgcccaagatgcctcccagccctgccagggcccggtgcagcgggcagggcctcatctgtgctgtagtggtcgagtggttgctgcaaggagcgtagttctgccatgtctgggggccaggttccactctgcacatgaatatgcagtctgggaggccccactgctctcactgggaaggaccaatgttgcacctctgttaatgcctgacttcagctgctggtgttctgatggagccagaggcttggggaatctggaacttgcctgctaaataaggtcgtggtggactctcagccattgggcaggtctatcaggctgcaggttcctacacacccacgcctgagggtcatagcaggctaagggtggataccagcgactccctttgctgcccaggatctccatgggcagtgccacagcggctgatgctcagtcactcctgcttctaccccctgtcactgatggcgagccttgcccagcttgagacctgttcccatctctattcaggtgccatgtggccttcactgcagccctgcagccacccacgcaccatctgtgggtctccaaaggcaccttgtagcatgtactccccgtgcctgggcaatcagatgggctgcctttgtccaagggaaaacagactcccttcgggaaacatccttaagcacttaaggccggggggggtgtctgcctctggcaacccagccagggtcttggtggcatttgtaaaagcaaagagctgtggactgccgtggtcctagtgtggtgacaatgcagcactggcatgcatgtcctccttctgaaggacctcatccttcctcacagggggatgaccaagaaatcattttgtggctgagtttggccacgccctttggactgtgctgttccgccatatttcaatgccaaatgaaccacattgacatgacctggaccatagggcttcctatcctgggctcagctgcccctgtctgaagggtcttggcttgattgcagaaggacaacctccgcacccacctaaagacatgtatatgtcttgggatcccagagattgggtccttgggcctggcttcttaagagttttgatgatgctgggaaaagtgactgcgattctgaagaaccgctgccttgcaaggtcaaggacattcagtggttgctggggtccgcagactactgccacccactcaccatcaactctgttagcccaattgccctgctgaacaactgcctgaatacaggctttaggttcccctggactccagccaaggctgttcaggtgggaccatggtgctctttaagcgtgatcggagggaagacacacagcagggccaccattccatgaatgggaggtgtacagatcactttctctttgtgctcagttctgttctgtctccagcagctatattggtaagactagtacctgccagggagaggtgcccccaagtgaaggggtacagtggcacctgggaaaaggcacctggaaggtttccatgtggcccagcccagcatggaagcagggtgggaactctgctgtgtcgccagcgctcactctactcgagtggctttttgaaagccctaccatgtctgtgtcaggcctgtgctgcttcacatcctacagctgcctaggaaaggccggccacgctccctgtccacacactccctgtccacacactccctgtccacacactccctgtccacaactgcagccgggccctctgcctatgggcacccaatccaagcagctgctccacctttgtttggcatggtgatttgtgttttttctcttggtgcttatgtgtgtgggcttgggacgagtgctggtatgcacttaggaccttcttgatagctccctgcactttggaacacggagcagatgagagagggtcggggcttgccctccaccttggacttggaagaagcccacattggagaggtgaggaccccatggtggctctagtggaagatacgttagtctccagctaaggaggatgaggcgcagccccagagggagacctcagtgataggggatcaggctaagaaagtgggggaagggagatgctttgtacatattttggggttataatttctctaaattttaggagaacgggtattgattgataaaagggacaggcagtagtgttcaacagtgcatgtgaaggaaagttctgttttccatggttttgacattctttggactgtattgtgactgctgtctggtccacatggtacccctttggtaagtaggcttcagtgcataccagggtatcactggagatgggagttagtgaaggggtgactccctggcctagtatagtgtgaccctgggactaacttaatgtcctaaagcattttggtgacttctagggaatagcaaagacctatttcattgtccccaggtaagtatgtgatgagcaatgaggaggagtggaaaacaaaacccagaaagtgcggcaggaccagcctgacgcacacgctcctgttgtcatggcagacagccgccttgggtgggcaccaccctggcagttccagcctgtaggggagtgaagggacatggctgagctgggcatgtgctgaggttgacttagggaacaagccctgggattggacaaaagggcccatgctgcagccactgactgggggcagagctctgggtggaagagggaagagatcctaatggaggcgcctccatctgcaaccacagttgtaaggctcatggcacctctgcttggaaagcactggtttagggacttagagaggtaggcacaaggtgggtctcctgggtaagggaagcaagagcagactgttgggccaacaggagaagctccccagagtaggggagaaggttggggtgtagggccttccacgtggaacagacagcccctgtgtctctgtctcttggggacctgagtttgggtggggtggcagttggcacagcgcagatgcggtagagatgggaggaaacccagctcctcacttccgtgtgcctcatgcctttgcatacacaagcaccaaacctactaggtcttctcattacccatgtaaaccacatgttagataaatttttgcaagtagaggaaagaaggaaataaaacatcacattttggtgtctctcaggctttcccccccaactatggtttctttgctttttgttttaacatagttttgttgctgtcttctgtaatgatacagttttgtgcagctgttttcacttagcatatcgtgggcatctccccttatgattactaaatattttattttggagtggctgtgtactctcccattgactagatggaccattgtgccagttgccaatcactaatgctgttactaacttttcagttataaattgatgaatatctttgtgcacaggctgtttcccaatgtcaagttattagggtagactccaggaggtgggattcttcaactaaagaatatgaaaacctttgaggcttttactacatattgacaaaatggtttccggaaatatttgtatccccttacactgccaccagcaaggataaacatgtccatcttgcccgtattgggaattatcatctggctaaatatttgctaatttgataatgaaaaaatagcatcgtgtttcagttggcatttcactgacttctagcacggttgaacatctttcatgtggagcgattgtatttcctcctttgtggattgtcagtgtcctttgctctatcttctggggtcagataaatttgtatgagctcggtatatattaaagatattaacctggtgtgtgtcatatttgctacagcaaaaaaaaaaaaaaaaaaaaaaaaaaaaaaa

SEQ ID NO: 30911 - DNA, 3500 bp, Homo Sapiens
ggacggcgccggcgcgtgcgcgctccctcggtgcggcgggctgcgtgcgcgagtgggaggtggcaggcctgcgactccggccttgtccgcgcccgctctcggcgcgacgtctccagccatgaaccggtttggtacccggttggtgggagccacggcgacttcttcgccgccgccgaaggcccgcagcaatgaaaacctcgacaaaatagatatgtctttggatgatatcatcaagttgaatcgaaaggaagggaagaagcagaattttccaagactaaatagaagactcctccagcaaagtggtgcccagcaattcaggatgagagtgcgatggggaatccaacagaattctggttttggtaagactagtctgaatcgtagaggaagagtaatgcctggaaagagacgtcctaatggagttatcactggccttgcagctaggaaaacgactggaattcgaaaaggaattagtcctatgaatcgtccacctctaagtgacaagaatatagaacaatattttccagtgttaaaaaggaaggcaaaccttctgagacaaaatgaagggcagaggaaaccagtagcagttctcaagagacctagccagctaagcagaaaaaataacattccagctaattttaccaggagtggaaataaattaaatcatcagaaagatactcgtcaggcaacttttcttttcagaagaggcctgaaggtgcaggcccagttgaatacagaacaactgctagacgatgtagtagcaaagagaactcgtcaatggcggacttccaccacaaatggagggattttgactgtatctattgacaatcctggagcagtgcaatgcccagtaactcagaaaccacgattaactcgtactgctgtaccttcatttttaacaaagcgggagcaaagtgacgtcaagaaagttcctaaaggtgttcccctgcagtttgacataaacagtgtcggaaaacagacagggatgacgttgaatgagcggtttgggatcctgaaggaacaaagagccactctcacatacaacaaagggggaagccgctttgtcaccgtgggataggtcccatgtcaaaggaacttttgagtgatgactctgagaagttgaattgcttgaagagttcatcacggaaattcaagaaactttacttcaaaatattcacaaggctaaataactcttatttttatttttgaaggtttttttttttaaaaaaaaaaacgtataaaataatgccctgaaagaataatagggattatacctgtctgttcttaaagatttcatggttggctcagacagaacaatcatctgtttgacttctttggttcctcatgcagcagaaggaagacagaaagatagaaattgattatttttatgatagcagtattcaggatctcatcacctttgcccgtgttttagactttgtcatggtaaatcctggtcttcataaacatgagtaggtcccttggttgctgtcacttgccctttaatagtgttgatgtagtcagtgccgttgccttttcttcattagagacacagaacaatgtattagaatttccagctgtgggtttgaagacttagggggacatccagaacgtgcttcctctttcagacggtgtaaagtcccctggaattacacagctttagtgctgagcttttaacaggaaatgtggccctaggtattagtcttagtttaaaatgttggtgtttagagactgtaaatgcatattcacaaagttatctgatagggccttggaggagaaggtccagttttaaaaaatgacagtttgtgtttaataaatgaaggcatgagaggaagtaagtagcaagttgaaggacaggtagttgagatgaaacacttcaaaaccctggttatagatgtactgtttggatgtagcatagtcttgagtctagcgtccacaaagaattattcaaatgatatttagaagaattataactattacattgaatggagtcccttggatattttgatagtaaaattaatagccataaagtcctagacttcttatttgaagttaaaatttcttatttgaaaagttgaaatttatgagctttgaagattgctaaattaaataatttatagctccaaaaacaaaaatatacttgtatatgtcacagagaaaaaaaatgcaaaatttataatagagttacattaaccttgttgtttacctttcactgatttcttatatggtataaattaaagttcaggcatttatggggagaaaaggccctccccaccgacccgccacctgccacctctgacggagtgggagaagttagtctgtgctaagatagtactgagtccccagatgttgtatactgtaaattacagtataatgccaaatgcagcaaaatcttccagctgtacgttacaagtttggtcattttgaagcttgacattttagtttgccattatgttaaaaacatctaaataggtgttagtttctcaggagtagattgttagtgttgacttttcctgtaaagcagacatcgttcttggcctgccctgcattgtatactagatttcattgttgtctctcatgcttcttgagttgcttcatggtttatgctcgccatggaaagctatcagtaacagtttcatgcttataccaaagaattaaatctgatctttaatatctgatattttcctggtactcgtactgataagggattattggaagtcagtcacagaatttggaaataaattctagtctctccttagctatttgatgcttttcatataggccaagaactcattgcaaaacatttttgcaaggatgaatgcctgtatttggtctaggaacagtacattttagtctgatttagaattactggtagcttattttaaagcaaggaaaagcagctgagctcaagtttgctgtctttagaatggtttgtgaaaatatggtataaaggtgttttcattttcctgttcttacctattattgtatagagctattcatgccattttttgggaaaactttaaaaattgccccaaatactgacattgagtgcattaaataacaaattatctttgatacattaaacttttattcttcatgcatctgtaatttaattttaagtataatgttttgcctttggtacaactaaattaaaactcttggtggtcacatattgtatataaacaaaacaatatgctttgttgaaggaaaattttctttattggaatgtggttgtaatccttgttcagttcttaagtttcggttttttttaaaaacaggatgcaacttaaacttttctttgcatcaaggtatatgcaaaacattggtgccgtgcatcaccaaatgaaagtttgtatttaacgaggaggtgctttacactgtactttttggtgttttttggaaaagttacatttagatctattctgaagctgttcatttttaacaaataaaatgttacaggtttcacatgatttattctcagctctaaaaaaaaaaaaaaaaaaaaa

SEQ ID NO: 30912 - DNA, 1769 bp, Homo Sapiens
gacaagacgcgaggccggcagcgcccacccggtcgcaatggagcttcccctagggcggtgcgatgattcccgcacctgggacgatgactcggacccagagtcagagacagacccagacgcgcaggccaaggcctacgtggcccgcgttctcagtccgccaaaatccgggctggcgttctcgcgcccctcgcagctatccacacccgccgcgtccccgagcgcttcggagcctcgggccgcgtccagggtttcggccgtaagtgagccgggccttctgagccttcccccggagctgctgctcgagatctgctcctacctggacgcccgcctcgtgctccacgtcctgtcgcgggtgtgccacgcgctccgcgacctcgtgtctgaccatgtcacctggaggctacgcgcgctacgccgcgtacgcgcgccctacccagtggtggaagagaagaactttgactggccggcagcctgcattgcgctggagcagcacctgtcccgctgggcagaggatgggcgctgggtcgaatacttctgcctggccgaaggccacgtggcttccgttgactcagtgctgctgctccagggtgggtcactctgtctgtcgggctcccgagatcgcaacgtcaacttgtgggacctgcggcagctggggacggagtccaaccaggttctgatcaagaccttaggcactaagcgaaatagtacccatgagggctgggtgtggtcactggcagcgcaggaccaccgcgtgtgctccggctcctgggacagcacagtgaagctctgggacatggcagcggatgggcagcagttcggcgagataaaggccagctcagccgtgctgtgcctctcctacctgcctgacatcctggtgactggcacctatgacaagaaggtgaccatctacgaccccagagccggcccagccctgttgaagcaccagcaactacactccagacccgtgctgaccctgctggcggatgaccggcacatcatctcaggcagcgaggaccacaccctggtggtggtggaccgccgagccaacagcgtcctgcagcgtctgcagctggactcctacctgctctgcatgtcctaccaggaaccccagctctgggctggtgacaaccagggcctgctgcacgtcttcgccaaccgcaacggctgcttccagcttatccggtcctttgatgtgggccacagctttcccatcactgggatccagtactccgtgggagccttgtacaccacatccactgacaagaccatccgggtgcacgtgcccacagacccaccaaggaccatttgcacccgaaggcatgacaatgggctcaatagggtctgtgctgagggcaacctggtggtggccggctctggagacctgtcgctagaggtctggaggctgcaggcctgagcaggtgggcgtggatgtggatactgcctgccggaggctgggcttcctcctctgttcttgggggaccatccccaatgttggtgctgcctccgccccgtgggcctagggcacaaggagtcccagccacattcgggtgagcgtcctggcctgggccctatgcccgggggaagggtgaaattggggttcaggcccacccagggggccgcttcccactcttgggccctggttttgttatgatttggatgccccgctctcagttgagagcgaaggagaaataaacctgacatgttggtgcttggaaaaaaaaaaaaaaaaaaaaaaaaaaaaaaaaaaaaaaaaaaaaaaaaaaaaaaaa

SEQ ID NO: 30913 - DNA, 1026 bp, Homo Sapiens
atctcccaggcgaccggctccgcagcaagatggcggacgagaaggacagggaagagataatagtagcagaatttcacaaaaaaatcaaagaggcatttgaagtctttgaccatgagtcgaataatacagtggatgtgagagagattggaacaattatcaggtcattaggatgctgtcctacggaaggagagctgcatgatctgattgcagaggtagaggaagaagaacctactggatacattcgattcgaaaaatttcttccggtgatgacagaaatactactagaaagaaaatacagaccaattccagaagatgtccttcttcgagcttttgaggttttagattcagctaaacgtgggtttcttactaaggacgagctgatcaagtatatgactgaagaaggtgagcctttttctcaagaggaaatggaagaaatgttgtctgctgcaattgatccagaatcaaattcaattaattacaaggactatataacaatgatggtgatagatgaaaattaaatgttctaaagataatttctgattgaaagaacaattttagaaattgcttgttcttgttaatttcacatcttatcttaggattcctatatgtgatattttataccttgtgacataactattttaagacactttgtttttaaagatgatcgtaacactttaaaccaaatttagtatgtctagccttacagaatgataaattactatttatttaaaaactattcttaaaacattttaacattagaatggattgttgtttattttctacaataaaactcaggtcaccttcgaattaattaagctgacaaaatgaaaatgacttaattacccaaggtttggcatgtaaagatcttaagagggtgcagaacgaaccactcgaaaacgagtagcagtgtaatgaaggcttcttttttaaacaataacaaatgcttcatcaatctgagtgtggaaggtgatttatcaaaataaatattactaatcgaaaaaaaaaaaaaaaaaaaaaaaaaaaaaa

SEQ ID NO: 30914 - DNA, 5233 bp, Homo Sapiens
accccgagcgcggccgcggacgaagatggcgaccgccatgtacttggagcactatctggacagtatcgagaaccttccctgcgaacttcagaggaacttccagctgatgcgagagctggaccagaggacggaagataagaaagcagagattgacatcctggctgcagagtacatctccacggtgaagacgctgtctccagaccagcgcgtggagcgcctgcagaagatccagaacgcctacagcaagtgcaaggaatacagtgacgacaaagtgcagctggccatgcagacctacgagatggtggataaacacattcgaaggcttgatgcagacctggcgcgctttgaagcagatctgaaggacaagatggagggcagtgattttgaaagctccggagggcgagggttaaaaaaaggccggggtcagaaagaaaaaagagggtcccggggccgaggcaggaggacatcagaggaagacacaccaaagaaaaagaagcacaaaggagggtctgagttcactgacaccatcctgtccgtgcacccctctgatgtgctggacatgcccgtggacccaaacgaacccacgtactgcctgtgccaccaggtctcctatggggagatgattggctgtgacaatccagactgtccaattgagtggtttcactttgcctgcgtggaccttaccacgaaacccaaaggaaaatggttctgtccacggtgtgtccaggaaaagaggaagaagaagtaggaggagctgtgtgcccggatccgaggagcaagttaatctgtcccttcattcgtgtcgcaatatttcccttccttttaaaactaccttgttcggttgatacttagtaactccgtggccagttgaagcgctggatgtttcctagaacaagaaccaccaaagcctgttcgcacagaagggcgaccttgcagggactcgccgccgcgacctcagtgtggcttttacaggactccccccgagcatcagcagggaccccggcggacgtgggcgggcgcgcgtgagctcgggctgcccggccgggcgtgcgggcggggacatggtaacctggtccacggagggcggccgccaccctcgcgtagctttcctgtggttttccaggactgtccggtacagcccgggctccgcgtgccccgcccgctggagcacctgccaccgaggcgcgcgtggggccactgccgtggcggcggctgccctcctcacactcggctccgcgccgcctccggccaccgtgcgctcccgcgtggggcgcctcggatgggcccgggagggctgggggctcttccctggaggaagcggcctccgcttcgctggcgccgcctttttagcttggacttcagtcctccctcggggactcacctccggagtaaacggctcttcattagcttggagtggccgcaggtcccgtgaccagcacccgcgagaccctgtgcgacagctgggctgatgctccgtttctctgggaattggtgattttttactgtgaagatgaaattaccctaatagcatgaagatcgtgggtctgtgtgtccgtgaagtgagtcccgtctgccaggagctgacgaaccacgaatgcttctgcctgtgctgtgcattcccaggcccgcagctcccggtcgaggggactccgatgtgaatttgttgtgaatttgttgtgccacaatagcagttctggaatgaagctaggaaactcgagtgtgctttttgtttaatgagcgttcaccaagctgagccggagccatcctttcggtggtagttggggaaggctatgcagatttgctctgttgtgacgcgttggtgacggtgcccagcctgcggttccccacagcatcgcaggcgctcggaaatcctctcccgtgcctttagaggaaggagaggattgctgaggaatgcagggacgcctgtttctgtcctcacaccacagaaagaaacctgagggaaaactgagacgtgaggttcctgatttaagaagcctgggtttcttcatggtggggggccatttggaatgacagcctcacttccttctgatggctacatctgtatcttttcctcctgtgtttaatgtttcactagggagaggaaataaagcagaaggaacgtgtgaagctctgtgtctcagacggggccctcccgtcgagaagctggtagtcagtgagtgagaacaagagaacaagaacaccctgaacagtcctggttgggatggtgtccacattcatgttctgcggttcttgaacacacggatgcctctgggccacctgtccttttccgagggtgtgggtgggagtggatcctccgggcgcaggtgccaggcaggtgcaggcgggcggtcggccactgctgctgctcgtccctgccagtgtctgggcctgaaggggctccctccaagcggtgccttcctgcggcttagaagggaaagcgccagagagggcaggctacagtgcttcacacccttcgccacggctgtgaaactggagatgggtgggttttgtatgttaatttttttttttgagacggagtcttgctctgtcacccaggctggagagcagtggcgtgatctcggctcactgcaagctccgcctcccgggttcacgccattctcctgcctcagcccccccgagtagctgggactacaggcgcccgccaccacgcctggctaattttttatatttttagtagagacagggtttcaccatgttaaccaggatggtctcgatctcctgacctcacgatttgcccgcctcggcttcccagagtgctgggattacaggcgtgagccaccgcgcctggccacccagctaagtttgtatttttgttggagacggggtttcaccatattggccagactggtctcaaactcctggggtcaaatgatccgcctgcgtcggcttcccagagtgctgggattacaggtgtcagccactgcgctcagctgggagatgaattttcatttaatgacttaactttttgttagcacaggttttgtgtgtgtgtgtgtgtgtgtgttttgttttttgttttgtgtttttgaaacggagttttgctctgtcacccaggctggaatgcaatggcaccatcttggctcactgcaacctctgcttcctgggttcaagtgattctcttgccttagcctcccgagcagctgggattataggcgtccaccaccacgcccagctaatttttgtatttttagtagaaatggggtttcaccatgtgtggccaggctggtctcgaactcctgacctgaagtgatccacccgcctcgacctcccaaagtgctgggatgacaggcatgagccaccgcacccggccaacacagatgtttattgatcgtggaggatacattgtggaaaatgtttttctctcttttaccatttttgggaagagggataggtaagtgcagggagtttgtgctgaaacagcgcctggcaatttttcagaaatgaatttgatattgcgctccacctttgagctgttcacacctgtggctacccctggaaagcgctggggttgttgatgcttttggctgcccggcttcctgaggtctcgctgctttttggggaaagatgactggcttccctgtgggacgcttttgtctgacacgtgatgatgtggtcctgcctgccactgtgcaccatcccaggtattgaattttgaccttttcttttcaagtttctgtgcttagtgtttttaatgtttacttttgccacttacaataatatcaccaaaataatatgcatagagttttggaagaaacatagaaaacatgagcagaatgagacaattccttgggctgtagtttggacccaactgaatcctgagtgctctgtggctgacgctgtctacccgtgggagagacacactcaggagtggccgtttggccagaaaagaaggtcatggcccctggcctggcccccgccctgcagggacacagaagccacaccatttgcaccatccacgccttgctccagaaggcctggccgccttctccctgggggtgattcaaggatttggtctcggaccagacccccctccacagctgcccggccccagacccatctcttggattgagggtgtgtgggctggaaccagtgggtcactgtggcagcttcatctgagccgaaggtgtgggtcctctgtggctgtgcgattgacctcgatgggaaggagcgttctacccattttccttgttttcagtgctgcggtatcagtcagtgatctgaggaaatcctgtaggggaaggcaggctgcagtgaaaacaggagctggtgaaaccgagccctctgcatctgcgaatgtgccctaggtgctgctgctggggacatggatgccaagcggaggcctgcgtggcctcctgagcagcagctgaccgcccgtctcatgctggacgggacccctgggcgggtggacatgagaccactgttggccagggacgccgtgcggaggcctacgtggctgcctgagcagcagctgaccgcccgtctcactgttggccagggctttgtggcgtgggtgttttccagtctgcctggagcagcgagaagcagctgtgcagactggtggcggtgggagggtttgctgggactgatggggacaccggccagcttgtctggtgtccagcagccctgccggacttggcctcctgtcctgtcgttgggagccctggctggggctgctttgagcaatgacgctggcccagagcagcttcccacatgaccccagagccgagggtctgccctgtcctaggttaggtcttcatggtttagagtaaaaccgtgagggatgttaattatgggcattgaagacttaaggttttcttaaatttttagtgagcagtgattggccttcaatacttgtgctgagaggaattttaagccaggggaagtgtaagaaaatgttcccattcaggagagattgtgttggagtttctttcttcctctgtatgtattttgtggtgtccacctttaaccacgtttcatccaaaacgatgatgcagctttaacatgaatgttacatttttattttcaaggaattattatctatgttccctttgtaaaggaaagataatgttgtaaatctttttattagataatgtaaagatgtatatcagtatttttggatcatgttatagattatggatatattgtttaataaataaagtattttttggaacaaacaaaaaaaaaaaaaaaaaaaaaaaaaaaaaaaaaaaaa

SEQ ID NO: 30915 - DNA, 1230 bp, Homo Sapiens
aaagacttccggtcggcgtgagcgtgaggtgtgggtgttcgtttctcaggtaaaacatggctaaaagcttacggagtaagtggaaaagaaagatgcgtgctgaaaagagaaaaaagaatgccccaaaggaggccagcaggcttaaaagtattctcaaactagacggtgatgttttaatgaaagatgttcaagagatagcaactgtggtggtacccaaacccaaacattgccaagagaaaatgcaatgtgaggtaaaagatgaaaaagatgacatgaaaatggagactgatattaagagaaacaaaaagactcttctagaccagcatggacagtacccaatatggatgaaccaaaggcaaagaaaaaggctgaaggcaaagcgagagaaaagaaaggggaaaagcaaagcaaaagcagtgaaagtggcaaagggtttggcctggtagactcttaaaaccttggaaaatgccacatgggatagatgacggattagaatgtatacacatgtatactttgatttcaactgccaccaaatgaaaaccatttgttttcctattttaacttggccttttttcttcaattcaaacccagcataactcctcaagtttgttttgggaacttgaataaaatattttctttgatacatccaagctctactgatactttaactggatgctacccaatatccagttataatcaggcctcaacgttctgtcaggtattaatatggttagaattgttcttacaactggtaattatagtcaatagagataaaacagatgatgtactgacaaatttttgtgaacttagattttaaagaaagttgttgtataatcatatcatttaaaaatactacattagggctgggcatggtggctcacacctgtaatcccagcactttgggaggccgaggcaggtggatcacgaggtcagttcgagactagcctggctaatacagtgaaaccccatctctactaaaaatacaaaattagccgggcatgggggcgcgcacctgtagttccagctactcgggaggctgaggcaggataattgcttgaacccaggagatggaggttgcagtgagccaagattgccccactgcactccaccctgggcaatggagtaggactctgtctcaaaaaaaaaaaaaataatattaatggatcttataaagtacttgtgtggagctttgattccacagaataaaagatattttgtgtgtagatcttc

SEQ ID NO: 30916 - DNA, 2275 bp, Homo Sapiens
ttatttggacaagaggcacattgacccaatttggagacgtattttggaaggaggtgtgaaaaagacagcatgaactttaccccaacacacacccctgtctgcagaaagcgaacagttgtctccaaacgtggtgttgccgtcagtggtcccaccaagaggaggggaatggcagattcactggagtcaacccccttgccttcccccgaagatcgtctggccaaactccatccttctaaggagctcctggaatattatcaaaagaagatggctgagtgtgaggcagaaaatgaggacttgctgaagaaactggaactctacaaagaagcttgtgaaggacagcataaacttgaatgtgatttgcagcagagggaggaagagattgctgaattgcagaaagctctaagtgatatgcaggtctgcctcttccaggaacgggaacatgttttacgcctctactcagaaaatgaccgactgagaatcagggagctagaagacaagaaaaagattcagaatctcttggctcttgtgggaacagatgctggagaagtgacctatttttgtaaggagcctcctcacaaagtcaccattctccaaaagactatccaggctgtaggtgaatgtgagcagagtgaatcttcagctttcaaagcagatcctaaaataagcaaaagaagaccatcgagagagagaaaagaaagttctgagcattaccaaagagacatacagacactcatcctacaggtggaagcactgcaggctcagctgggagagcagaccaaactttctcgagaacaaattgaagggctcatcgaggacagacggattcaccttgaggaaatacaagttcagcaccagagaaatcagaacaaaatcaaagagctaaccaaaaatcttcaccacacccaagaactgctctatgagagcaccaaagattttctgcaactcagatctgaaaaccaaaataaagagaagtcatggatgcttgaaaaagataatttgatgtcaaagattaagcaatatagggtgcagtgtaagaagaaagaagataaaattggaaaagtgttgcccgttatgcatgagagtcaccatgctcaaagtgaatatattaagtccctaaaagataagttagtacaagagaaaaagctgtccaatatgtaccaagagcagtgcatttccttagaagaagaacttgcccgaattcgtgaggaagagggaatgaggagagagatcttcaaggatcgcactaacaagatggggaagcgtttacagataatgacaaaacgctatgaggcattggagcgtcgacgtatcctggaagtagaaggctttaagacagatattaaagttctccgacagaaactgaaagacttggagcaaatgttgtataaggcaacagttaatgcccgggcaaaccaggatcttgcccttctgtgtgaggtccgtgacagcaatagacgggcacataagatacaaggagaactgaagaatcttaagtcgaaagtgtttggtctggagaatgaacttagactctgttaatgtctacttttggaaatggcccccatttagaagaggtgtgcttcttgaaacctgaggacaaggtcatctgctgccagaaaatgtaaacctgagttgactagagtggtggtattcattattgtaaagacagcttgaagaatcggggaccactaggaaagcttttcttgcatactcagcttgctttatcatttttgctgtccttttaacatttgcgaggagtaggggcctggtcctgaatgacttggaggctttcattatttatcctgtctgtattgaccggtttttgttttttcagaaggcagtgatgatgaaaacttaggaagaaggtattttgcaataagcttggctgagtgtccatgggaagaatactttccctaaagagagagaagcactcacagaggctgcctttctcctgagctcggggagaaggcagcacatcacaacctgtcacattgaaataggcgctcattctgctatttcaccttccgtcctgagcagagcctgaattacgtttttgggcaatttcatggtgtttcaccagagggcgctagagactcaaacgaaatgtccatctggaaagattcgggagacactttgccgaggggatgaagctgagatgatgcttgtatggaaagtttgatatttttatcagtcacatggcttttgaaaaatgatgtatatattttaaattaactattttcaataaaatatttcactcaaaaaaaaaaaaaaaaaaaaa

SEQ ID NO: 30917 - DNA, 1484 bp, Homo Sapiens
ggtggtttgaactttgagccttttgtagtcctgatgaataatttcattttcctcaagtttatgacactcggaacgtcaagaactggaggtttgtgcaatttgagaccggtcggcactgtgcagagatcagagtactaagagacagagattaaaatggcttccagaggaaagacagagacaagcaaattaaagcagaatttagaagaacagttggatagactcatgcaacaattacaagatctggaggaatgcagagaggaacttgatacagatgaatatgaagaaaccaaaaaggaaactctggagcaactaagtgaatttaatgattcactaaagaaaattatgtctggaaatatgactttggtagatgaactaagtggaatgcagctggctattcaggcagctatcagccaggcctttaaaaccccagaggtcatcagattgtttgcaaagaaacaaccaggtcagcttcggacaaggttagcagagatggatagagatctgatggtaggaaagctggaaagagacctgtacactcaacagaaagtggagatactaacagctcttaggaaacttggagagaagctgactgcagatgatgaggccttcttgtcagcaaatgcaggtgctatactcagccagtttgagaaagtctctacagaccttggctctggagacaaaattcttgctctggcaagttttgaggttgaaaaaacaaaaaaatgacatggtgcagaagcttgtaacattgatcacattcttaatgtaaatggtgtctttcttctggggttttcagttattgcaaagaaatgaagagattctggaaatgcatcaataacctaagaaaaagcgacataaaaatatacttatggcttgtgtttatgctcttcatcattgtgcgttgtgtgcggttacctgcttgagtgatcctgaacttgttgcgacagagggactcactggactctgttcgttatgatttgtctgtttaagagagaaaacaaagtggacttgatttttattaaggctgtttgtttttaagtgttgatagtgaacgaaaagatgtgaagtaatgatatttttctgcttacaacttatccccactcattggagtgaacagtgacgcaagctcaatagacttcataagtgttcatagaattttacaattctgagtgatcttagaaatcatttctgtttttacaaacaaggaaactgaggtccagaaagagcaagcgactttgcttaaagtcgcatcagagagctgagggtaagactcaggtgtcctgactcccagtttagtatcttttgaattttatttctgtaccatttaaaaaaaataattaacactatttgtgcaagtcagtgtttttgaaaattcagtgtcccaataaaaagtggactgcacactaaaaaaaaaaaaaaaaaaaaaaaaaaaaaaaaaaaaaaaaaaaaaaaaaaaaaaaaaaaaaaaaaaaaaaaaaaaaaaa

SEQ ID NO: 30918 - DNA, 2497 bp, Homo Sapiens; identical to SEQ ID NO: 25537

SEQ ID NO: 30919 - DNA, 982 bp, Homo Sapiens; identical to SEQ ID NO: 25546

SEQ ID NO: 30920 - DNA, 3833 bp, Homo Sapiens; identical to SEQ ID NO: 23688

SEQ ID NO: 30921 - DNA, 4779 bp, Homo Sapiens
cgcaaagccgccgggctgctgcgcccagagccagccggagccggagccggagcccgaactgcagctccagccccagccgtgcggagccgcagcccaggccggggccggcggcggctcatggacagcggggcgggcggccggcgctgcccggaggcggccctcctgattctggggcctcccaggatggagcacctgaggcacagcccaggccctggggggcaacggctactgctgccctccatgctgctagcactgctgctcctgctggctccatccccaggccacgccactcgggtagtgtacaaggtgccggaggaacagccacccaacaccctcattgggagcctcgcagccgactatggttttccagatgtggggcacctgtacaagctagaggtgggtgccccgtaccttcgcgtggatggcaagacaggtgacattttcaccaccgagacctccatcgaccgtgaggggctccgtgaatgccagaaccagctccctggtgatccctgcatcctggagtttgaggtatctatcacagacctcgtgcagaatggcagcccccggctgctagagggccagatagaagtacaagacatcaatgacaacacacccaacttcgcctcaccagtcatcactctggccatccctgagaacaccaacatcggctcactcttccccatcccgctggcttcagaccgtgatgctggtcccaacggtgtggcatcctatgagctgcaggctgggcctgaggcccaggagctatttgggctgcaggtggcagaggaccaggaggagaagcaaccacagctcattgtgatgggcaacctggaccgtgagcgctgggactcctatgacctcaccatcaaggtgcaggatggcggcagccccccacgcgccagcagtgccctgctgcgtgtcaccgtgcttgacaccaatgacaacgcccccaagtttgagcggccctcctatgaggccgaactatctgagaatagccccataggccactcggtcatccaggtgaaggccaatgactcagaccaaggtgccaatgcagaaatcgaatacacattccaccaggcgcccgaagttgtgaggcgtcttcttcgactggacaggaacactggacttatcactgttcagggcccggtggaccgtgaggacctaagcaccctgcgcttctcagtgcttgctaaggaccgaggcaccaaccccaagagtgcccgtgcccaggtggttgtgaccgtgaaggacatgaatgacaatgcccccaccattgagatccggggcatagggctagtgactcatcaagatgggatggctaacatctcagaggatgtggcagaggagacagctgtggccctggtgcaggtgtctgaccgagatgagggagagaatgcagctgtcacctgtgtggtggcaggtgatgtgcccttccagctgcgccaggccagtgagacaggcagtgacagcaagaagaagtatttcctgcagactaccaccccgctagactacgagaaggtcaaagactacaccattgagattgtggctgtggactctggcaaccccccactctccagcactaactccctcaaggtgcaggtggtggacgtcaatgacaacgcacctgtcttcactcagagtgtcactgaggtcgccttcccggaaaacaacaagcctggtgaagtgattgctgagatcactgccagtgatgctgactctggctctaatgctgagctggtttactctctggagcctgagccggctgctaagggcctcttcaccatctcacccgagactggagagatccaggtgaagacatctctggatcgggaacagcgggagagctatgagttgaaggtggtggcagctgaccggggcagtcctagcctccagggcacagccactgtccttgtcaatgtgctggactgcaatgacaatgaccccaaatttatgctgagtggctacaacttctcagtgatggagaacatgccagcactgagtccagtgggcatggtgactgtcattgatggagacaagggggagaatgcccaggtgcagctctcagtggagcaggacaacggtgactttgttatccagaatggcacaggcaccatcctatccagcctgagctttgatcgagagcaacaaagcacctacaccttccagctgaaggcagtggatggtggcgtcccacctcgctcagcttacgttggtgtcaccatcaatgtgctggacgagaatgacaacgcaccctatatcactgccccttctaacacctctcacaagctgctgaccccccagacacgtcttggtgagacggtcagccaggtggcagccgaggactttgactctggtgtcaatgctgagctgatctacagcattgcaggtggcaacccttatggactcttccagattgggtcacattcaggtgccatcaccctggagaaggagattgagcggcgccaccatgggctacaccgcctggtggtgaaggtcagtgaccgcggcaagcccccacgctatggcacagccttggtccatctttatgtcaatgagactctggccaaccgcacgctgctggagaccctcctgggccacagcctggacacgccgctggatattgacattgctggggatccagaatatgagcgctccaagcagcgtggcaacattctctttggtgtggtggctggtgtggtggccgtggccttgctcatcgccctggcggttcttgtgcgctactgcagacagcgggaggccaaaagtggttaccaggctggtaagaaggagaccaaggacctgtatgcccccaagcccagtggcaaggcctccaagggaaacaaaagcaaaggcaagaagagcaagtccccaaagcccgtgaagccagtggaggacgaggatgaggccgggctgcagaagtccctcaagttcaacctgatgagcgatgcccctggggacagtccccgcatccacctgcccctcaactacccaccaggcagccctgacctgggccgccactatcgctctaactccccactgccttccatccagctgcagccccagtcaccctcagcctccaagaagcaccaggtggtacaggacctgccacctgcaaacacattcgtgggcaccggggacaccacgtccacgggctctgagcagtactccgactacagctaccgcaccaacccccccaaataccccagcaagcagttacctcaccgccgcgtcaccttctcggccaccagccaggcccaggagctgcaggacccatcccagcacagttactatgacagtggcctggaggagtctgagacgccgtccagcaagtcatcctcagggcctcgactcggtcccctggccctgcctgaggatcactatgagcgcaccacccctgatggcagcataggagagatggagcaccccgagaatgaccttcgccctttgcctgatgtcgccatgacaggcacatgtacccgggagtgcagtgagtttggccactctgacacatgctggatgcctggccagtcatctcccagccgccggaccaagagcagcgccctcaaactctccaccttcgtgccttaccaggaccgaggagggcaggagcctgcgggcgccggcagccccagccccccggaagaccggaacaccaaaacggcccccgtgcgcctcctgccctcctacagtgccttctcccacagtagccatgattcctgcaaggactcggccaccttggaggaaatccccctgacccagacctcggacttcccacccgcagccacaccggcatctgcccagacggccaagcgcgagatctacctgtgagccccctactggccggccggcccccctcccccagccgccggccagctcccaaatggcccattccagggcctcactctccaccccttcagcgtggacttcctggccagggccccaagtgggggtatcactgacctcatgaccacgctggcccttctcccatgcagggtccaggtcctctcccctcatttccatctcccagcccccaggggccccttcccctttatggggcttcccccatctgatgcccaagagggctcctctgcaatgactgggctccttcccttgacttccagggagcaccccctcgatttgggcagatggtggagtcaagggtgggcagcgtacttctaactcattgtttccctcatggccgaccagggcggggatagcatgcccaattttagccctgaagcagggctgaactggggagcccctttccctgggagctcccagaggaaactcttgaccaccagtggctccctgaagggcttttgttaccaaaggtggggtagggacgggggtgggagtggagcggaggccttgttttcccgtgctgctcctggactggcccacctgcctgccacatgcccacgcctagtcccatctgggcccccattccctgctggtcatgcagtgtctgtatataaggaccttggaatgacgtccccatttctgcctgatttgcaacttttcttgttgatgtcgtgttgtcttgggggacccctctggggggggacctgccctgtgccccctcctccctgccgcagtgccccccaacccaggcctctattgttccatgttgtaaatacccctggggccatggtgggatgggggtgcaggccagggaaacaacgggtgggtgggggtggggacgggggtaacatttgcctatcagcagagctgggcttttatttaatttttcttaaaaatacaaaaaaaaaaaaaaaa

SEQ ID NO: 30922 - DNA, 3843 bp, Homo Sapiens
atgcgaggccacgggaaccactcgcggctgaaatccagatgtgcttctctgggcaacgtccatcaccaccaggcacagatggcgcacggtgcacactgccgagggggccggacaccacagtcaccagacagccggggcccaaccgctgggggccacacccggggcagatggacgtaccggcccatcgaggccctcatcaacgtcagctttcccggagcaaagggtgggagaacggccgagggcgagccctcatgggcgtgggtcttcagaagtggctatttgcagagacaggctcttcctgggcttcccgtctccacccgagtggctgcctgctggtggcaacaccatccaggcagggactcagggttcttgggacctggatttattgacctgctcagagaggagcccagcggccgtgcagatgggaaggcagctgctcagaaaacagggcgtctttatttgttcccgactttcctaggcaacaaattaccagaggccgccgactcgtttggggaaattgcttctgggaacagtgttatttttacctccgtcttgcaatcctctcacccacctggcaccccaccgcccagcgcacgcaagccaagtcccggagctgccatgctcgtctgtgaggaaacgctggagctgggtgcccagggctgctgggggtccacgagcccccggggccaggccgtgagcttggtcggtgggcccacggccggaggctccaggctgggaggggctggctgcaccatgggcctgctcatggccctccaggccagacgccccagggacggcacctgggctgaccctcgaagatgctccagggctgtagagggctcgggcctcaccagggctgcccttgtgagtccagggccatcgggggtggaggaggacaccaggagggaaggctgcgtgcttgtgggctcctggaggtcgtccacccacagaagccgtgttctgattatcaacacgccctctggcaggaccccctggagccagggctccctcggcagcaccgggcgctacaaccagacccgggcaccaggcagccagcagcaggggctgtgctcggatgcagctctacacgaggattttgtgccggagcctactcctgccttctttcaataccctccacaagccttcagcaaaaccaaggttcgcgacttggggaggggaggcctttatgccttttccaaggaggagaaggtatctgaggcccagcgggtagaggcctacgagacccacggccttggcctgagtacaggccgacagaaccctgtgccgtccccctgtaagcctggatgcgtgtgccagggccttgcgctggacgcagaggcctggccgaggcaccctggacgcaggccctgtgcggccaaggaggcctgcctgggcccacctggctgcagcggggagctgagcctccctgaggaggaaggaatcgcacctggggcagcaacagcagctcctgcctgggtccctcatggccgcgtgagccgcttcctcactgtaaagctcttcacctatgtaactatgtatcaatgtaaacaggaacgtatcctccgcctctgcatctctggtgaatccgggcgatacgtgcggcgctcacgcttccgcaactttgcagcgctcatggtgagtacgggggtcccgggggtcctgcagctgggggctaggccgctgcgggggggcggccacccgtatggggactcccaggctggaaaagttgtggaatggcgagctggtgaccgggcttccgggctcagtgccggggaaagaaggttcctcagccagtcggagctgcagacctggccccggacacctcactgtgtaggaaagaaggttcctcagccagttggagctgcagacctagccccggacacctcactgtgcaggaaagaaggttcctcagccagtcggagctgcagacctggccccggacacctcacccgcagggaggaagattccttcaggcagctggcattccccaggtttgaagaggtcactttcccacctctcactgctgcagaaagagcaccctctgtccacggtggacactctctagccagccagggcctcgtcttggctggacggacaagaagtgtggcctcaggagggaagcaggagctctcgggcccgctggctgcctgcatcccgacacaggatctgaagacagtgctctccctgccccgctacccaggggagttcctgcaccccgtggtgtacgcgtgcacggccgtcatgctgctctgcctcctggcctccttcgtcacctacatcgtgcaccagagcgccatccgcatcagccgcaagggccggcacacgctcctgaatttctgcttccacgcggccctgaccttcactgtgttcgccggcggcatcaatcgcaccaagtaccccatcctgtgccaggcggtgggcatcgtgctgcactattctacactgtccaccatgctgtggataggagtgaccgccaggaacatctacaagcaggtgaccaagaaggcccctctgtgcctggacacagaccagccaccgtaccccaggcagcccctgctcaggttttacctcgtcagcggaggggtcccctttatcatctgtggggtcacggctgccacgaacatcaggaattacgggacagaggacgaggacacggcgtgctggatggcctgggagcccagcctgggcgccttctacggcccagccgccatcatcaccctggtcacctgtgtgtacttcctgggcacctacgtgcagctgcggcgccacccagggcgcaggtacgagctgcgcacacagcccgaggagcagcggcggctggcgacacccgagggcggccgtgggatccggccaggcaccccacccgcacacgatgcccccggcgcctccgtgctgcagaacgagcactcattccaggcacagctgcgcgccgccgccttcacgctgttcctgttcacggccacgtgggccttcggggcgctggcggtgtcacagggccacttcctggacatggtcttcagctgcctgtacggcgccttctgcgtgaccctgggactcttcgtgctcatccaccactgcgccaagcgtgaggacgtgtggcagtgctggtgggcatgctgcccgccccgcaaggacgcccaccccgcacttgacgccaacggggccgcgctgggccgcgccgcctgcctgcactcgccgggactgggccagccacggggcttcgcgcacccaccgggcccctgcaagatgaccaacctgcaggccgcgcagggccacgccagttgcctgtcaccggccaccccgtgctgcgccaagatgcactgcgagccactgacggcggacgaggcgcacgtgcacctgcaggaggagggcgccttcgggcacgacccccacctgcacgggtgccttcagggcagaactaagccgccctactttagccggcacccagcagaggagcccgagtacgcctaccacatcccatccagcctggatggcagcccccgcagctcgcgcacagacagcccccccagctctctggatggcccggcggggacacacacgctggcctgctgcacccagggcgaccccttccccatggtcacccagcccgagggcagtgatgggagccctgccctctacagctgccccacgcagccgggcagggaggcagcgctcgggcccggccacttggagatgctgcggaggacacagtccctgccctttggtggccccagccagaacgggctgcccaagggtaaattgctagaaggcctgccgtttggcaccgacgggaccggcaacatccgaacgggaccctggaaaaacgaaactactgtgtggtag

SEQ ID NO: 30923 - DNA, 3460 bp, Homo Sapiens
cgagcccacatccgggagaggagagcggaagtggcgttggtctggccggagcccttgggtgaaattgttaggcgtggagagggagtgatgtcttccagactcggtgctgtacccgccacttcgggacccacaacctttaagcagcagaggagcacgaggatcgtgggagctaagaatagcaggacccagtgctccataaaggataatagtttccagtacactatccctcatgatgactccttaagtggttcatcgtctgcatcttcgtgtgaaccagtgagtgattttccagcatctttccgaaaatctacctactggatgaagatgagaagaatcaagccagctgctacttctcatgtcgaagggtcaggtggagtatcagccaaggggaaaaggaaacccaggcaggaagaagatgaagactatcgagaatttcctcagaagaagcataagctttatgggaggaagcaacggcctaaaactcagcccaatcccaaatcccaggcccgtcgtattcggaaggaaccaccagtttatgcagcaggcagtttggaggagcaatggtacttagaaatcgttgataaaggcagtgtctcctgccctacctgccaggcagtggggaggaagaccatagagggtttaaagaaacacatggaaaactgcaagcaggaaatgtttacttgtcatcattgtgggaaacaacttcgttcactggcagggatgaagtatcatgtcatggcaaatcataatagtttgcccattttgaaagccggagatgaaatagatgagccaagtgagagggaaaggctccgaacagttctaaagagactgggaaagctcaggtgcatgcgtgagagttgctccagtagcttcaccagcatcatgggatatctctaccatgtcagaaaatgtggcaaaggggctgcagagctggaaaagatgaccctgaaatgtcaccactgtggaaaaccatataggtcgaaggctggacttgcatatcacctgaggtcagagcatgggcctatatccttctttccagagtcaggacagccagagtgcttaaaggagatgaacctagagtcaaagagtgggggccgagttcagagacgttctgccaagatagctgtataccacctacaggagctggcctctgctgaactggccaaggaatggcccaagaggaaggtgcttcaggacctggtacctgatgatcgaaagttaaaatatactcgtccagggctccctaccttcagccaggaagtactacataaatggaagacagatatcaagaaatatcatcgtattcagtgtcctaaccagggctgtgaggctgtctacagcagtgtatctggccttaaagctcacctgggctcttgtacattgggaaactttgtggctggaaaatacaaatgtcttctatgtcagaaagaatttgtgtcagagagtggtgtcaagtatcacatcaactccgtccatgctgaggactggttcgttgtaaacccaacaacaaccaaaagctttgaaaagctgatgaagataaagcagcggcagcaagaagaagaaaagcggaggcagcagcacaggagcagaaggtctctaagaaggcggcagcagcctggcattgagcttcccgagacagagctgagtcttagagtagggaaggatcagaggaggaataatgaggaactggtagtgtcagcctcctgtaaggaaccagagcaggagccagtgccagcacagttccagaaagtaaagcccccaaagactaatcataaacgaggaaggaaataggcagtcagtgtaaaagtgctcctaggaaagcagatgtgatgctgttgtcacggggacctgtgctgggaggactgagtgaagattctttcagctgtttgtgtaaggctgtgactttctcagctccttcctcctgtgtaaatttcactgtcttcccttcttacattttgattcccccctccccttttagtaggttttcctgctattcctcgtcaagtcctcttgtttttttatcttgcccaaagagctccctctcaaggccaactataggctcctcttgccctgtacaaaactaagaaacctctttggttgtcctttccttcctggggtatagaatgttcttggaagctccattgatttagtagctgctccatcatctagcttgtgaaaccattccaaactaattttttaaaaccataactgatttgtcattttgtatttgtgatataacaagtctagaagttagaactgttgtcattcacataataagattactctgtctccttgggaaaaaaactttatggaggctgtttgtcctctcaatatggttttaagattgaaagtaagaaaacggatttaggatgaaaactctagaactaccctatgctgtttatactgggaaatgctttgtaccaagtagcagtgactagacccacagacatgaaaagcaaccttaggagtaaagtgacccaaacattaaaatgacaggaaagagaaagtagaagcagcaataaatactgccccaactttcctggagcccgaggcctcatccatagctatgatcacttgccctctgaagcttatttttgcttctttggttttaagaattgagaaatatcacattgcccctgatgttttgacagtctcctagtgctcctggtagtgccactaagggaaaaccaaggtgcgcattccttctccctggactttaccttacttgttagtctacgccccactgtttccacccatccccttagccaacctctgtctttttgaattttctgagaatattgtcctatcctcttttatatatggagttctctcctctttatatcctgagactttgacaccagatgtagatatttatctggagctggaaagaaaaattctttttctgtacctcatgcctatctggtaatgtttaatgggttatttctctttgagggtggctttctctggaacattggttagagcagctttgttgtcgtgtttctggattctcttccccattttgcgtaaatattggtcttatatattcttgcctattttgtggcatatgccacataaaaaatgaacctgatatagacaagtactaccttttcaaattctgaaaggctattaccactttaactctttgtgctcctccaaatagctttaaaatgtgggcttttgtgaagaccactttcaaacaagggagcactgaaacctgaattggatactgccagaataggtagttttgaaacaagttaaggacatggtatatgcactctgcattttcattggcagtgtgcccttaaagccctttcagtagatgagggttgtcagggaggagaaatgaagaagctatgttaatttctggtgagtaagacctggggaatgtttggcaatgacaaaagaaataaatgactctcagaaagaaaaaaaaaaaaaaaaaaaaaaaaaaaaaaaaaaa

SEQ ID NO: 30924 - DNA, 3782 bp, Homo Sapiens; identical to SEQ ID NO: 28035

SEQ ID NO: 30925 - DNA, 4852 bp, Homo Sapiens
ggcggagggagctggagctgtcacagtccccgggtgcgcctgaccgagccaagtggggtgtcatggccgcggggggcagcggctgcacttcctcagcgggcggcggcggccggggagttaatcctcgacgcacgggtcggtgtgtcccgtttccctctgtgcggcggccggcgggaccataagggcttaactcatatatttaacccccctccaaaaaggtttgaaagtattcttgaagggctgtttggacctgcattattaaaagatctcagtttatttaaagactgtgaacctgaaagcatttctgattggacttttgatgaaaactgtttattctgttgcttgagaagagataaagtaaagggacacttagtcggtctggatgaaccagcttcgggagctgggcaagaagctctgcttaaacaagagcaagcaaaaatcattcgattcgagagacaagcagaagaattcctcaatgcagtcttttatagaaaagacagtccctgggtctccgaccccaatattcccctagtggcccgtgagatcatgcagcgaatgatccaacaatttgctgctgaatatacctcaaaaaatagctctactcaggaccccagccagcccaatagcacaaagaaccaaagcctgccgaaagcatctccagtcaccacctctcccacggctgcaactactcagaaccctgtgctcagcaaacttctcatggctgaccaagactcacctctggaccttactgtcagaaagtctcagtcagaacctagcgaacaagacggtgtacttgatctgtccactaagaaaagtccatgtgctggcagcacttccctgagccactctccaggctgctccagtactcaagggaacgggcgacctgggagacccagccagtaccgcccagacggacttcggagtggtgatggggtacctccaagaagcttacaggatggaaccagggaaggttttggacactccacatcactcaaagttccactggctcgatccctgcagattagtgaagaactactgagcagaaaccaattgtccacagctgccagccttgggccatctggattacagaatcatggacaacacttaatattatccagggaagcctcttgggcaaaaccacattacgagttcaacctcagccgtatgaagttcaggggaaatggtgcactcagcaacatcagtgaccttccttttcttgcagaaaactctgcctttccaaaaatggcacttcaagcaaaacaagatggaaaaaaggacgtgagccattcatctcctgtagatttaaagataccacaagttcgaggaatggatctttcttgggagtctcgcactggtgatcagtacagctatagctctttggtaatgggttcacaaacggagagcgcgcttagtaaaaaattaagggctattcttccaaaacaaagtagaaaaagcatgttagatgctgggcccgattcttggggctcagatgctgagcagtctacccctggacagccatatcccacatcggatcaagaaggagaccctggctccaagcagcctcggaagaaaagagggcgttacagacagtacaacagtgagatactggaggaagcaatctcagtggttatgagtggaaaaatgagtgtttccaaagctcagagtatttatgggattccccacagtacactggagtacaaagtaaaggagaggctgggcactttgaaaaaccctccaaagaaaaagatgaaattaatgaggtcggaggggccagatgtttctgtaaagattgaattagatccccagggagaggcagcacaaagtgcaaatgaatcaaaaaacgagtaggaatactgtagagtgccaattactgtacaaactgggtgagcactactgcatcattgttcagctatcattgcttgcacgtaatttcatttactgtgacacttgcttctttgcagattttgcattgacttgtgtgtacagagatgaaatgtgcattctgaatgttgcatattttaaatttttcatgtgcagtatggctcggaatatgtttggccttttgcatgtttctctacaaaagagaattgagttacctcacagagaacagatacatggaagtggactccttgcctgtagagcctgcatgcttttttgtttttttttgttgttgttgttttttcttaagttatatttgtttttactttttaaaaaagaagaggaaacaaagcccccttttagaaactacgtctgtcatactgggagctttatcactgcaaattggaaagccatcttatacaaaattattcacatttttcatctacgattcaactaatcgaaggattaaactaaagaaaaaactaagaagaacaatgaacctttgactttgagaaatttggttattcactgacataattattgggtcatttatagttacattttataattttcttctcactattaaatttatttaaattagcaagctattagtgctcacccagaggggaaggtggtggaaaatgtgcacacactaccttcagaaatgcttcagttaattactttgaacactacctttgctgtaatttcatttgagattttctaagggtagaatttggtctcaccaacaagtgaggatatagccttatctcatggaggacgagctccgtatttactcaggagcagtcagggtacattacataaaacaatggaggatgcctcattttagcaaactaggtttctttgtattcttcagtccttttacagaattgatgtgctaactgaatatcattgcagcaactagactaagatattcaagatctctttattggggatgggagaaatagggaaagaaatgtgtataagtaattatgatattgcaaaagtgatacttagattttacagcctcagtagtctgcccagtgtccacattaatgaaggatccatgtttgtagtgagagaaaaaaaccccaaggtaacccgatatgatttaggatgcatatcagttctaacaattcaatcagaagtcaagctcattggaattccttttttaactgatccaaatactagtagaagggggagggagaggtgttgggttttttttttaagtttttatttaattttgttggttagaatttttttctgtttttggcatcctacataataccccccttcttgactttttctgataattagctgatattcatggttgtttagcacacagttcaggacctttgagatcatgtttgtataagcactccttgaagaatatctaagctttttctgagatgggcttttgaaattataataagggaagtttattttctgcggtttttgcaagaataagcaaagcccatggaatttaatttttcattgtgatcagattaaaattactatttgtgcaaaacaaattccacaccacatgtactgtatattctaatctgctgagaaaggtggtcaggcccttctaaatgcttaaccaaaaacaaacattattggagtttcagtgtaaaataaaattaaaattggagggttggttagattgatttcagatggatactaacagtttgaggggaggtccagatatttccaaggcataaattcttgcctggaaactttggagcaattaattaaattaggttaagttttccctcagcaacctgtgtgttcaaaggttaggcacaccattgctgttactaaaatacatgcactgctcattcttgacatagcttgggtgtgggttcctcttgttttggttattttgtgtagcagtttaatcagtggataactgagcctgtttcctcttagctttctagacttcttaacagaaaaaacagtttgggttcaatagcattttatgattctacaatattttgtcacctagctggaagttgcaataaaaattccttatgaaatatatggttttcatctgtgattgaaggaaatcatagaaagtttgctgaaagcaaagggctaagcttatgaaggaatgcctcctttgttacacactcaagaatttgtcagcacacaattaattgcagccatagtacctttttgcgtaacgtttgggatattcagtagcccaggattgctacaaaaaggtcctttgagaaaattaatttgtgcttgcttttatcccctctcagaaagacatcactaaaggcccattaaaaatctggccctaaaagttcaacttttgtagagtttattgttcagagaggtttaatcctatgtggtagtctatataagtgatgtatgagttgagttatgtaaattttgtcattgtagtgtacatggagtgatcattttactaacataaatattttctatgtgtgtttcagtggatgacaatcgagcagcagaagaatggtgtgcctaccctttaatgctgcagtttaagagaacttgtattgtgtcatttcagattgtaggctgagagttgtaaatagtgaaaatttgagtacttctattatttgttttggttagaaagtgaatttaaaaaacaaaccaaactctaaactttctcagattaaaagtcctgagacctgaagattgtaatattcatgtctgtgaagcttttaaacattacacttgagatcagtcatgacttgatattcaggtaaattttcttttccaagaagcttttgaataagcatatttcctccaaaggtctctctctttctctctctttttttgagtgtagattattttaaagcactaattgcattacattggtaactgcaatataaaatagccattattgttttgtgaagcatggttgaaattagctagtggtcccttttgaatttcatgagcctctcaaaaaagaaaaacttaagaaaaaaaaaaaaaaaaa

SEQ ID NO: 30926 - DNA, 5211 bp, Homo Sapiens
agcggagatggcggcagggtcgggtgggagtgggggctctgggggaggccctggaccggggccgggcgggggtgggggccccagcgggagcggctcaggaccggggtccaacgggggtctgggcagcggcggggaactgcacccgcgcactgggcgcttggtgagcctgtcggcctgtgggcgtacggcgcggcggcagcagccgggccaggagtttaaccacgggctggtgttgagccgagaacccttgcgcgatggacgcgtcttcaccgtccgcatcgaccgcaaggtcaactcctggagcggctccattgagattggggtgacagcgctggaccccagtgtgctggactttccaagcagtgccacgggcctgaaggggggctcgtgggtagtgtcgggctgctctgtgctgagagatggacgctctgtgttggaggagtatggtcaggacctggaccagcttggtgaaggggaccgcgtgggcgtggagcgcacagttgctggggagcttcggctctgggtgaatgggcgggattgcggtgtggctgccacaggcctgccccctcgtgtctgggccgtcgtggacctttatggcaagtgcacccagatcaccgtgctaccccctgagccaggcttcagcccccctactcccatccccacacctcccctcgagcccttggcccccactgaagactctgccttggctgaacaggggacctctgcagatgaagccttcatggtgtccccagcgcaggcccggccggagacgtttcctaacagccttgagtcgcataatgactttgccaacatggagctgtctgaggtggtgagcaacaccatcctgtctgcctacaatggagggctcctgaatgtgaacctgagctccccaccggcaggggaaggcctgggatctagcggtgctgccacctcgcccattctcacttccaacgatgccctgctctttcatgaaaagtgcgggaccctcatcaaactcagcaacaataataagacggctgagcgccggcggcccctggatgaattcaacaatggggttgtcatgaccaatcgcccccttcgggacaatgagatgtttgagatccgtatcgacaagcttgttgataagtggtcaggctccattgagattggggtcaccacccacaaccccaacagtttggagtacccagccaccatgaccaacctccagtcaggcaccatcatgatgagcggctgtggaatcctgaccaatggcaagggcacccgccgggagtactgcgaattcagtctggatgagttgcaggagggtgaccacattggcctcacaaggaagtccaactctgccctacacttcttcattaatggtatcgatcagggagtggcaacccccttgacgcccccagtggtgtatggtgtggtggacttgtacgggatggcagtgaaggtgaccatcgtccacaataacaaccacagtgaccgtctccgccgaaacaacgccatcctgcgggcgctgtcccccgagggtgctctccgccgtgctgcccctgccgcccaggcagaacctgagcgcctgctcttccaccccaactgtgggcagaaggcagccatcacccacgagggacgcactgccctgaggccccatgccaccgatgacttcaatcacggcgtggtgctgagcagcagagccctgcgggatggagaggtgttccaggtgcgcatcgacaagatggtggacaaatgggctggctccattgaaattggtgtcaccacccacaaccctgcctacctccagttgccctccaccatgaccaacttgcgctctgggacctggatgatgactgggaatggggtgatgcacaatgggacgaccatcctggatgaatacgggcacaatctggaccgcctcaaggcaggggacacggtgggcgtggtacggcgggaggacgggactctccacttctttgtcaatgggatgactcagggccctgctgcctggaacgtgcccccgggcgtctatgctgtcgtcgatctctatggccaggcggcccaggccaccattgtggacgacgtggaggtggctccagttcctgaaccactccctgaggggaacaaccaggtgtctccaagctctccgtcctcaggggccgggggctctgacctgcgcttccatcagctgcacggcagtaacgcagtcatcactaacgggggccgcaccgccctccgccacaactgtcgcagcgagtttaatgacgccatcgtcatctccaaccgggccctgcgggatggagagctgtttgaaattgtcattcagaagatggtggaccgctggtcaggctccattgaggctggagtgactgctattcggcctgaagacctggaattccccaacaccatgacagacattgactatgacacatggatgctgagtggtacagccatcatgcaagacggtaacacgatgcgcaacaattatgggtgtgacctggatgcgctgggcacaggtgcacgcattggcatgatgcgaactgccaagggcgacctgcactacttcatcaacggccaggaccaaggcgctgcctgctcgggcctgcctccggaggtgtatgcggtagtcgatctctatggccagtgtgtccaagtgtccatcaccaatgccaccggccccatggacaacagcctggcgaccagcaacactgccaccgagaagtccttcccactgcactccccagtggctggcgtggctcaccgattccacagtacttgcggcaagaacgtcactctagaggaggatggcacgagggcagtgcgtgccgctggctatgctcatggccttgtcttcagtaccaaggagctgagggctgaggaagtctttgaggtgaaagtggaagagctagatgagaagtgggcaggttccctgcggctggggctgaccacactagcaccgggggagatgggacccggggcaggcggtggtggcccagggctgcctccttccctgccagagctccggacgaagaccacttggatggtatccagctgtgaagtgaggcgtgatgggcagctccagaggatgaactatggccggaacctagagaggctgggggtggggagccgtgtgggtgttcgtcggggggcagatgacacgatgcacatcctggtggatggagaggatatggggcctgcagccactggcattgccaagaacgtgtgggctgtgttggatctctacgggccagtccgcggtgtgtcaattgtcagttccacgagactggaggagtcagaaggcacccagcctccttcccccagttcagacaccggcagtgagggcgaggaggatgacgagggcgaggagcatggcctgggaggccagaatgaagtgggtattatacccaccaccctcgagttcctggagaaccatgggaagaatatccttttgtctaatgggaaccgtacggccacacgggtggccagctacaatcagggcatcgttgtcatcaaccaacctctggtgccccagctgctggtgcaggtgcggatagatttcctaaaccgacagtggacatcttcccttgtcctgggagtcatcacctgcgcgcctgagaggctcaacttccctgcttctgcctgtgccctcaaacgggcagcctggctgctgcggggccgtggggtcttccacaacggtctcaagatctgcgagaagtttgggcccaatctggacacgtgccctgaaggcaccatcctgggactgcggctggacagctctggggggctgcatcttcatgttaatggggtggaccagggggtagctgtgccagatgtgccccagccctgccatgcgcttgtggacctctatgggcagtgtgagcaggtgacaatcgtgaaccctgagccaggggctgccagtgggaaaagtgctggaacccaaggggacatggagaaagcagacatggtggacggtatcaaagagagtgtgtgctggggtccaccacctgccgctagtcctctaaagagctgcgagtaccatgccctttgctctcgcttccaagaactcctgctgcttcccgaagattatttcatgcctccgccaaagcgaagcctgtgctactgtgagtcttgccggaagctgcgaggagacgaggcccacaggcgcagaggggagcctccccgggaatatgcactgccctttggctggtgcaggttcaacctcagagtgaatccccgcctggaggctgggacactaaccaagaagtggcacatggcatatcacgggagcaatgttgccgctgtacggagagtgctggaccgaggggagctgggagcaggtactgcctccatcctgagctgccgtcctttgaagggagaacctggggtagggttcgaggagcctggcgagaactgtgcacctcctcgggaggagcagccccctcctgtgctgctttccccctcccttcaatatgctggggcggagaccctggcctccaaagtgcaattccgggaccccaaatcccagcggacgcaccaggctcaggtggcgttccaggtgtgtgtgcgccctggctcctacaccccgggacccccttccgctgcccttggagaacctcctgaccctcacttcagtccagccgaacttgagtgggtcactaaggagaagggggccacactcctctgtgccctgctggtacgggtggaatgaggggtgagacaccactactacaagcacagtcgggccgcgggcccatggactctgagtggcgactgcctccacctcattcccgtgactcgtggcatgcgcaggtgctggagcttggcagccgcgcaggagcatgtaggcaggctctcagatgtaggtggcaagtggcacagctccatgtccggaggcccagcactccgtctgatgggaggagtcgtgggagcccagctccaggccctggtacccctcttcatgcactgatttggggaacatgactcccttttactcccctaccccacatcacttaatttatttccgtttttgtttctggttactgtgaatcccagaggagtctctccctgtgcccacatgaagctgctttttccggggccaccgggcgggagtggggaagggtgggcgcacggaagatgggggcctctgtacagttgttactgactctgatttctaaggagccaataaacaccgtctcagagaaaaaaaaaaaaaaaaaaaaaaaaaaaaaa

SEQ ID NO: 30927 - DNA, 3261 bp, Homo Sapiens
gtgaacgaggcggctgtggcggtggctgaggcggctgggcctagggtgcagcgggcgcgtctgcggctggtgttggcgcatctctagatcctttcccggagttcagttatgggtgtgagaggtttgcaaggatttgtgggaagtacctgcccacatatatgtacagtagtaaatttcaaagaactggcagagcaccaccgaagcaagtatcctggatgtacccctaccattgtggttgatgccatgtgttgtctcagatattggtatactccagaatcttggatctgcggtggccagtggcgagaatacttttctgctttgcgagattttgttaaaacttttacggcagctgggatcaagttgatattcttctttgatggcatggtggagcaggataagagagatgaatgggtgaaacgaaggctcaagaacaacagggagatatccaggatttttcattacatcaagtcacacaaggagcagccaggcagaaatatgttcttcatcccctcagggctagctgtgtttacacgatttgctctaaagacactgggccaggaaactttgtgttctttgcaggaagcagattatgaggtagcttcctatggcctccagcataactgtcttgggattctgggggaagacactgattacctaatctatgacacttgtccctacttttcaattagcgagctctgcctagagagcctggacaccgtcatgctctgcagagagaagctctgtgagagtctgggcctctgtgtggccgaccttcctcttctggcctgcctccttggcaacgacataatcccagagggcatgtttgaaagctttaggtacaaatgcttatcgtcctacacctctgtaaaagagaactttgacaaaaaaggtaacatcatattagctgtgtcagaccatatatcgaaagttctttacttgtatcaaggtgagaaaaaattagaagagatattacctctgggaccaaacaaagctcttttttataaaggaatggcatcatatcttttaccaggacaaaaatctccatggtttttccaaaaacccaaaggtgtaataactttggacaaacaagtaatatccacgagttcagacgccgaatccagggaagaagttcccatgtgttcagatgctgaatccaggcaagaagttcccatgtgtacaggccctgaatccaggcgagaagttcccgtgtatacagattctgaacccaggcaagaagttcccatgtgttcagaccctgaacccaggcaagaagttcccacatgtacaggccctgaatccaggcgagaagttcccatgtgttcagaccctgaacccaggcaagaagttcccatgtgtacaggccctgaagccaggcaagaagttcccatgtatacagactctgaacccaggcaagaagttcccatgtatacagactctgaacccaggcaagaagttcccatgtatacaggctctgaacccaggcaagaagttcccatgtatacaggccctgaatccaggcaagaagttcccatgtatacaggccctgaatccaggcaagaagttttaatacggacagaccctgaatctaggcaagaaattatgtgtacaggccatgaatccaaacaggaagttcccatatgtacagatcctatatccaagcaagaagactccatgtgtacacacgctgaaatcaatcaaaaattacctgtagcaacagattttgaatttaagctagaagctctcatgtgtacaaaccctgaaattaaacaagaagaccccacaaatgtggggcctgaagtaaagcaacaagtaaccatggtttcagacactgaaatcttaaaggttgctagaacacatcacgtccaagcagaaagctacctggtgtacaacatcatgagcagtggagagattgaatgcagcaacaccctagaagatgagcttgaccaggccttacccagccaggccttcatttaccgtcccattcgacagcgggtctactcactcttactggaggactgtcaagatgtcaccagcacctgcctagctgtcaaggagtggtttgtgtatcctgggaacccactgaggcacccggacctcgtcaggccgctgcagatgaccattccagggggaacgcctagtttgaaaatattatggctgaaccaagagccagaaatacaggttcggcgcttggacacactcctagcctgtttcaatctttcctcctcaagagaagagctgcaggctgtcgaaagcccatttcaagctttgtgctgcctcttgatctacctctttgtccaggtggacacgctttgcctggaggatttgcatgcgtttattgcgcaggccttgtgcctccaaggaaaatccacctcgcagcttgtaaatctacagcctgattacatcaaccccagagccgtgcagctgggctcccttctcgtccgcggcctcaccactctggttttagtcaacagcgcatgtggcttcccctggaagacgagtgatttcatgccctggaatgtatttgacgggaagctttttcatcagaagtacttgcaatctgaaaagggttatgctgtggaggttcttttagaacaaaatagatctcggctcaccaaattccacaacctgaaggcagtcgtctgcaaggcctgcatgaaggagaacagacgcatcactggccgagcccactggggctcacaccacgcagggaggtggggaagacagggctccagctaccacaggacgggctctgggtatagccgttccagtcagggacagccgtggagagaccagggaccaggaagcagacagtatgagcatgaccagtggagaaggtactagtcaacctccagaaagagtatggagagaaaaagaggcacacctggacgcagagccctgccagcgccctcctctgctgttgcagctgcaaggagaccatgcctgtgggagccaggcctcgcttgcatgaagaaggaacgatgcctttttcaatggtgtctccctcccattgtgcagaagagcttttgttggcttctctcccgagcttgtgcctgattctgtggcccaaaacaatcattgttaacatcttcatgtgtttcattctgatctttcattcatatatatgatgcctagctaatttcattttaaaataaatgggaatctgttgtattctgattttttattagcaacactagattatgaggggttatctcctgttattaaaaagtcagaaaacactaaaaaaaaaaaaaaaaaaaaaaa

SEQ ID NO: 30928 - DNA, 4759 bp, Homo Sapiens; identical to SEQ ID NO: 24896

SEQ ID NO: 30929 - DNA, 2853 bp, Homo Sapiens
ctccaggcaacttggggcaagcgtctcagttctcgctctcccttcctcccagcggggtcgccgcagaccccagccctgggagcaccgctctgcagcgcggccggcgggtggagacggttggcccctaaactcgctcgtccagcccaaccgccccggcggcttctcccagccctcgaggctctcctgagcggcctggagaggcgtcgagcgcagcccagcgcccgcctgctcacccgccccggcccgggaagggaattttcggatcctgcgagcccggggcgcccccgcggcctagggcgggcagctcccggggcctggccgagccggtggcgcccgggaggccgcggggacagcacgcagcgcgcgcccttggatgccgtcccgcagcgacgccccggcccgccccgctcctcctcctgcctggctagcctgcctctcatttgggaagttttgtgggttttctttctcctcctccaaccttggcggaggccacgactcaggcgccacagctgggggctagaggccgcggaccatggtgcggggcagccaccgctgaagtcagcaaaaccgagcctggcctgaggcaggctgcgcgggaggccaaagccatggccattgccacgtcggtgtatgtggtgccgcccccagctcggccctgtccaacctcaggacctccagctggaccttgcccaccctctcctgacctcatctacaaaatccccagagctagtgggacccagctggctgctcccagagatgccttggaggtctacgatgtgccccccaccgccctccgggtgccctccagtggcccctatgactgccctgcctccttttcccaccctctgacccgggttgccccgcagccccctggagaggatgatgctccctatgatgtgcctctgaccccaaagccacctgcagagctggaaccagatctggagtgggaaggaggccgggagccggggccccccatctatgctgccccctccaacctgaaacgagcgtcagccttactcaatttgtatgaagcacccgaggaactgctggcagacggggagggcgggggcactgatgaggggatctacgatgtgcctctgctggggccagaggctcccccttctccagagccccctggagccttggcctcccatgaccaggacaccctggcccagcttctggccagaagccccccacccccacacaggccccggctcccctcagctgagagcctgtcccgccgccctctgcctgccctgcctgtccctgaggcccccagcccctccccagtgccctctcctgccccaggccggaagggcagcatccaggaccggcctctgcccccacccccaccccgcctgcctggttatggaggccccaaggtcgagggggatccagagggcagggagatggaggatgacccagcaggacaccacaatgagtacgagggcattccgatggccgaggagtatgactatgtccacctgaagggcatggacaaagctcagggatctaggcccccggatcaggcctgcacaggggatcctgaactgcccgagagggggatgccggcgccgcaggaggccctgtccccaggggagccactggttgtgtccaccggagatctgcagctcctgtacttctatgctgggcaatgccagagccactactcagccctgcaggcagccgtggcagccctgatgtccagtacccaggctaatcagcccccgcgccttttcgtgccccacagcaagagggtggtggtggctgctcatcgcctggtgtttgttggggacaccctgggccggctggcagcctctgcccctctgagagcacaggtcagggctgcaggtacagcactgggccaggcattgcgggccactgtgctggctgtcaagggagctgccctgggctacccatccagccctgccatccaagagatggtgcagtgtgtaacagaactggcagggcaggccctgcaattcactaccctgctcactagcctggctccatgaaggtcctttggcacagctctgctcctcccctgcctgccaaagcccccctttaggccttgggtggctggaaggctttgttaagggactaggagaaatgggggtatctttcccctttcctgccctttctgctcatctcaacctctcacagaggtgtcttctccccctaacctacagctttttgtacaagccattttgtgtaaattatttatatttaatattattccctgctttgtcaggagcaggtactaggctctggggcagtgaggaactagatccttctctcctcagcctagggtggaggtcactgcactaccacccacctctggaagactggctgtgaaaagtcaggtggcagaaacctggggccacatagagcctctctcttttcctgtttcttggctctagaagatcagcactgcactgttagctgagagtgcgggcaagacataaactgtccagagtttgaaggttctcggaaagaccggagggcttctccccacagaaggcggagagagctggggctcagacatgggtgtgcaccttaataaaccctgctgtctgcctccctgactctgcttcttgggagcatggtgagcagccctggtgctcagcagccatacctatgggacacacactacgaaaaggatgcctttagggtttgggggagattttactcctttcttcaacaactattcactggacaagttctctgctcccatgatgcgccaggcacagttctgcaagtatattgtgaatgtattgttctagtgggatacacaaataagtcagttaaaatacataaataaaaacataaacctgccataaaaaaaaaaaaaaa

SEQ ID NO: 30930 - DNA, 3129 bp, Homo Sapiens
ccttgtgcatttgggctgaagacaaagatgactgcaggagtgggcaggccggagtggggcgccctggcctgtccccaggaaggaggaggagtctgcagccctgtgggcttcaacatccatcaaggagtccagagcaggagccaggccaggcgggagggaaaggccctgggaggggctctctaatctcccagccccgactctgccccgtcactgccactgctcctcattactcgctggggctgctgtcgcctccccgaagggtggccttgtccagatagcggcaaacctccctgccgtggatgagtcaggagcattttcttaagaggaacatcactggaaaacaaaatgagcggggacacagaaaccaacagcagtggctgcatttgtggtacaggctcctcttccagagctcgctgatgcccacctcagacaggcctgaccacggcacggctggtgggatttgccagtcacctcaaccagccagttccaccctcagcttctctcagaagggagcaccacactcctcaagctcagtgaatgtatcccggcatgggtggggccagagcctgtgatatctcgaggtgggctcggcaggacaccggggtgtggaagggggaagcgagcacctgactcagacagcgcgggagctcgcaggagtcacgaggccacagcgacttcattgtctgactgggcctggacctataaacttcccacctcagccttgggccaagcctggaagataaaaatggagcaccccatggcgcccctcactcagattctcccctgggcttctcccacgcagccccagaagaggacacaccagccccagagttagccccagaggcccctgagcctcctgaagagccccgcctaggagtgctgaccgtgaccgacacaaccccagactccatgcgcctctcgtggagcgtggcccagggcccctttgattccttcgtggtccagtatgaggacacgaacgggcagccccaggccttgctcgtggacggcgaccagagcaagatcctcatctcaggcctggagcccagcaccccctacaggttcctcctctatggcctccatgaagggaagcgcctggggcccctctcagctgagggcaccacagggctggctcctgctggtcagacctcagaggagtcaaggccccgcctgtcccagctgtctgtgactgacgtgaccaccagttcactgaggctcaactgggaggccccaccgggggccttcgactccttcctgctccgctttggggttccatcaccaagcactctggagccgcatccgcgtccactgctgcagcgcgagctgatggtgccggggacacggcactcggccgtgctccgggacctgcgttccgggactctgtacagcctgacactgtatgggctgcgaggaccccacaaggccgacagcatccagggaaccgcccgcaccctcagcccagttctggagagcccccgtgacctccaattcagtgaaatcagggagacctcagccaaggtcaactggatgcccccaccatcccgggcggacagcttcaaagtctcctaccagctggcggacggaggggagcctcagagtgtgcaggtggatggccaggcccggacccagaaactccaggggctgatcccaggcgctcgctatgaggtgaccgtggtctcggtccgaggctttgaggagagtgagcctctcacaggcttcctcaccacggttcctgacggtcccacacagttgcgtgcactgaacttgaccgagggattcgccgtgctgcactggaagcccccccagaatcctgtggacacctatgacgtccaggtcacagcccctggggccccgcctctgcaggcggagaccccaggcagcgcggtggactaccccctgcatgaccttgtcctccacaccaactacaccgccacagtgcgtggcctgcggggccccaacctcacttccccagccagcatcaccttcaccacagggctagaggcccctcgggacttggaggccaaggaagtgaccccccgcaccgccctgctcacttggactgagcccccagtccggcccgcaggctacctgctcagcttccacacccctggtggacagaaccaggagatcctgctcccaggagggatcacatctcaccagctccttggcctctttccctccacctcctacaatgcacggctccaggccatgtggggccagagcctcctgccgcccgtgtccacctctttcaccacgggtgggctgcggatccccttccccagggactgcggggaggagatgcagaacggagccggtgcctccaggaccagcaccatcttcctcaacggcaaccgcgagcggcccctgaacgtgttttgcgacatggagactgatgggggcggctggctggtgttccagcgccgcatggatggacagacagacttctggagggactgggaggactatgcccatggttttgggaacatctctggagagttctggctgggcaatgaggccctgcacagcctgacacaggcaggtgactactccatgcgcgtggacctgcgggctggggacgaggctgtgttcgcccagtacgactccttccacgtagactcggctgcggagtactaccgcctccacttggagggctaccacggcaccgcaggggactccatgagctaccacagcggcagtgtcttctctgcccgtgatcgggaccccaacagcttgctcatctcctgcgctgtctcctaccgaggggcctggtggtacaggaactgccactacgccaacctcaacgggctctacgggagcacagtggaccatcagggagtgagctggtaccactggaagggcttcgagttctcggtgcccttcacggaaatgaagctgagaccaagaaactttcgctccccagcggggggaggctgagctgctgcccacctctctcgcaccccagtatgactgccgagcactgaggggtcgccccgagagaagagccagggtccttcaccacccagccgctggaggaagccttctctgccagcgatctcgcagcactgtgtttacaggggggaggggaggggttcgtacaggagcaataaaggagaaactgaggtacccggaaaa

SEQ ID NO: 30931 - DNA, 4889 bp, Homo Sapiens
cccgcctagcatggtgcggcggccgcgcgcgcggacatgggggagaagctggagctgagactgaagtcgcccgtgggggctgagcccgccgtctacccgtggccgctgccggtctacgataaacatcacgatgctgctcatgaaatcatcgagaccatccgatgggtctgtgaagaaatcccggatctcaagctcgctatggagaattacgttttaattgactatgacaccaaaagcttcgagagcatgcagaggctctgcgacaagtacaaccgtgccatcgacagcatccaccagctgtggaagggcaccacgcagcccatgaagctgaacacgcggccgtccactggactcctgcgccatatcctgcagcaggtctacaaccactcggtgaccgaccccgagaagctcaacaactacgagcccttctcccccgaggtgtacggggagacctccttcgacctggtggcccagatgattgatgagatcaagatgaccgacgacgacctgtttgtggacttggggagcggtgtgggccaggtcgtgctccaggttgctgctgccaccaactgcaaacatcactatggcgtcgagaaagcagacatcccggccaagtatgcggagaccatggaccgcgagttcaggaagtggatgaaatggtatggaaaaaagcatgcagaatacacattggagagaggcgatttcctctcagaagagtggagggagcgaatcgccaacacgagtgttatatttgtgaataattttgcctttggtcctgaggtggatcaccagctgaaggagcggtttgcaaacatgaaggaaggtggcagaatcgtgtcctcgaaaccctttgcacctctgaacttcagaataaacagtagaaacttgagtgacatcggcaccatcatgcgcgtggtggagctctcgcccctgaagggctcggtgtcgtggacggggaagccagtctcctactacctgcacactatcgaccgcaccatacttgaaaactatttttctagtctgaaaaacccaaaactcagggaggaacaggaggcagcccggcgccgccagcagcgcgagagcaagagcaacgcggccacgcccactaagggcccagagggcaaggtggccggccccgccgacgcccccatggactctggtgctgaggaagagaaggcgggagcagccaccgtgaagaagccgtctccctccaaagcccgcaagaagaagctaaacaagaaggggaggaagatggctggccgcaagcgcgggcgccccaagaagatgaacactgcgaaccccgagcggaagcccaagaagaaccaaactgcactggatgccctgcacgctcagaccgtgtctcagacggcggcctcctcaccccaggatgcctacagatcccctcacagcccgttctaccagctacctccgagcgtgcagcggcactcccccaacccgctgctggtggcgcccaccccgcccgcgctgcagaagcttctagagtccttcaagatccagtacctgcagttcctggcatacacaaagaccccccagtacaaggccagcctgcaggagctgctgggccaggagaaggagaagaacgcccagctcctgggtgcggctcagcagctcctcagccactgccaggcccagaaggaggagatcaggaggctgtttcagcaaaaattggatgagctgggtgtgaaggcgctgacctacaacgacctgattcaagcgcagaaggagatctccgcccataaccagcagctgcgggagcagtcggagcagctggagcaggacaaccgcgcgctccgcggccagagcttgcagctgctcaaggctcgctgcgaggagctgcagctggactgggccacgctgtcgctggagaagctgttgaaggagaagcaggccctgaagagccagatctcggagaagcagaggcactgcctggagctgcagatcagcattgtggagctagagaagagccagcggcagcaggagctcctgcagctcaagtcctgtgtgccgcctgacgacgccctgtccctgcacctgcgtgggaagggcgccctgggccgcgagctggagcctgacgccagccggctgcacctggagctggactgcaccaagttctcgctgcctcacttgagcagcatgagcccggagctctccatgaacggccaggctgctggctatgagctctgcggtgtgctgagccggccttcgtcgaagcagaacacgccccagtacctggcctcacccctggaccaggaggtggtgccctgtacccctagccacgtcggccggccgcgcctggagaagctgtctggcctagccgcacccgactacactaggctgtccccggccaagattgtgctgaggcggcacctgagccaggaccacacggtgcccggcaggccggctgccagtgagctgcattcgagagctgagcacaccaaggagaacggccttccctaccagagccccagcgtgcctggcagcatgaagctgagccctcaggacccgcggcccctgtcccctggggccttgcagcttgctggagagaagagcagtgagaagggcctgagagagcgcgcctacggcagcagcggggagctcatcaccagcctgcccatcagcatcccgctcagcaccgtgcagcccaacaagctcccggtcagcattcccctggccagcgtggtgctgcccagccgcgccgagagggcgaggagcacccccagtcccgtgctgcagccccgtgacccctcgtccacacttgaaaagcagattggtgctaatgcccacggtgctgggagcagaagccttgccctggcccccgcaggcttctcctacgctggctcggtggccatcagcggggccttggcgggcagcccggcctctctcacacctggagccgagccggccaccttggatgagtcctccagctctgggagcctttttgccaccgtggggtcccgcagctccacgccacagcaccccctgctgctggcacagccccggaactcgcttcctgcctctcccgcccaccagctctcctccagtccccggcttggtggggccgcccagggcccgttgcccgaggccagcaagggagacctgccctccgattccggcttctcagatcctgagagtgaagccaagaggaggattgtgttcaccatcaccactggtgcgggcagtgccaagcagtcgccctccagcaagcacagccccctgaccgccagcgcccgtggggactgtgtgccgagccacgggcaggacagtcgcaggcgcggccggcggaagcgagcatctgcggggacgcccagcttgagcgcaggcgtgtcccccaagcgccgagccctgccgtccgtcgctggccttttcacacagccttcggggtctcccctcaacctcaactccatggtcagtaacatcaaccagcccctggagattacagccatctcgtccccggagacctccctgaagagctcccctgtgccctaccaggaccacgaccagccccccgtgctcaagaaggagcggcctctgagccagaccaatggggcacactactccccactcacctcagacgaggagccaggctctgaggacgagcccagcagtgctcgaattgagagaaaaattgcaacaatctccttagaaagcaaatctcccccgaaaaccttggaaaatggtggtggcttggcgggaaggaagcccgcgcccgccggcgagccagtcaatagcagcaagtggaagtccaccttctcgcccatctccgacatcggcctggccaagtcggcggacagcccgctgcaggccagctccgccctcagccagaactccctgttcacgttccggcccgccctggaggagccctctgccgatgccaagctggccgctcaccccaggaaaggctttcccggctccctgtcgggggctgacggactcagcccgggcaccaaccctgccaacggctgcaccttcggcgggggcctggccgcggacctgagtttacacagcttcagtgatggtgcttctcttccccacaagggccccgaggcggccggcctgagctccccgctgagcttcccctcgcagcgcggcaaggagggctcggacgccaaccctttcctgagcaagaggcagctggacggcctggctgggctgaagggcgagggcagccgcggcaaggaggcaggggagggcggcctaccgctgtgcgggcccacggacaagaccccactgctgagcggcaaggccgccaaggcccgggaccgcgaggtcgacctcaagaatggccacaacctcttcatctctgcggcggccgtgcctcccggaagcctcctcagcggccccggcctggccccggcggcgtcctccgcaggcggcgcggcgtcctccgcccagacgcaccggtccttcctgggccccttcccgccgggaccgcagttcgcgctcggccccatgtccctgcaggccaacctcggctccgtggccggctcctccgtgctgcagtcgctgttcagctctgtgccggccgccgcaggcctggtgcacgtgtcgtccgctgccaccagactgaccaactcgcacgccatgggcagcttttccggggtggcaggcggcacagttggaggtaactaggatttctacctcaaccgcgagacctatgcaaggacggtgtggaccaactcgcgcccgcggcatggtgcccgccggcctgccgggctcccacccctggacggcagaggcaaggacggacgggagctccactgtgaatcggcggcacgcgccgcaggaggctgggactggtccagtttgtactgtcgatagttttagataaagtatttatcattttttaaaaagtaaaaaaaaaaaaaaaa

SEQ ID NO: 30932 - DNA, 2649 bp, Homo Sapiens
cttttcttttttttttgacagggtctcactctgttgcccaagctggggtgcagtggcacgatcttggctcactgtagccttgacatcctgggctcaagggatcctcccatctcagcctcccaagtagctgcgactatgggtgtgacaccacgctgggctagtttttcaattttttgtagagatggagtctccctatgttgctcaggccggttgcgaactcctgggctcaagtgattctcctgcctcagcctcccaaagtgctgggattacagatgatagccacctcacccggcccacccctaccttctgaaagaggcattcttattcttattcccattttgcagatcaggaaacagagctcagtgcagcccactaaattgctcagggccctacagctaacaagcggcagaggcaggatctgcactcaggagctgcttggagatgctgctgtggccactgctgctgctgctgctgctgctgccaacattggccctgctcaggcagcagcggtcccaggatgccaggctgtcctggcttgctggcctccagcaccgagtggcatggggggccctggtctgggcagccacctggcagcgccggaggctggagcagagcacgctccatgtgcaccagagccagcagcaggccctgaggtggtgtctacagggagcccagcgcccccactgttccctcagaaggagcacagacataagcaccttccggaatcatctccctctgaccaaggccagccagacccagcaggaagacagtggagagcagccactgcccccgacctcaaaccaggaccttggggaggcctctctgcaggccaccttgctgggtctggcagccctaaacaaggcctacccagaagtgctggctcagggacgcactgcccgtgtgacgctcacatccccttggccccgacccctgccttggcctgggaataccctgggccaggtgggcacccctggaaccaaggaccctagggccctgctgctggacgcactgaggtccccagggctgagggcactggaggctgggacggctgtcgaacttctggatgttttcttgggcctggagactgatggtgaagagctagctggggcgatagctgccgggaaccctggagcgcctctccgtgaacgggcagctgagctccgggaggccctagagcaggggccacggggactggcccttcggctctggccaaagctgcaggtggtggtgactctggatgcaggaggccaggccgaggctgtggctgccctcggggccttgtggtgccaaggactagccttcttctctcctgcttatgctgcctcgggaggggtgctgggcctaaacctacagccagagcagccccatgggctctaccttctgccccctggggccccctttatcgagctgctcccagtcaaggaaggcacccaggaggaagctgcctccaccctccttttggccgaggcccagcagggcaaggagtatgagctggtgctgacggaccgcgccagcctcaccaggtgccgcctgggtgatgtggtgcgagtggttggtgcctacaatcagtgtccagtcgtcaggttcatctgcaggctggaccagaccctgagtgtgcgaggggaagatattggtgaagacctgttctctgaggccctgggccgggcagtggggcagtgggcgggggccaagctgctggaccatggctgtgtggagagcagcattctggattcctctgcgggctctgctccccactacgaggtgtttgtggcgctgagggggctgaggaatctgtcagaggaaaatcgagacaagctggaccactgccttcaggaagcctctccccgctacaagtccctgcggttctggggcagcgtgggccctgccagagtccacctggtggggcagggagccttccgagcactccgggcagccctcgctgcctgcccctcctcccccttcccccctgcgatgccccgggtccttcggcacaggcacctggcccagtgtctgcaggagagggtggtgtcctgagtcaagtcctgccccaccgcccagctccccccagaggccacctcgcccctccctctgggacctctccggatggggagtccttggccagggtctctgactctgtgtcacctgacatttgcccatgagagccgctgggccttagagaggccttggcccagctgaccggttctgaagtatgggcctccggggttagcagatgccagcagtgcctgcccgtgtccccatgtcccggcatgaaggacactgctagagagttaccatgcacaccgatggtttcctgtatcacagcccaaagaggttctctggtggccacagctgtgtgctcagtcagtgcactgggcaagctagaagtgttggggggttaatgtccccaggagcagcaaccctgagtcaataaggagcaggacctcagcttcattgtccttgagcaggacaattctgaagtgtattctacataaactctcagaggatgcccagcaggatggagtcccagttgcccgcagcagtaacccactcattcatgtacttcctgcgggggctctcccttccctctcttccccactcccccgccttgggcttcctgggatggctcccaaataaacctcttgcacccag

SEQ ID NO: 30933 - DNA, 3377 bp, Homo Sapiens
aaagactgaccgactgactctgacaggatccggggctgagggaaggaggcggcggccatggagttgggcgagctgctctacaacaagtctgagtacatcgagacggcatctgggaacaaagtcagtcgccagtcagtgttgtgtggaagccagaacatcgttctcaatggcaagaccattgtgatgaatgactgtattatccgaggggatctggcaaatgtaagagttggacgtcattgtgttgtgaaaagtcgtagtgtcataaggccaccattcaagaagttcagcaaaggtgttgcattctttcctttacatattggagaccatgtctttattgaggaagattgtgtggtcaacgcagcacagattggttcctatgttcatgttgggaagaactgtgtgattgggcgccgatgtgtgttgaaagactgctgcaaaattcttgacaacacagtattacctccagaaactgtggttccaccattcactgtcttctcaggctgcccaggactcttctcaggggagctcccggagtgcactcaggagctgatgattgacgtcaccaagagctactaccagaagtttttgcccctgacgcaagtctagcatctctgcctcatgtcttgaatctgcttgagctctaagatgaacctggggacaaagtgagccagtcagcacctacaaagagcttttgtgtctttgacatctaccaccctcctccttttaaaaaatttctttagaatttctcaatcttcaaggctctaagtgcttaagaattcactaacagacagaccatctggaggagctgtcttcaaatgctgtgcttacaccttatctatgaacagtcactttgtaccattatctgtggaacacagaatcatctgttcccaacactccagccccttggtcctgtggatggctggatcccgcctgaaacggacctgcagagcagcagcacccttccggtgtggaggctatgtagctggtgcgctgctcacggccattcactgcccatgctgagcgcctctcacacaggtaatgcccagcttttctgctgctaacacatttggccagttgttgcagttgctcatcatcttgggaaaggtgtttgtgacttttcagagcccagattcctgttgtctattaaaacttgaagggaggggtgaatagtgtttctctcttcttcccaaaatgaccttagctgtcctaggatagttagtaaaagactttttagcattttgacctagggcctttggctttcactaaaagtggggacctcagtatcccagattgtaattttgccaagtgttagatttgagtctctcatgtggatgcattagtcaggtggttactccttgcttcaaggtacttaccttatttcattgaagacaccgcatttgtgaactcttgcttcctggcctagaaccattcagcctaccctgtatttgccataaactccacaattcacaccaaaatgtctgtacttagagctaattcgcatatatacaggaagggctcttagaatcagtttgtgggcacagagcctcaggagtaaatgaagttactagggctgttcttaccatctccttctggccaaatagcacaacatttcctcgttctgctctgacctcttagcttagaaggaagattcagaagtgaggggctaagaaggttgtccttgcctaatgctctgatctgtaagtgaatagggcagaacagttcagccttgaggttagaatttagcaggagctatcctgacttaatatccagttgtggggtttgcaaaacaaaacagctgtatgtaatcattgccactagttccatctagaactcctttctagtttgttatttttaaaatgtttatacataaaaccaccaaaatacatagcttcgacaagatggaagtttatttctctctcccataacagtgcagtgatagtcagctggtccaggccaggcaaggggctggtccatgatgtcatcaggcacccaggttcctactgtcttgccatgtggccacagttagcaacaaaggaggctgtaaatttagtttctacttgggcagccaaaactctgaggaaggagattctgctagtaaaaaggagtgggggaagaatggccattgggagacaacaagcagactcaaccaggcctctttgttggcttcctttcctcctgctgcacatgagccttcgccttgcatttggagccatgacagctgatagctccagacctgcatcctcctagcttgggggctctgaatgaaaggtttcttcccttccagttcgaatttggaaactcccaaagttctcaatggtttgttgtgagttccatgtcctcttggatcagtcactgtggccatgcatgtttggccacatgattaatccagtctgggtcatgaccttttcttcatccaaaacaaggtgatgggaagacaaaaacaatagctactacaaacaataggagtttataattatgtgctgatgtattcgaagatgtgttgacagtcgtgagtgtgtatcctaggaaaggcgagctggactctgtctccatggtggctctcaccccagggacctaggaacagcctgtcaccacacaattacttttataaccctggagatgaaaatctccttgtcctcaaaatacttccagaagaacaaccagatgggaaggaccttggttgggactctttccagttcacttggggcagagggaatttaatggctcacgtagctgaaaaggatgggctagattgggcttcaggctgcatcccaggactccaaacagggatctgtctctttggctctcagctctgctttcatttgagttggctttattcttgggcttcacagtgtggccccacagcaccagttattgataaaaagagctcccctttgctgacagaactgctggatttggttctcattggtccagacgaggaaggtatccagcctcaagtcatcattgtggccaggaagatggaatacaccaaatggacaggcctggcatgtacccacagagactgagagttggtgctggtggttgtggtggcagatgatattacctgaagaagggacgaatgggtgctgggcaggacaaagcatcagctgtccagttcaggcctctcctctttccctggtgtcttcattttcctccgtctccctgctgtcccttaccctctgcccaatctctcattactcctggtcttgggagttgccttctgaggatactccactgggggtacctgagcctggattagagggcagggggaggatattgcctagccaaagtgggtgttcaataaagaaccatttggagatggtaaaaaaaaaaaaaaaaaaaaaaaaaaaaaaaaaaaaaaaaaaaaaaaaaaaaaa

SEQ ID NO: 30934 - DNA, 4488 bp, Homo Sapiens
aaaaggaaaacgaggcaccgagaagttaaggaacttgctcaaggtcacagagtttgaactcaggctacagatgctgcagcaactggagaaagtcctcatcgccccatatcacccaccaccgacccccagcaggacgtgacccccgccaggacggaggccggcagctggggggctggagcatgggacccagaacacggactcaggcttgcgcagcctcctggcttctaggcgggagcctagaaaggcgccagcccctttcgcgtgctgctgagactccaggggtggggttcactctcaggggcgcacaaaggcatgaaaaccttggcttcagcctctgagatgcggaactgaccgacctattgtcttgggacccaccagtgcgcttgggtgcaccagcccccttaacgttggtgccggctccctcccggctcctccccatcccagagggtcccctcgccccaggccctgagcctgcgtcctggggtcctgggccgcacgtgcctctggcagctcgaagaagctgtcggggcttgcaggagagcgtgcaaactgaaaccaaaacaggccgactcgaggaacatccgggtgggaccgcagactcaccggagcgcagcgcctgggccagggcctgggaccctgctccgccccgcgctcccctgcaccccttccccacgctgctcccctcttcctaagcggccccccctctcccgggcagcagaagaaggggtgggacccgggcgggctccgggagggggccctggaggaatggatggtggcggaagggcggagcaggggcggggcccgcggagactccacggggcgccccgggcgtgaggcacccactctgggagcacagagagctcaggtagcctgcctagatggcggcgcgcaccctgggccgcggcgtcgggaggctgctgggcagcctgcgagggctctcggggcagcccgcgcggccgccgtgcggggtgagcgcgccgcgcagggcggcctcgggaccctcgggcagcgctcccgcagttgcagcagcagcagcacagccaggctcgtatcccgcgctgagtgcacaggcagcccgggagccggccgccttctgggggcctctggcgcgggacactctcgtgtgggacaccccctaccacaccgtctgggactgcgacttcagcactggcaagatcggctggttcctgggaggccagttaaatgtctctgtcaactgcttggaccagcatgttcggaagtcccccgagagcgttgctttgatctgggagcgcgatgagcctggaacggaagtgaggatcacctacagggaactactggagaccacgtgccgcctggccaacacgctgaagaggcatggagtccaccgtggggaccgtgttgccatctacatgcccgtgtccccattggctgtggcagcaatgctggcctgtgccaggatcggagctgtccacacagtcatctttgctggcttcagtgcagagtccttggctgggaggatcaatgatgccaagtgcaaggtggttatcaccttcaaccaaggactccggggtgggcgcgtggtggagctgaagaaaatagtggatgaggctgtgaagcactgccccaccgtgcagcatgtcctggtggctcacaggacagacaacaaggtccacatgggggatctggacgtcccgctggagcaggaaatggccaaggaggaccctgtttgcgccccagagagcatgggcagtgaggacatgctcttcatgctgtacacctcagggagcaccggaatgcccaagggcatcgtccatacccaggcaggctacctgctctatgccgccctgactcacaagcttgtgtttgaccaccagccaggtgacatctttggctgtgtggccgacatcggttggattacaggacacagctacgtggtgtatgggcctctctgcaatggtgccaccagcgtcctttttgagagcaccccagtttatcccaatgctggtcggtactgggagacagtagagaggttgaagatcaatcagttctatggcgccccaacggctgtccggctgttgctgaaatacggtgatgcctgggtgaagaagtatgatcgctcctccctgcggaccctggggtcagtgggagagcccatcaactgtgaggcctgggagtggcttcacagggtggtgggggacagcaggtgcacgctggtggacacctggtggcagacagaaacaggtggcatctgcatcgcaccacggccctcggaagaaggggcggaaatcctccctgccatggcgatgaggcccttctttggcatcgtccccgtcctcatggatgagaagggcagcgtcgtggagggcagcaacgtctccggggccctgtgcatctcccaggcctggccgggcatggccaggaccatctatggcgaccaccagcgatttgtggacgcctacttcaaggcctacccaggctattacttcactggagacggggcttaccgaactgagggcggctattaccagatcacagggcggatggatgatgtcatcaacatcagtggccaccggctggggaccgcagagattgaggacgccatcgccgaccaccctgcagtaccagaaagtgctgtcattggctacccccacgacatcaaaggagaagctgcctttgccttcattgtggtgaaagatagtgcgggtgactcagatgtggtggtgcaggagctcaagtccatggtggccaccaagatcgccaaatatgctgtgcctgatgagatcctggtggtgaaacgtcttccaaaaaccaggtctgggaaggtcatgcggcggctcctgaggaagatcatcactagtgaggcccaggagctgggagacactaccaccttggaggaccccagcatcatcgcagagatcctgagtgtctaccagaagtgcaaggacaagcaggctgctgctaagtgagctggcaccttgtggggctcttgggatgggcgggcacccaagccctggcttgtccttcccagaaggtacccctgaggttggcgtcttcctacgtcccagaagcagcccccaccccacacatgacccacaccgccctcacgtgaagctgggctgagagccctttctcccatccattggaggtcccaggagtgtcacccatggagaggctatgcgacatggctagggctggttctgccatctgagtttggtttcctggaatgaaaaggcattgccatctccattcctctgccctcttgagccagcacaggaaggtgaggccctgggatagcgcgcctgctcagataacacagagctagttagctagtagcaaccgtgttttctccagatctgtctagatacaaaggtcagaaatcttatttttatacttttatattgtggaagaacagcatgcaacactcacatgtagtgtgtggatttacttgaacatgttctttttaacatgtagttatgaaaatctccttttttgcctctactggtgaggaaacatgaggatcagaggccacatttttaattattgttagtgtatttggaagtctgaattggagatgtttgtacctctgtctaaacagttcccttgagaacttccaagcctccggcatcttttcctggtgagtgtttctcctgtgcttggttgtgtataatggagctaactcctaagcggtggggtgaatgtggccgccttagttctgaagctactccagttatgttctgtttcttcaagctgtgatccagaaagatttttgtgcccccagatgcctcttgataggagaggcaacatactccaaatagttgggttcttcagggaagctattagaaactcaggtgacttgttagagcactaacttggtcagagccaaatcctggcaaacgctgcctgaccttcactctgtggttggggcggtgagaaccactgaggtccaatgatgagacttggaggtctggatccagtctctctttgttttaatgtgacttaggtgctgtcaacattagcaagataatggaaatcacgacgccagtgggtgcttacctccctgctaggcatgcaggggctggcggttggcaggggaaggaggcccagtgagccgggtcccttaggggagggagagtttgtcctctttgccccacagtctacccttcagggccttgtggcagtgccagtgttcggggggtgtctgggccactgagtacccactcggtcgtggttgtgctggcctcttgggtgagtgaacctgtgaagcccaggaggtggtgttggctgcagggtacacaaatactgagtggtggtcttttgttacaggcttagcaacaaagctgtgccctgggcatggggggctgtagtgtagctacagttgtgcgtttgtgaaatggcttagctttccatgttgctgagaggaacctggacatggtcccgggcatctgaatgatctgtaggggagggagttcaaataaagctttattttgttcaaaaaaaaaaaaaaaa

SEQ ID NO: 30935 - DNA, 4617 bp, Homo Sapiens
agatttaagtaagtcttccccaacaccgaatgggattccatcttcagacccagccagcgatgccatggaccccttccatgcttgcagtattcttaagcaactcaaaacaatgtacgatgaaggacagttgacagacattgtagtggaagtggatcacgggaaaacattttcctgtcatagaaacgttcttgctgcaatcagcccttacttcagatccatgttcactagcggccttacagaaagtactcaaaaagaagttcgaatagttggtgttgaagctgaatcgatggatttagtgttgaactatgcctacacttccagagttattcttacagaggccaatgttcaagccttgttcactgcagctagcatcttccagattccttccatccaagaccaatgtgctaagtatatgatcagtcatttggacccacagaattctattggggtctttatctttgctgatcattatggtcatcaggaactcggagatcgatcaaaagaatacattcgtaaaaagtttctgtgtgtcaccaaagaacaagagtttctccagttgacaaaagaccaactgataagtatactagacagtgacgatttaaatgtagaccgagaagagcatgtttatgaaagcattataaggtggtttgagcatgaacagaatgaaagagaagtgcaccttccagaaatttttgctaaatgcatacgttttcctctgatggaagatacctttatagagaaaattccacctcagtttgcacaggctatagccaaaagctgtgtagaaaagggaccatccaacaccaatggctgtacacagaggcttggaatgactgcttctgaaatgatcatatgttttgatgctgcccacaaacactcaggaaagaagcaaacagtgccttgtctagatatagtcacaggaagggtgtttaaactatgcaaaccaccaaatgacctgagagaagttgggattcttgtatcaccagataatgacatttacattgcaggagggtacaggccaagcagcagtgaggtctccatcgaccataaggcagaaaatgatttctggatgtatgatcattccaccaatagatggctatccaaaccatccttgcttcgagccagaataggctgcaaacttgtctattgctgtggtaaaatgtatgcaatcggaggtcgtgtttatgaaggtgatgggagaaactcactaaaatctgttgagtgctacgacagtagagagaattgttggacgactgtttgcgcgatgccagttgcaatggaatttcataatgctgtggagtacaaagagaagatctatgttttacagggagaattttttctcttctatgagcctcaaaaagactactggggtttcttaacccccatgactgtgcctagaatccagggcttagcagctgtatacaaggactctatctactacatagctggaacctgtggaaatcatcaacgtatgtttactgtagaagcctatgatattgagctaaataaatggactcgtaagaaagactttccatgtgatcagtccataaatccataccttaaactggtacttttccagaacaaactccatttatttgttcgagctactcaagtgactgttgaagaacacgtcttcagaaccagcagaaaaaattccctttaccaatatgatgacattgctgaccagtggatgaaagtgtatgagaccccagatcggctctgggaccttggccggcattttgaatgtgctgttgctaaactgtatcctcagtgtcttcagaaagtactctaaatgagtagcaggccttagtgcatcactggcatctcattcttaggaaacttgtctttgatacaaaagagtgctgacagtatttcagaaagctgagagagttttatacatggaaaatgggtatgcttaaagattgcagggtagggagggattttccttcatccttgtgacatttcatttcagtaaggaaaagataacaaagtgcaattatcagcatttttttttcctggcataaaattaatcatttcattttataattttgtgataaatagtaactgaggtaccagatgaatcaggacaactatgcactcttataagagcatttagggtattattgggtaaagacgtctaaacttgtttgatgtgacttttaattttaaatacgggtaacaatctgaggcaatatcactaggactttagctgtgacctctctaacacagagaagcactaacttagatcctcattcttaatatttatatgtatctatttttgtgtactgttttcaagtgtactgagatttaaatgtgttctattattagagtagatcgaagaaaaaattagtctcagaaagagcttttagtctgattgtttccatttcccatgtaattttaagttaagctaaagttttaaagtggcagttttctgtcgatgactttttcaagtgctaacactgtctcttttgtgaaaatctggaaaagtgctcatattcacaggtggctggtgctagtctaacttaattcatgtgtataactagatggatttaaatggtctgagcctatgcctatctttcaaattggtgtggatttcatggccatagtactttacctgttgaactcttgtgatttcacaagattctctacttatgtgataggagggtatggccagttattcatctaactggactcaatcttagaatagtaggaacattatacccagtttgcactaacatgggccatttgtagcccaaccttctcttccatctacctgtccattcattattggtacaaggaaaggtaacttatttctcttctgcacagagcataatgtgaagttttatacctacttttaaaattctgctttccagaaacaaaattcctgcagtggtctaatttaatgtctttaagtttcatattacaattaaaacctcattttttttttccatttttgcacttaacagtgatgaatacttttacgttggaatcctccttctagctgaaggtgattgaaaaggaaaagagtgagtgaacagaaccatagctttctaggtactaaagcattttttgcatttaactgatgaaatttctaacaatcatcagttaggaatattaacatgaaggataaaccaacttatttgtatacctaaggcaggcatttggatcagtaacatgttttactaagcctagagtaattcgtaaagggtataagcataggacagattttgccctcaatcacaatatttgtattcacttgaaagcaaactggcatggttcgtattttaaaaatcttgcacaaattgtaatgtgatactgtgaaacaaattgaaaacattgcctctttgcatcacatacctcgtttttcagaaactttccaaactgctttacatagacctctacaagtagggaatgttttctgaagcagaagttaaaatggacagcatttctagaattaacattttaaaatctagtcttagctagatatgtggtttcttcttattggtgttgatagtatgtctgtaatctctgtataaactttgtcaacatttttacctccccagttttatcttctgttttgtttttgtttttatcatcatgatgttttggagttattactgtgtattttagaaatcattctttacagttttgcattgctgaggagagagaaaaaacaatttttttgcaagagatgttcatgtaatttatttttgaaagctttgttgaataagatttcctgccgctttttgacaatcttgtgtatttagaaaaatgtattacttgaaaacatgacatagaacattgagttagcaatttacatgggctgtatgttatataagagaatgacatactgtggctaattcaacagtagatttattcttttagcctgcacaacagttgatcttttggctatgacaatttgtatggagggtacgatctaagttaagtgtgtcaaaagcaaggcttaggatttgttatgggagtagaatatatattgaattttgtatgaagaactatttgtttaaattatatagctgggatattttgccactgttaaaatggattcagaagaggtcctagaaaagtaagattagtgacatgtgtgggtttatatttagatatttaaggtgcattttcatagtgtggtaagaccttaagtaaaaggcacaatgggtactacagaattaaaatgtaggtctaacataatgccagttccactttaactttgtttttgcatttgaagaatgtatgtagcactttcctatatatttgtcacacattgaaaactggactgggtataactatgttataggaaagtagaaattgtattctttattttccatctttgttttctgttctacaaagttgatgcttaagcatcaagctgattttattggtcatgagaacaaatggatgtgatcatgaaggaatcagattccctatgtaaagcagtttaaaatggaattcaatgttcagtgctcaggtatgtagtaagtactgtagtcctgtgggggcaaatgtgtagatatttttaaacattttgccataattgcacaattttttgcatttttacctgatgtcattgtttcttataataaaaccttttctgattgaaaa

SEQ ID NO: 30936 - DNA, 2034 bp, Homo Sapiens
cacaaagagcggggcggagaggcagctgcggggggagccggcggccgctgctgccgcccagggctctggggccccgccggccaggcccgccgtccgcggccagtgcccttcctcctcctcctcctctgccgccgcctcctcagtcgccgccgcctcctcagtcgccgccgcccgcgccgcccgcgccctccgcgcgcctctgagcccgcgccgggccgcgccggccccttcccatgcgggcggcgcgggccctgggaggggcgcccggagccagccgcgcagcatgcactggggggttggctttgcttcgtccaggccgtgcgtggtggatctgagctggaaccagagcatctccttcttcggctggtgggccgggtccgaggagcccttctccttttatggggacatcatcgctttccctttgcaggattacggtgggatcatggcagggctgggctccgatccctggtggaagaaaaccctttacttgaccgggggagctttgctggccgcagctgcgtatctgctccacgaactcctggtcattaggaaacagcaagagattgactctaaagatgctattattttgcatcagtttgcaagacctaacaatggtgttccaagtttatctcctttctgtttaaagatggaaacttatttaaggatggctgacttaccgtatcagaactattttggtggaaaactctctgctcaagggaaaatgccttggattgaatataatcatgaaaaagtttctggcacagaattcataattgactttctggaagagaagcttggagtgaatttaaacaaaaaccttggccctcatgaaagagccatctccagagcggtgaccaagatggtggaggagcacttctactggacgttagcttattgccagtgggtggacaatctcaatgagacccggaagatgctctctcttagtggtggtggtcccttcagcaacctgctgaggtgggttgtgtgccacataacgaaaggaattgtgaaacgcgagatgcacggccacggcattggccgcttctccgaggaagagatttacatgctgatggagaaggacatgcggtctttagcagggcttttgggtgataagaagtacatcatggggcccaagctttccactcttgacgccactgtctttggacacttggcacaggcaatgtggaccttaccagggacaagacccgaacggctgatcaaaggtgagctgatcaaccttgccatgtactgtgagaggataaggaggaaattttggccagagtggcaccacgatgatgacaataccatctatgagtctgaggagagcagcgaaggcagcaaaacccacaccccgctgctggattttagcttttactcaaggacagagacctttgaagatgagggagcagaaaacagtttttccagaaccccagacacagattttactggacactcactctttgattcggatgtggacatggatgactatacagaccacgaacagtgcaagtgacgtccagcctcactgaccctcttccttgggacctgccactccctgggtcggtccattttcccaggtagcaatccatccgagctgggaggagatcttcgtgcttggcagagttttcacatgctaactggactatagcagccttatttctttttttgtacaaacaaaacacagaaccattcagatgactccattgaaaacaaacaggcaaaaaataatgtcagcatggttcctgaaatccatttttgttttcattagaaaactattaataatattgtgtggtagagcaggtgtaagagctggttgtcagctgatagtttttatgatgatcctcttcaaccctgaggtcttaattgtgagatggattcttgaacctccttcctccaccaggatttgaagtaatgagagatatcatcagaaaaatgttttacggtggctgcttgtactttatgtgtgtatattgtatgttgagacataagtcaaataaaatccacagatattaaacgaaaaaaaaaaaaaaaaaa

SEQ ID NO: 30937 - DNA, 1540 bp, Homo Sapiens
cggccgcgagtcctgcgtgatcgcgagcatgtgtgcgtgcgcgtgtttatctgaggcgcgtgcggcggccaccccagcctagtcctcttcttggtgccactggctaactaggttgagaaaccggcgccacaggcggcacacctggcccggagctggcccgctcctccccgccgagccggcgccccaacaacgcgccctctcccagtcctcacaaaggggcctagtccggcccccggctctggccgtgagggagcgctgtgggggcgcgctgccttctgcctggaagtgttgggcaggtggtgggagagcgtcaggcttgaacaacatgattttaaagcacgtgtctgtctgtcgttttttacttttagggttttggccaaattgggcgagggcacaaaataaccacttaccccttctcaccgaggaagagcgggagaaagggtatggcacagtcacaagggtgggtgaaaagatacatcaaggccttttgtaaaggcttctttgtggcggtgcctgtggcagtgactttcttggatcgggtcgcctgtgtggcaagagtagaaggagcatcgatgcagccttctttgaatcctggggggagccagtcatctgatgtggtgcttttgaaccactggaaagtgaggaattttgaagtacaccgtggtgacattgtatcattggtgtctcctaaaaacccagaacagaagatcattaagagagtgattgctcttgaaggagatattgtcagaaccataggacacaaaaaccggtatgtcaaagtcccccgtggtcacatctgggttgaaggtgatcatcatggacacagttttgacagtaattcttttgggccggtttccctaggacttctgcatgcccatgccacacatatcctgtggcccccagagcgctggcagaaattggaatctgttcttcctccagagcgcttaccagtacagagagaagaggaatgactgcatgaatctacctgagttgctggcattgggaggccagttactggaaaggaatggaaaaaagaagcctccaaaagggaaaaacttctgacaatatgatgctgtgcgagaaatatttacagcacattaaaacgatctgtattattaaataaataattttcaaatgttaaacagtattaaatggcacctgattttgtgttaaattttagttccctgttgtttaatgcccccaaaatatgcagacctttgggaatataaaaatattgcacccacatgtcttaatggggctgaatttcagattatttgttacatatacttattatattgattgttgggttttgattttggtgcttgctgctgaaataaattgaaaattaatattcaataaaaatgatgtatttgtcacttgctgttaaggtagaacaagaaggaacacatattatacacataatgatgggaattacattgtgatttgtactatctacaaaggagtaactgccagttaggaagaacagtaaacagtgatgttaaaataaaacaatgatttgtaaaaaaaaaaaaaaaaaaaa

SEQ ID NO: 30938 - DNA, 4449 bp, Homo Sapiens
ctcctccgctccctgcgctcccgccacctcggcaactccgcgcccgcctcccgcctccgtcggaagcctccgccgcagtaaggctcccggtctcgctgctgtctctttaaatggtggggctacgagccgcccctgcagctgctccctgggtggccccgcgcgccgcttttgaggggcgaaccaagatggcggcggttttggctgtgtgaggaagacggaagagacggcggcggagggaaaccgacttccactagtccgggtcgcttgggcggccgggggccctcagagtctcccgggcagtggtagcagttgcagcaggatcaggcgcctgtcggcttctgacgtttaaaacagggggagcggaagggagccactggccgcggtggcagggccaggtataaggaaggaaaatatggcggcggcggcggcggcctgaggaggcggcggcggcgcgggaagctgcttcgcggagatcatggcggaggcgggagcagggcagtgacgggagccccgagttcctagcgctgcggggcgggaggctacgaagcgctgcgcggccccctcggggctgccgggcgccgggctcgccaggcctggacaatagcgccggggagccggaggcgaggaaaggcggcggcccagagctcggtccctggagcgggccatgcaggcggcggcgcggccccgcggcgcccagcggcggcagtgaggccggggagccctccgctcgcgggcgccctcacgcctcgcccctcgcctctccagggcccctttcctgggcgtctactggcggggcccccgccccggttcccgggcggcacgatgaccgacacccggcggcgggtgaaggtgtacacgctcaacgaggaccggcagtgggacgaccggggcaccgggcatgtgtcgtctggctacgtggagcggctgaagggcatgtccctgcttgtcagggctgagagcgacggttctctacttttagagtcgaaaataaatcctaacactgcataccagaaacaacaggacactctgattgtgtggtctgaagcagaaaattatgacttggcccttagctttcaagaaaaagctggatgtgatgaaatttgggagaaaatatgtcaggttcaaggaaaggacccttccgtggacatcactcaggaccttgtggatgaatctgaagaggagcgttttgatgatatgtcatcgccaggcttagaattgccatcttgtgaattaagtcgccttgaagaaattgcagaacttgtggcatcatctttaccttcacctcttcgtcgtgaaaaacttgcactggcactagaaaatgagggttatattaaaaagctcctggagctttttcatgtgtgtgaagatttggaaaatattgaaggactgcaccacttgtatgaaattatcaaaggcatctttctcttgaatcgaactgctctttttgaagttatgttctctgaagaatgtataatggacgtcattggatgtttagaatatgatcctgctttatcacaaccacgaaaacacagggaatttctaacaaaaacagccaagtttaaagaagtgattcccatatcagatcctgagctgaaacaaaaaattcatcagacatacagagttcagtatatacaagatatggttctaccaactccttcggtctttgaagaaaacatgttatcaacacttcactcttttatctttttcaataaggtagagattgttggcatgttgcaggaagatgaaaaatttctgacagatttgtttgcacaactaacagatgaagcaacagatgaggaaaaaagacaggaattggttaactttttaaaagaattttgtgcgttttcccaaacgctacagcctcaaaacagagatgcttttttcaagactttgtcaaacatgggcatattaccagctttagaagtcatccttggcatggatgatacacaggtgcgaagtgctgctactgatatattctcatacttggttgaatataatccatccatggtacgagagtttgtcatgcaggaggcacaacagaatgatgatgatattttgctcatcaacctcattatagaacatatgatttgtgatacagatcctgaacttggaggagcagtccagcttatgggcctgctacgaactttagttgacccagagaacatgctagccactgccaataaaacagaaaagactgaatttctgggtttcttctacaagcactgtatgcatgttctcactgctcctttactagcaaatacaacagaagacaaacctagtaaagatgattttcagactgcccaactattggcacttgtattggaattgttaacattttgtgtggagcaccatacctaccacataaagaactacattattaataaggatatcctccggagagtgctagttcttatggcctcgaagcatgctttcttggcattatgtgcccttcgttttaaaagaaagattattggattaaaagatgagttttacaaccgctacataatgaaaagttttttgtttgaaccagtagtgaaagcatttctcaacaatggatcccgctacaatctgatgaactctgccataatagagatgtttgaatttattagggtggaagatataaaatcattaactgctcatgtaattgaaaattactggaaagcactggaagatgtagattatgtacagacatttaaaggattaaaactgagatttgaacaacaaagagaaaggcaagataatcccaaacttgacagtatgcgttccattttgaggaatcacagatatcgaagagatgccagaacactagaagatgaagaagagatgtggtttaacacagatgaagatgacatggaagatggagaagctgtagtgtctccatctgacaaaactaaaaatgatgatgatattatggatccaataagtaaattcatggaaaggaagaaattaaaagaaagtgaggaaaaggaagtgcttctgaaaacaaacctttctggacggcagagcccaagtttcaagctttccctgtccagtggaacgaagactaacctcaccagccagtcatctacaacaaatctgcctggttctccgggatcacctggatccccaggatctccaggctctcctggatccgtacctaaaaatacatctcagacggcagctattactacaaagggaggcctcgtgggtctggtagattatcctgacgatgatgaagatgatgatgaggatgaagataaggaagatacgttaccattgtcaaagaaagcaaaatttgattcataataatggcaacggcctaggatcagtacctgttgaaaaaaactggttctccacccctcccccatacaaaatccacaaaaaagcgcagtggtctcttgtgaatgactgacacagatcagcctcttacacttgacttctgctcatcaagtgccaattcaatggagcaggaggaggggatatcatatatttaggggaaagacttaagcctttgagctctccagcttggaccacacattgcccttttctcagggaaggaaatggaaacaaaaagccaacagggcaggggttttgtaagtggaactctggattgactggtcagttgctacaatcagaatatgctttcttggaccatgtttgagactcagaagaatgggcctttctgccataattcttcactagtcaagaatgccagcagtttctttgtataaagagacctgcctttaaaatcatacattctgaacattttagtcaagctacaacaggtttggaaaacctctgtgggggaggggcgagtataaagttttcctcttttttaactgttccctttgcccttcaaactgcagatatttttttttttaagtggggacttctccctacttgattaaagattgagtggaattctagatgtggtcatttgtgtcataatttttttgttttattttgtttttgattttttttttcctcccctgagtgtatgcttagttgttgagtatatatatttgggaccattaaaactttttttgatgtaatataacctaacgttgtgctggtacctgttttaccatgtgtaatttttgttctacatcacagttcttaatttgtttagagttttatgaaagatggtatagtttttattgacaaaagcaaagtaatcttacaactatgtgcatacaaaagcaatactattttgtgactaaatattttatattaaaatttacatcagcaactgtcttgagaattcagggaaatagaatggaatttaaaacttcaacagttttgttaaatctagaaacatgaaattagtattccaaagagattctgaaatttcttttcttggggaaatgacggtacattaaatcaaaattgaggatggatgatttaaaaacatttgactttttaataataaaaagaaaagtgaagagtaagagaaaaaaaaaaaaaaaaaaa

SEQ ID NO: 30939 - DNA, 7026 bp, Homo Sapiens
aagagggcgtgaggagggaaggagagggaggagagagaggagagagaagggcggagtaggaggcaggggaagggggcggggcggaagagtcacgtgatccggcatggaggcggtggcggcgaccgggaggagccgccggggcagaagccgcacttgttagtgtggggggaggtgggggcgggggacgccgacaccgtcaccgtcacccagggacgccgaggagaaggcgggaggggggtgggggcgagatcaggctccgaccccccgccgaggggatgaggggagcatgggtgccaaggagtcacggatcggattcctcagctacgaggaggcgctgaggagagttacagatgtagagctaaaacgactgaaggatgctttcaagaggacctgtggactctcatattacatgggccagcactgcttcatccgggaagtgcttggggatggagtgcctccaaaggttgctgaggtgatttactgttcttttggtggaacatccaaagggctgcacttcaataatttaatagttggacttgtcctccttacaagaggcaaagatgaagagaaagcaaaatacatttttagtcttttttcaagtgaatctgggaactatgttatacgggaagaaatggaaagaatgctccacgtggtggatggtaaagtcccagatacactcaggaagtgtttctcagagggtgaaaaggtaaactatgaaaagtttagaaattggctttttctaaacaaagatgcttttactttctctcgatggcttctatctggaggtgtgtatgttaccctcactgatgatagtgatactcctactttctaccaaactctggctggagtcacacatttggaggaatcagacatcattgatcttgagaaacgctattggttattgaaggctcaatcccggactggacgatttgatttagagacatttggcccattggtttcaccacctattcgtccatctctaagtgaaggtttgtttaatgcttttgatgaaaatcgtgacaatcacatagattttaaggagatatcctgtgggttatcagcctgttgcaggggacccctggctgaaagacaaaaattttgcttcaaggtatttgatgttgaccgtgatggagttctctccagggttgaactgagagacatggtggttgcacttttagaagtctggaaggacaaccgcactgatgatattcctgaattacatatggatctctctgatattgtagaaggcatactgaatgcacatgacaccacaaagatgggtcatcttactctggaagactatcagatctggagtgtgaaaaatgttcttgccaatgagtttttgaacctccttttccaggtgtgtcacatagttctggggttaagaccagctactccggaagaagaaggacaaattattagaggatggttagaacgagagagcaggtatggtctgcaagcaggacacaactggtttatcatctccatgcagtggtggcaacagtggaaagaatatgtcaaatacgatgccaaccctgtggtaattgagccatcatctgttttgaatggaggaaaatactcatttggaactgcagcccatcctatggagcaggtcgaagatagaattggaagcagcctcagttacgtgaatactacagaagagaaattttcagacaacatttctactgcatctgaagcctcagaaactgctggcagcggctttctgtattctgccacaccaggggcagatgtttgctttgctcgacaacataacacttctgacaataacaaccagtgtttgctgggagccaatgggaatattttgttgcaccttaaccctcagaaaccaggggctattgataatcagccattagtaactcaagaaccagtaaaggctacatcattaacactagaaggaggacgattaaaacgaactccacagctgattcatggaagagactatgaaatggtcccagaacctgtgtggagagcactttatcactggtatggagcaaacctggccttacctagaccagttatcaagaacagcaagacagacatcccagagctggaattatttccccgctatcttctcttcctgagacagcagcctgccactcggacacagcagtctaacatctgggtgaatatgggaaatgtaccttctccgaatgcacctttaaagcgggtattagcctatacaggctgttttagtcgaatgcagaccatcaaggaaattcacgaatatctatctcaaaggctgcgcattaaagaggaagatatgcgcctgtggctatacaacagtgagaactaccttactcttctggatgatgaggatcataaattggaatatttgaaaatccaggatgaacaacacctggtaattgaagttcgcaacaaagatatgagttggcctgaggagatgtcttttatagcaaatagtagtaaaatagatagacacaaggttcccacagaaaagggagccacaggtctaagcaatctgggaaacacatgcttcatgaactcaagcatccagtgtgttagtaacacacagccactgacacagtattttatctcagggagacatctttatgaactcaacaggacaaatcccattggtatgaaggggcatatggctaaatgctatggtgatttagtgcaggaactttggagtggaactcagaagaatgttgccccattaaagcttcggtggaccatagcaaaatatgctcccaggtttaatgggtttcagcaacaggactcccaagaacttctggcttttctcttggatggtcttcatgaagatcttaatcgagtccatgaaaagccatatgtggaactgaaggacagtgatgggcgaccagactgggaagtagctgcagaggcctgggacaaccatctaagaagaaatagatcaattgttgtggatttgttccatgggcagctaagatctcaagtaaaatgcaagacatgtgggcatataagtgtccgatttgaccctttcaattttttgtctttgccactaccaatggacagttatatgcacttagaaataacagtgattaagttagatggtactacccctgtacggtatggactaagactgaatatggatgaaaagtacacaggtttaaaaaaacagctgagtgatctctgtggacttaattcagaacaaatccttctagcagaagtacatggttccaacataaagaactttcctcaggacaaccaaaaagtacgactctcagtgagtggatttttgtgtgcatttgaaattcctgtccctgtgtctccaatttcagcttctagtccaacacagacagatttctcctcttcgccatctacaaatgaaatgttcaccctaactaccaatggggacctaccccgaccaatattcatccccaatggaatgccaaacactgttgtgccatgtggaactgagaagaacttcacaaatggaatggttaatggtcacatgccatctcttcctgacagcccctttacaggttacatcattgcagtccaccgaaaaatgatgaggacagaactgtatttcctgtcatctcagaagaatcgccccagcctctttggaatgccattgattgttccatgtactgtgcatacccggaagaaagacctatatgatgcggtttggattcaagtatcccggttagcgagcccactcccacctcaggaagctagtaatcatgcccaggattgtgacgacagtatgggctatcaatatccattcactctacgagttgtgcagaaagatgggaactcctgtgcttggtgcccatggtatagattttgcagaggctgtaaaattgattgtggggaagacagagctttcattggaaatgcctatatcgctgtggattgggatcccacagcccttcaccttcgctatcaaacatcccaggaaagggttgtagatgagcatgagagtgtggagcagagtcggcgagcgcaagccgagcccatcaacctggacagctgtctccgtgctttcaccagtgaggaagagctaggggaaaatgagatgtactactgttccaagtgtaagacccactgcttagcaacaaagaagctggatctctggaggcttccacccatcctgattattcaccttaagcgatttcaatttgtaaatggtcggtggataaaatcacagaaaattgtcaaatttcctcgggaaagttttgatccaagtgcttttttggtaccaagagacccggctctctgccagcataaaccactcacaccccagggggatgagctctctgagcccaggattctggcaagggaggtgaagaaagtggatgcgcagagttcggctggggaagaggacgtgctcctgagcaaaagcccatcctcactcagcgctaacatcatcagcagcccgaaaggttctccttcttcatcaagaaaaagtggaaccagctgtccctccagcaaaaacagcagccctaatagcagcccacggactttggggaggagcaaagggaggctccggctgccccagattggcagcaaaaataaactgtcaagtagtaaagagaacttggatgccagcaaagaaaatggggctgggcagatatgtgagctggctgacgccttgagtcgagggcatgtgctggggggcagccaaccagagttggtcactcctcaggaccatgaggtagctttggccaatggattcctttatgagcatgaagcatgtggcaatggctacagcaatggtcagcttggaaaccacagtgaagaagacagcactgatgaccaaagagaagatactcgtattaagcctatttataatctatatgcaatttcgtgccattcaggaattctgggtgggggccattacgtcacttatgccaaaaacccaaactgcaagtggtactgttacaatgacagcagctgtaaggaacttcacccggatgaaattgacaccgactctgcctacattcttttctatgagcagcaggggatagactatgcacaatttctgccaaagactgatggcaaaaagatggcagacacaagcagtatggatgaagactttgagtctgattacaaaaagtactgtgtgttacagtaaagctaccactctggctgctagacagcttggcggtgagggagatgactccttgtagctgacatttggcaaaagcgtcactgaaaggcaagctaaatgtagttattttatcctgtggccctgaagcacaaaataaaaattctaattaaaatagttaactttaagagtagtaatcattttattttgaagtctcatacaagctctccgatagagaactttcaggcagatcccaccattagcctgtaaacaaaaggtttggcaccagccacctgggaccaaataagaattcaattgtgcttgtccagatatgaacaaatatgtagtgagtatagagtttaccataatcataacaaatattaaagatttccttggagtcagagtaaaaaacaaacaattataatgttgtctagggacgacatgatatgctacctcctttttcctgaagttttattccattatattgacaagatggagaaagcaagatcacgaaggtgtgcaaatgattcttaaggcatggacgaggatttttcaatttattttttaaactgtttccataccctttctttgtctttcttgctttttgtttttgccgttgtatttatgtttgagacacaaccagtcattggtggcaggggcatatagtggtcagtctgaaagggaggctctcttaagagctgtgtgccttccacccagagccttgtgggagacccagtagaaagaaacagcatcctgggaaatccagctaccatggccctcccagtggaggcatcttacatttaggatacttcaagtatcctcagaaatgtattctgcacccccggccccacccatgctgagggaaggggagcagttgccaatatttgcaccatcttcacatgcacctgttgcaacaagagcttctgggaaggtaagtggcattggagctagatcacgtttcacaattagtggttgttcttttctgtgtttgtcttgcactttaaaaaagagagaacacatgcaaatgaacttgcttgtgtgtatttgatggctctaagggctataaattacaaacaaaacacatcccagacattaggagttcataagtgtatttaatgaaattggtggttttaggaagtcaactttagttttgctttgtttgcatgtccactaatttttttattttgatatttgtcttttttttaaattttacagtagtcatcgaaagttatgtttctttgcttacttcatttttttctctaatcaagactggaacaaaagtataaatattatttatttcaggtagcatttttttcgtgtagttttttaatatatacttgaaggaaatgtttcaccttatttttggtctttgtttattcatttagaccctgcaagttgattctcattaattgtcagattccactaccctttcttcctcatagatagtaattaccaatgtaactaagtatttgtgttctgatatctgaggccagtaactattaatatctagttctcagagcatttggaaaggttatcttaaatggctacctaaattgaaatccttttcagaaaaaatataattgcaagtaggtaggactggcctaaattgtctaatgtaataaagtcagacaaaatgcatactttatagtttcaagattttcagtatataaaatctgtccattcccattaaaaagtggaagattttaaataatttctttacagatgttttatttaagcaggtagctcaatctactaatgttgtttgatctgtgtttgttatactggttgtaattaatttttttaattcatgaactagcagaaaatttattaaattaactattaactacattcaccttgtaaattactgtataaaacttgttgacaatgcactgactttagaaagatgttaatgtacataaatagagtgtaaataaaatagtgttgatgtaccg

SEQ ID NO: 30940 - DNA, 4071 bp, Homo Sapiens
ggtgcagcccaaattccgttaccccttctactatgagatgtgctggtatgtcctggagagatacgtgtactgtgtgacccagcgctcccacctcactcaggaataccagagggagtcgatgcttattgatgccccgaggaagcccagcatagacggcttctcttcggattcctggctggagatggaggaggaggcctgtgatcagcagcctcaggaggaggaggagaaggacgaggagggcgagggcagggacagggcacccaaaccgcccaccgatggctccacttcacccaccagcacgccctctgaggaccaggaggccctcgggaagaagcccaaagcacctgccctgcgattcctcaaaaggactttgtctaatgagtcggaggaaagtgtgaagtccaccacattggccgtagactaccccaagacccccaccggctctcccgccacggaggtctctgccaaatggacccatctcactgagtttgaactgaagggcctgaaagctctggtggagaaactggaatccctcccggagaacaagaagtgtgtccccgagggcatcgaggacccccaggcactcctggagggtgtgaagaacgtcctgaaggagcacgcagatgatgaccctagtctggccatcactggggtccctgtggtgacttggccaaagaagactccaaagaaccgggctgtgggtcggcccaaggggaagctgggcccggcctccgcggtgaagttggccgccaaccggacaacggcaggagctcggcggcgccggacgcgatgccgcaagtgcgaggcctgcctgcggaccgagtgcggagagtgccacttctgcaaggacatgaagaagttcgggggccccgggcgcatgaagcagagctgcatcatgcggcagtgcatcgcgccagtgctgccccacaccgccgtgtgccttgtgtgtggcgaggcggggaaggaagacacggtggaagaggaggaaggcaagtttaacctcatgctcatggagtgctccatctgcaatgaaatcatccaccctggatgccttaagattaaggagtcagagggtgtggtcaacgacgagcttccaaactgctgggagtgtccgaagtgtaaccacgccggcaagaccgggaaacaaaagcgtggccctggctttaagtacgcctccaacctgcccggctccctgctcaaggagcagaagatgaaccgggacaacaaggaagggcaggaacctgccaagcggaggagtgagtgtgaggaggcgccccggcgcaggtcggatgagcactcgaagaaggtgccgccggacggccttctgcgcagaaagtctgacgacgtgcacctgaggaagaagcggaaatacgagaagccccaggagctgagtggacgcaagcgggcctcatcgcttcaaacgtcccccggttcctcctctcacctctcgccgaggccccctctaggcagcagcctcagcccctggtggagatccagtctcacttacttccagcagcagctcaaacctggcaaagaagataagcttttcaggaaaaagcggcggtcctggaagaacgccgaggaccgcatggcgctggccaacaagcccctccggcgcttcaagcaggaacccgaggacgaactgcccgaggcgccccccaagaccagggagagcgaccactcccgctccagctcccccaccgcgggacccagcaccgaaggggccgagggcccggaggagaagaagaaggtgaagatgcgccggaagcggcggcttcccaacaaggagctgagcagggagctgagcaaggagctcaaccacgagatccagaggacggagaacagcctggccaacgagaaccagcagcccatcaagtcggagcctgagagcgagggcgaggagcccaagcggcccccgggcatctgcgagcgtccccaccgcttcagcaaggggctcaacggcaccccccgggagctgcggcaccagctggggcccagcctgcgcagcccgccccgtgtcatctcccggcccccaccctccgtgtccccgcccaagtgtatccagatggagcgccatgtgatccggccaccccccatcagccccccgcctgactcgctacccctggacgatggggcagcccacgtcatgcacagggaggtgtggatggccgtcttcagctacctcagccaccaagacctgtgtgtgtgcatgcgggtctgcaggacctggaaccgctggtgctgcgataagcggttgtggacccgcattgacctgaaccactgcaagtctatcacacccctgatgctgagtggcatcatccggcgacagcccgtctccctcgacctcagctggaccaatatctccaagaagcagctgagctggctcatcaaccggctgcctgggctccgggacttggtgctgtcaggctgctcatggatcgcggtctcggccctttgcagctccagttgtccgctgctccggaccctggatgtccagtgggtggagggactaaaggatgcccagatgcgggatctcctgtccccgcccacagacaacaggccaggtcagatggacaatcggagcaagctccggaacatcgtggagctgcgcctggcaggcctggacatcacagatgcctccctgcggctcatcatccgccacatgcccctgctctccaagctccacctcagttactgtaaccacgtcaccgaccagtctatcaacctgctcactgctgttggcaccaccacccgagactccttaaccgagatcaacctgtctgactgcaataaggtcactgatcagtgcctgtccttcttcaaacgctgtggaaacatctgtcatattgacctgaggtactgcaagcaagtcaccaaggaaggctgtgagcagttcatagccgagatgtctgtgagtgtccagtttgggcaagtagaagaaaaactcctgcaaaaactgagttagtccaaggataagtatgtaaatacggggcgggctctgggaggggagagactttacaaaaatgagggcttttattttccatttggaacgtgggacaacagaccacaacgcaattccattttgcaagtctttccaagggagaagctgttcaaccacccgtttgggggatgagtgagccgacactttcctttggtctttctgaatcgtaactgcactgctttctggaccatttctaaggcggcctttacaagaagacattcctgtcggagaggagggtggacttcggagaaattctcatactgaagcatgagcttaggagtttctgttagtggtagtggtgttttggacacttcattccttgcaacaccgaggttttgggtgttgacataaagtggaccacacaccacatctgctgccgtcttgacacttttttttgtttggttggttttgttacatcttacattatgcagaactatttttgtacaaattgtttaaaagttatttatgcaaggtttgaatgcataccagtgtttttattgttttgagattgccaattttcctgatttccttaaggtaggagagaatttaacgtgtacttcatcgacacaacccatctacaaatgtgcccagatctaacaaagtaggctaagaccttccacttaaaagcatgtttaactggaagttgagagtctgctttgtacctcaagagttacatgagcatgttgtggataaatgtaaattatagtcaaagtaagatactctgccaagtttcctctgtagagaattcacttttctcaaattttaaaatttcgacttcagcctttgcactcaggaggttctgctccagcatgagctcttgtacttacatagatctaatttatacagtgagtcaagacgtagaataaatgctcccacatagcctttcttttgcttttgcttctctcctctgaagtgtgagttgagttctcatttaggtttgtaacatggctatttcctagttgtaaagttctgcatttataagtgccattgttgtaaggtggtgtttcctagaccttccctgatgcgattttacctttgttgaatttgtataaacaattgtacaaaaaaaa

SEQ ID NO: 30941 - DNA, 3121 bp, Homo Sapiens
taggactgatctccaggaccagcactcttctcccagcccttagggtcctgctcggccaaggccttccctgccatgcgacctgtcagtgtctggcagtggagcccctgggggctgctgctgtgcctgctgtgcagttcgtgcttggggtctccgtccccttccacgggccctgagaagaaggccgggagccaggggcttcggttccggctggctggcttccccaggaagccctacgagggccgcgtggagatacagcgagctggtgaatggggcaccatctgcgatgatgacttcacgctgcaggctgcccacatcctctgccgggagctgggcttcacagaggccacaggctggacccacagtgccaaatatggccctggaacaggccgcatctggctggacaacttgagctgcagtgggaccgagcagagtgtgactgaatgtgcctcccggggctgggggaacagtgactgtacgcacgatgaggatgctggggtcatctgcaaagaccagcgcctccctggcttctcggactccaatgtcattgaggtagagcatcacctgcaagtggaggaggtgcgaattcgacccgccgttgggtggggcagacgacccctgcccgtgacggaggggctggtggaagtcaggcttcctgacggctggtcgcaagtgtgcgacaaaggctggagcgcccacaacagccacgtggtctgcgggatgctgggcttccccagcgaaaagagggtcaacgcggccttctacaggctgctagcccaacggcagcaacactcctttggtctgcatggggtggcgtgcgtgggcacggaggcccacctctccctctgttccctggagttctatcgtgccaatgacaccgccaggtgccctggggggggccctgcagtggtgagctgtgtgccaggccctgtctacgcggcatccagtggccagaagaagcaacaacagtcgaagcctcagggggaggcccgtgtccgtctaaagggcggcgcccaccctggagagggccgggtagaagtcctgaaggccagcacatggggcacagtctgtgaccgcaagtgggacctgcatgcagccagcgtggtgtgtcgggagctgggcttcgggagtgctcgagaagctctgagtggcgctcgcatggggcagggcatgggtgctatccacctgagtgaagttcgctgctctggacaggagctctccctctggaagtgcccccacaagaacatcacagctgaggattgttcacatagccaggatgccggggtccggtgcaacctaccttacactggggcagagaccaggatccgactcagtgggggccgcagccaacatgaggggcgagtcgaggtgcaaatagggggacctgggccccttcgctggggcctcatctgtggggatgactgggggaccctggaggccatggtggcctgtaggcaactgggtctgggctacgccaaccacggcctgcaggagacctggtactgggactctgggaatataacagaggtggtgatgagtggagtgcgctgcacagggactgagctgtccctggatcagtgtgcccatcatggcacccacatcacctgcaagaggacagggacccgcttcactgctggagtcatctgttctgagactgcatcagatctgttgctgcactcagcactggtgcaggagaccgcctacatcgaagaccggcccctgcatatgttgtactgtgctgcggaagagaactgcctggccagctcagcccgctcagccaactggccctatggtcaccggcgtctgctccgattctcctcccagatccacaacctgggacgagctgacttcaggcccaaggctgggcgccactcctgggtgtggcacgagtgccatgggcattaccacagcatggacatcttcactcactatgatatcctcaccccaaatggcaccaaggtggctgagggccacaaagctagtttctgtctcgaagacactgagtgtcaggaggatgtctccaagcggtatgagtgtgccaactttggagagcaaggcatcactgtgggttgctgggatctctaccggcatgacattgactgtcagtggattgacatcacggatgtgaagccaggaaactacattctccaggttgtcatcaacccaaactttgaagtagcagagagtgactttaccaacaatgcaatgaaatgtaactgcaaatatgatggacatagaatctgggtgcacaactgccacattggtgatgccttcagtgaagaggccaacaggaggtttgaacgctaccctggccagaccagcaaccagattatctaagtgccactgccctctgcaaaccaccactggcccctaatggcaggggtctgaggctgccattacctcaggagcttaccaagaaacccatgtcagcaaccgcactcatcagaccatgcactatggatgtggaactgtcaagcagaagttttcaccctccttcagaggccagctgtcagtatctgtagccaagcatgggaatctttgctcccaggcccagcaccgagcagaacagaccagagcccaccacaccacaaagagcagcacctgactaactgcccacaaaagatggcagcagctcattttctttaataggaggtcaggatggtcagctccagtatctcccctaagtttagggggatacagctttacctctagccttttggtgggggaaaagatccagccctcccacctcattttttactataatatgttgctaggtataattttattttatataaaaagtgtttctgtgattcttcagagcccaggagtcagtgctggtggttggagggacctgcccccactggttcatttaaccctctgtctcggtgccctcagaacctcagccagaaaggcaaggaggaaatcagagcaggagcctcatactcttggtgatctattcattctgtgacctcaggggtcacatataaggtcagtgtttctcgtccccgccggatctgcactgccaactgggattgggttcgaacagcttcataaacatcttcagcattttgtaccatctgctccccaatggccaaaatcacatcaccaggccgcagaccagccc

SEQ ID NO: 30942 - DNA, 4539 bp, Homo Sapiens
gaacgttgctgtggtagcgctcgggcgccatgttaggacgaaggggaaggaggagaagcgcttaaagcggcgggagcggtgcgggagaggggttggacccagggctgaggcaggcccccccctccctcccgcctcagtggatcatgcccagggcggcagcggcggcggttgcgggggggaagtgactgggcggtgccggcgccggagacgatgccgtttccagttacaacacagggatcacaacaaacacaaccgccacagaagcactatggcattacttctcctatcagcttagcagcccccaaggagactgactgcgtacttacacagaaactaattgagacattgaaaccctttggggtttttgaagaggaagaggaactgcagcgcaggattttaattttgggaaaactaaataacctggtaaaagagtggatacgagaaatcagtgaaagcaagaatcttccacaatctgtaattgaaaatgttggaggaaaaatttttacatttggatcttacagattaggagtgcatacaaaaggtgctgatattgatgcgttgtgtgttgcaccaagacatgttgatcgaagtgactttttcacctcattctatgataagttgaaattacaggaagaagtaaaagatttaagagctgttgaagaggcattcgtaccagttattaaactctgttttgatgggatagagattgatattttgtttgcaagattagcactgcagacaattcctgaagatttggatctacgagatgacagtctgctaaaaaatttagatataagatgtataagaagtcttaacggttgcagggtaaccgatgaaattttacatctagtaccaaacattgacaacttcaggttaactctgagagctatcaaactatgggccaaacgccacaacatctattccaatatattaggtttcctcggtggtgtttcctgggctatgctagtagcaagaacttgccagctttatccaaatgcaatagcatcaactcttgtacataaatttttcttggtattttctaaatgggaatggccaaatccagtgctattgaaacagcctgaagaatgcaatcttaatttgcctgtatgggacccaagggtaaaccccagtgataggtaccatcttatgcctataattacaccagcatacccacaacagaactccacgtacaatgtgtccgtttcaacacggatggtcatggttgaggagtttaaacaaggtcttgctatcacagatgaaattttgctgagtaaggcagagtggtccaaactttttgaagctccaaacttctttcaaaagtacaagcattatattgtacttctagcaagtgcaccaacagaaaaacaacgcctggaatgggtgggcttggtggaatcaaaaatccgaatcctggttggaagcttggagaagaatgaatttattacactggctcatgtgaatccccagtcatttccagcacccaaagaaaatcccgacaaggaagaatttcgcacgatgtgggtgattgggttagtgtttaaaaaaacagaaaactctgaaaacctcagtgttgatctcacctatgatattcagtctttcacagatacagtttataggcaagcaataaacagcaagatgtttgaggtggatatgaaaattgctgcaatgcatgtaaaaagaaagcaactccatcaactactacctaatcatgtgcttcagaaaaagaaaaagcattcaacagaaggtgtcaaattgacagctctcaatgacagcagcctcgacttgtctatggacagtgataacagcatgtctgtgccttcacctactagtgctacgaagaccagtccattgaacagttctggcagctctcagggcagaaacagtcctgctccagctgtaacagcagcatctgtgaccaacatacaggctactgaagtttctgtgccacaagtaaattccagtgaaagctcagggggtacatcgagtgaaagcattcctcaaactgccacacaaccagccatttctccaccaccaaagcctacggtctccagagttgtttcttcaacacgtctggtaaacccaccacctagatcttcaggaaatgcagcaacttcaggaaatgcagcaacaaaaatacctactcctatagtaggagtcaagaggacatcctcacctcataaagaagagagtcccaagaaaaccaaaacagaagaggatgaaacaagtgaagatgctaactgtcttgctttgagtggacatgataaaacagaagcaaaggaacaacttgatacagagacaagtacaactcaatcagaaactattcagacagcggcttctctgttggcctctcagaaaacatccagtacagacctttctgatatccctgctctccctgcaaatcctattcctgttatcaagaattcaataaaactgagattgaatcggtaaaaacaacctcaggggtccataaacaatatctgccaactcaacctgttgtcttcaaatgctaaaaaaggagaatggagggtacaagactagacatgactgaaatggatttgggttttttggtgacctcccttactgggctaatcagcacttgatcggaagtccaggttagtatgtgaagccaggagtactattattattgtgttagcaacagttgcattaactatttcaaaaattactgcctttaaaaaaaacaacctcaagctatatttgtattcataattgacatctggattgggtttatgtttgatgcattgtttggaaaatttgcaatacaaactggcataagaattacttattctgatgatgcacttttatgtatttttcattagaaagtagaactaattttagattttcagcttgatggattttcagtttttcctgaagaattttctttaccattagtcttcaaattggatactgttgtgcagtggtgtactgttatacttcagagaaagggtaagagtacatctagttcagttcctatgaggtagctgtaacccttaaaaatgaaacgtcaactctagggtacatttgacattgaaagaatagttaggaaataacttggttttgatagggtcatgattaagaaatgatatattggttttatttatggaattgttttatagtgcatacaaatcagcgatcagccagcaaatatttttctttgagcttgtgaaagctctgtgttcttttgccttcaatctgttgtcttcaaaacaaacaaacaaaaaaagcttcttgcgcctttccctcccctgttttcttcctttttctttttgcttgtatgcacaaggtaggacttacttcgtaagaaacaaaatgccagtattttcttaagccatgatgtgaaaccaatgaccctgtgaccacatggcacagaacactaaattttggtcccatggctgaaacttgagggtgactaaaagtaatgcctgtgaaacatgatatctatctgggatggccatttgatctctaaaaggaattttgtacactccacagaactcctatctatagtaaaattgattttcagttttaaatgtgggcaaaaaggcattttctccaagattttaaaactaattcttatttttaaatggtttaccaaaatttgtcagtacattttacgtgtagaagcattttaaaaatcatttctagcaagcacttgacatctagtcagctctctactcctttattttgttttatcaaaagattaagagctcctttctttgaataaaataatttctcataattaagcagtagaagatctatcttcacaaagtatgagggatgccagatgttgataaacttactctttctgaatctggacaaagtcgacttaacagatttttctgatgagcatgttttatgaatcctccattgtgctccattctatcacatgtgcatttttcatgttaaactgcaattacttaatctcttcccctatccttctaaattaattttctgaagttggagtgtagtcttttcccccttaggctatgcattaatcgaagctttcttttcaccatgactttataatgtctagtaaacaatatttctacttcccacatctttgctttacacagtcaccttgcccttccttccaccaccgaagaaaaaagatggtcatactaacaggtgaaatgtacaaggtgtctgtgtgttttgtgtagcttcagagttagattgaaattaccaggcacagatttagtcttgtcattttgtttacacattggggaaaacaattcagtttattaaacgtttcatgtaactgcacccaagttttgccaagctggaaacttggaccttttctgtgtagtgactttttaattatagttttcataacctggagatcagactgttgctttcgcatgatgtatgtagtgtctcatgactggagtttgctttgttttatagtatctgtactccttgtatttttcaagagctattttgtaaacagatgatgtatttctccattgaaaacacaataaaaaaaaaacagcacaaaaaaaaaaaaaaaaaaaaaaaaaaaaaaaa

SEQ ID NO: 30943 - DNA, 1061 bp, Homo Sapiens
gactggcggcgggcgccgcggtcgggctggctgccgggcagcatggaggagctgagcagcgtgggcgagcaggtcttcgccgccgagtgcatcctgagcaagcggctccgcaagggcaagctggagtacctggtcaagtggcgcggctggtcctccaaacataacagctgggagccggaggagaacatcctggacccgaggctgctcctggccttccagaagaaggaacatgagaaggaggtgcagaaccggaagagaggcaagaggccgagaggccggccaaggaagctcactgccatgtcctcctgcagccggcgctccaagctcaaggtgggtggctgcgctgggtatgctgaccccacctcccagcacccccttggcgtagggggcaggcagagggagggtttggggccctcaggaagggggtggcacttctgccaacagtctgtccctctactcggaaaacaggagccccctttcttcctgtctctcagcttctgctgccaggggccccagccggctgagagttcctccccgcccctcccaggggcttcctgcttcagcctgtcctgcacgcctctctgctgggtggcagggtcaaactgctgcagacaagcactcttccctcccagggggtccttgggggacggaaaggaacaggaagcatgcgtacagtaggtgctcataggattgccggctggatgtgactcaaaagcctaagatttgggggctactccgggcccacctgcgggtgcaccttaaatcgaggtggccacgaaaggcagggctgactgaatagccagggggtgccaggaggggccttggaggagggcagaggcagtgtgggctgatgatgtgctttggccttctcgggactgtcctgtcacccctcctcgctacagtgatgggctcaccccgccacaggtatgcatgcgcccctggggtccgtggtagggcccctccctcccctgaggacaggtgaggcaggacaggatgggggaggagggcctggcctcagtcccgggtgtggctttgattccctcctccgggcactgtccctg

SEQ ID NO: 30944 - DNA, 733 bp, Homo Sapiens
ggtcgggcgttgggtttcgcggcgctcgccgcactggttgttcagcaccttcggtccggttgaggttgtcaagtcggaccaaacaggttgtttctctgcagtttccaacatggcagggaggtttaatagacatggataagaagtccactcacagaaatcctgaagatgccagggctggcaaatatgaaggtaaacacaaacgaaagaaaagaagaaagcaaaaccaaaaccagcaccgatcccgacatagatcagtgacgtctttttcttcagatgatcctatgtttccttcttcctcatcatcgtcttcaggaagccagacagattcaagtattgaagatgctgccaagggaaaaattaagaagaagagaagagagaaaacaaataaatgggaaaaaagaaaggacaaaatatgaaacaccaagaaaaagagaaggaaaaaaaggaggaaacaaccacatatgtcacctttccaagagggactgaaactgggctgacccttttgatttccaaactcagcgttttggtgtaaggcggccaaagaaggatgcggagcccagcactgtgaagcctacaaaaacattgatgcgctggcttggggatttgaatttgaacatctttcacactaagttcagactcatgaaaccaatcttcagatgctctgtaaaccacataataaagagtttggaaattaaaaaaaaaaaaaaaaaaaaaaaaaaaaaaaaaaaaaaaa

SEQ ID NO: 30945 - DNA, 2046 bp, Homo Sapiens
ccaatcgctagcaaactccctgcctagcaaggcccagcctggggcagaaatggctgcaagtggccgaggtctctgcaaggctgtggccgcctctcccttcccggcgtggagacgagataacacggaagccaggggaggtctgaagcctgagtatgatgcggtggtgataggagcaggacacaacggactggtggctgcagcgtacctgcagagactgggggtgaacaccgccgtcttcgagaggcgccatgtgatcgggggtgcagctgtcactgaggagatcatcccagggtttaagttctcccgtgcgtcctacctgctcagcctgctgaggccgcagatttacactgatctggagctgaagaaacatgggctgaggcttcatcttcgaaacccctactccttcacccccatgctggaagagggtgcaggcagcaaggtgcccaggtgccttctgctgggcacagacatggcagaaaaccagaagcagatcgcccagttctcccagaaggatgcccaggtctttcccaaatatgaggagttcatgcatcgcttggcattagccattgaccctctgctggatgcggcccccgtggacatggcggccttccagcatggctccttgctgcaaaggatgaggtcgctctccaccctcaagcccctgctgaaggcaggccgcatcctgggagcccagcttccccgatattatgaggtcctcacagctcccattaccaaggtgctggatcagtggttcgagtctgagcctttaaaagccactctagccacagatgcagtgattggagccatgacaagtccccacactccggggagtgggtatgtgctgctgcaccatgtgatggggggcctggagggaatgcagggggcctggggctacgtccaggggggcatgggtgccctctctgatgcgatcgcaagctcagccaccacacatggagcaagcatcttcactgaaaagacagtggcgaaggtgcaggtgaacagtgaaggctgtgttcaaggagttgtgctggaagatggcacagaggtgagaagcaaaatggtgctgtccaacacatcaccgcagatcaccttcctgaagctgacgccacaggagtggcttcctgaggagttcctggagagaatctctcagctggacacccggtcgcctgtcaccaagatcaatgtggccgtagacaggctgcccagcttcctggcggcccccaatgctcccaggggccagccgctgccccatcaccaatgctccatccacctgaactgtgaagacaccctcctccttcatcaggcctttgaagatgccatggatggcctgtcttcccacaggcctgtgattgagctctgcatcccttcctcgctggaccccaccctggctccccctggctgccatgtagtctccctcttcactcagtacacgccctatacgctggctggaggcaaggcctgggacgagcaggagagagacgcttatgcagacagagtgtttgattgcatcgaggtctatgcccctggcttcaaggactctgtggttggcagagacatcctcacaccaccagatttggagagaatcttcgggcttcctggagggaacatattccactgcgccatgtccctggaccagctctacttcgcccgccccgtgcccctgcattctggctaccgctgccctctccagggcctgtatctctgtggaagtggggctcatcctggaggaggtgtgatgggagctgctgggcgaaatgcagcacatgtggcctttagggacctcaagagcatgtgaccctgaaccagctctgacccaggaagaagactccacccctgaattccaagtgctccattggatcagcttcccaggaagttcagcttcgggttagtacataaggccaccacaatgctcaagaaattattttagaaaaaacgtacgagttacatttagtgcaagttgaccttatgcccatgcctccatacatggactggttctgttttattaaaactaatatttcatacagataaaaaaaaaaaaaaaaaaaa

SEQ ID NO: 30946 - DNA, 3107 bp, Homo Sapiens
gccagctgctgtagaagaggggaggaaacaagccagtgcaaggggagcaaaagagaaaaggagccaggctgggcttcctgatcccacagcatcgcagagctcgggaggcacagctcacagacacaggaaacacaggactgctattctgctctcctgcccacggtgatctggtgccagctggtggaacagtgggtgatggcgtccctgctgcaagaccagctgaccactgatcaggacttgctgctgatgcaggaaggcatgccgatgcgcaaggtgaggtccaaaagctggaagaagctaagatacttcagacttcagaatgacggcatgacagtctggcatgcacggcaggccaggggcagtgccaagcccagcttctcaatctctgatgtggagacaatacgtaatggccatgattccgagttgctgcgtagcctggcagaggagctccccctggagcagggcttcaccattgtcttccatggccgccgctccaacctggacctgatggccaacagtgttgaggaggcccagatatggatgcgagggctccagctgttggtggatcttgtcaccagcatggaccatcaggagcgcctggaccaatggctgagcgattggtttcaacgtggagacaaaaatcaggatggtaagatgagtttccaagaagttcagcggttattgcacctaatgaatgtggaaatggaccaagaatatgccttcagtctttttcaggcagcagacacgtcccagtctggaaccctggaaggagaagaattcgtacagttctataaggcattgactaaacgtgctgaggtgcaggaactgtttgaaagtttttcagctgatgggcagaagctgactctgctggaatttttggatttcctccaagaggagcagaaggagagagactgcacctctgagcttgctctggaactcattgaccgctatgaaccttcagacagtggcaaactgcggcatgtgctgagtatggatggcttcctcagctacctctgctctaaggatggagacatcttcaacccagcctgcctccccatctatcaggatatgactcaacccctgaaccactacttcatctgctcttctcataacacctacctagtgggggaccagctttgcggccagagcagcgtcgagggatatatacgggccctgaagcgggggtgccgctgcgtggaggtggatgtatgggatggacctagcggggaacctgtcgtttaccacggacacaccctgacctcccgcatcctgttcaaagatgtcgtggccacagtagcacagtatgccttccagacatcagactacccagtcatcttgtccctggagacccactgcagctgggagcagcagcagaccatggcccgtcatctgactgagatcctgggggagcagctgctgagcaccaccttggatggggtgctgcccactcagctgccctcgcctgaggagcttcggaggaagatcctggtgaaggggaagaagttaacacttgaggaagacctggaatatgaggaagaggaagcagaacctgagttggaagagtcagaattggcgctggagtcccagtttgagactgagcctgagccccaggagcagaaccttcagaataaggacaaaaagaagaaatccaagcccatcttgtgtccagccctctcttccctggttatctacttgaagtctgtctcattccgcagcttcacacattcaaaggagcactaccacttctacgagatatcatctttctctgaaaccaaggccaagcgcctcatcaaggaggctggcaatgagtttgtgcagcacaatacttggcagttaagccgtgtgtatcccagcggcctgaggacagactcttccaactacaacccccaggaactctggaatgcaggctgccagatggtggccatgaatatgcagactgcagggcttgaaatggacatctgtgatgggcatttccgccagaatggcggctgtggctatgtgctgaagccagacttcctgcgtgatatccagagttctttccaccctgagaagcccatcagccctttcaaagcccagactctcttaatccaggtgatcagcggtcagcaactccccaaagtggacaagaccaaagaggggtccattgtggatccactggtgaaagtgcagatctttggcgttcgtctagacacagcacggcaggagaccaactatgtggagaacaatggttttaatccatactgggggcagacactatgtttccgggtgctggtgcctgaacttgccatgctgcgttttgtggtaatggattatgactggaaatcccgaaatgactttattggtcagtacaccctgccttggacctgcatgcaacaaggttaccgccacattcacctgctgtccaaagatggcatcagcctccgcccagcttccatctttgtgtatatctgcatccaggaaggcctggagggggatgagtcctgaggtgggcatttcacgggaagggttggtatgctggctttagacggggagaaacatctggaaggatgctcgagagaacaaatggaggtggtgaaaatcaagctttggattgtgcattcctaggcacaaaattacctcattcttcctaacaagcaatctgggacctgattttccaccttttttctcttttcttcccttcctttgttttcataagcctttggtatctttcctgcccttttcctttgtgtactctatactggagttcccttcttcctcttgctgtaggctcaatcccataccgacatctacaactaatctttcccatcaactctgtgtgaaggcaggttgcaactagaaattcagaggggcttggaatagagaaacctaaagaagcatcatcccctccatccccaacttcctcaaagcccaaagccaagggaaggataaatcaaggctcaaggcttccccagcaaagattagggaaagagacttgaccccaggactgtactacgactcttaagagaacactgcacagcactcaaagtcccccactggactgcttcctccttagccccactggtataaatacatctctctccaatttggcaaaaaaaaaaaaaaaaaaa

SEQ ID NO: 30947 - DNA, 2072 bp, Homo Sapiens
ctcacctcccggaggctctgctggtgcaggccccgcattggagggctcgattggctgcccggctggcactgacgtccccttggagctgggtggcagaggagataaacagccatgtgcaactctccacactatatttaacagctgcggcggagaaggcagggaggcagccacggtggcggctctgggggcagctcttgtcttcggggagaaggcccttggagccgggctggcatcggccttctcggggtgagcgaggtcaccatgccagcttcccagagccgggcccgtgcccgggaccgcaacaacgtcctcaaccgggctgagttcctgtccctgaaccagccccccaaggggggcccggagccccgcagctcgggcagaaaggcctcgggcccatcagcacagcccccacctgctggtgacggggccagagagcgacgccagtcacagcagctgccagaggaggactgcatgcagctgaacccctccttcaagggcatcgccttcaactccctgctggccatcgatatctgtatgtccaagcggctgggggtgtgcgctggccgggcggcgtcctgggccagtgcccgctccatggtcaagctcatcggcatcacgggccacggcatcccctggatcggaggcaccatcctctgcctggtgaagagcagcacactggccggccaggaggtgctcatgaatctgctcctggccctgctcctggacatcatgacggtggccggcgtgcagaagctcatcaagcggcgcggcccgtacgagatgagccccagcctcctggactacctcaccatggacatctacgccttcccggccgggcacgccagccgcgccgccatggtgtccaagttcttcctcagccacctggtgctggcggtgcccctgcgcgtgctgctggtgctctgggccctctgcgtgggcctgtcccgcgtgatgatcggccgccaccacgtcacggacgtcctctccggctttgtcatcggctacctccagttccgtctggtggagctggtctggatgccctccagcacctgccagatgctcatctctgcctggtgaagcgcccgccggcccacacaagcctctgggggcagggctggccctagagaaggggcagggggtggcgaggtggcgggcgtgggtggaacagagcggccaggagtcagagcggccacccccacctcatcttcccctcctggctggaggctggcgaacccaggccacccctcccggagacaagcgtgtttggcagtgccaggcctcttgcccctttgcttggactccaagtctcctctctgggcagccaggacccacccatggggacagccctatttagcttctgctctgggaacagcaaaaatcaggatggtgggaggggccgagtcttgtcttgtcctttcatcatcatgactgttgagttcttggctgtgcccatcacgccacagcacgacgcctgccaaaatgcccccaacctactgcctgatgcaggtgccattgccattagcggtcatcgacagcttagggcagcactttccaacgggtgcccatgggacaccagcctgcgagatgcttttgtgggaaaggggttttgtggttcaataactttcggaagtgctgcacactctgtccccaagttggacattcacaaaggccgttattgccgtaaaggctctgacaagccctatagaaaagcttcttgctaaaccttctttaacccatgttttctaaacttatttgaccacagaacccttttcttggggaacagctattaacccccaaggaattattggttcctcaagtgcgttttgggagctgctgccagagagctaaagggcctggggtgtgagctgactctccgctggggaggccgggtgcacacgccacagcccgaggaaagtgctggccaccgcccgtgggcatcgatgaggctttggcccccaggggccggactccgtgtgacctaataggtcgtttccaagtcacccgttttggatgtgcatttcatgtgacaatacagatgacatgcaaatggaaaaaaaaaaaaaaaaaaaaaa

SEQ ID NO: 30948 - DNA, 4653 bp, Homo Sapiens
catcttgcagccggcggcgcggattgaatgagcccgccgagcccgggccgccgtcgggagcagcgcaggccgcgagccgccgccaccatggccacgccgctgcccggccgcgcgggcgggcccgccacgccgctgtcgcccacgcgcctgtcgcggctgcaggagaaggaggagctgcgcgagctcaacgaccgcctggcgcactacatcgaccgcgtccgcgcgctggagctggagaacgaccggctcctgctcaagatctcagagaaggaggaggtgaccacgcgcgaggtgagtggcatcaaggcgctgtacgagtcggagctggccgatgcccggagagtcctggatgagacggctcgagagcgtgcccggctgcagatagagattgggaagctgagggcagagttggacgaggtcaacaagagcgccaagaagagggagggcgagcttacggtggcccagggccgtgtgaaggacctggagtccctgttccaccggagcgaggtggagctggcagctgccctcagcgacaagcgcggcctggagagtgacgtggctgagctgcgggcccagctggccaaggccgaggacggtcatgcagtggccaaaaagcagctggagaaggagacgctgatgcgtgtggacctggagaaccgctgccagagcctgcaggaggagctggacttccggaagagtgtgttcgaggaggaggtgcgggagacgcggcggcggcacgagcggcgcctggtggaggtggacagcagccggcagcaggagtacgacttcaagatggcacaggcgctggaggagctgcggagccagcacgacgagcaagtgcggctctacaagctggagctggagcagacctaccaggccaagctggacagcgccaagctgagctctgaccagaacgacaaggcggccagtgcggctcgcgaggagctgaaggaggcccgcatgcgcctggagtccctcagctaccagctctccggcctccagaagcaggccagtgccgctgaagatcgcattcgggagctggaggaggccatggccggggagcgggacaagttccggaagatgctggacgccaaggagcaggagatgacggagatgcgggacgtgatgcagcagcagctggccgagtaccaggagctgctggacgtgaagctggccctggacatggagatcaacgcctaccggaagctcctggagggcgaggaggagaggctgaagctgtcccccagcccatcctcgcgcgtcaccgtctcacgagccacctcgagcagcagcggcagcttgtccgccaccgggcgcctgggccgcagtaagcggaagcggctggaggtggaggagcccttgggcagcggcccaagcgtcctgggcacgggcacgggtggcagcggtggcttccacctggcccagcaggcctcggcctcgggtagcgtcagcatcgaggagatcgacctggagggcaagtttgtgcagctcaagaacaactcggacaaggatcagtctctggggaactggagaatcaagaggcaggtcttggagggggaggagatcgcctacaagttcacgcccaagtacatcctgcgcgccggccagatggtcacggtgtgggcagctggtgcgggggtggcccacagccccccctcgacgctggtgtggaagggccagagcagctggggcacgggcgagagcttccgcaccgtcctggttaacgcggatggcgaggaagtggccatgaggactgtgaagaagtcctcggtgatgcgtgagaatgagaatggggaggaagaggaggaggaagccgagtttggcgaggaggatcttttccaccaacagggggacccgaggaccacctcaagaggctgctacgtgatgtgaacccacactcctcatccacacacctttctttacccagagccactgaaaactatttttatatcattggctttctttagttcttgatacatttctagagaatttctaagcgaactgccagaacgtgtgggtgggtctcccccagccctccctcctggcgggtctcctccagcctcacttcgctgccacttcgccgctgccccggagacttttcaatcccaccccactcctcatctcaccatttggtcaaattggaagcccagggccaggacccggaggtttagaagatgcttgggcttggagggaggagggccggcgaggctagcgaggggacaggagacggccctgctgcggacggagcgcggaaactgcgtaggaattcagtggtggtgggtttttttaaggctttctacaaaaccaaattcagaatccaggcgtcgacctggtggggcccggggccaagcctgcattctggctgcccagcttcggacagcgggaactcctcaggcagccacgcagcgggtgtgggccagcatggggatggcgtggcccccagggcgggttttcactccgctgcctgggcttccagattcccgttctggcagcgcaccggccgggtttctcggaccgttgactttatttgggggagttttcccgcagttcagttcctgactgtgcaaggccaacagggcaggggaggggaagacctggggaaggaagaatgaggacagtcccgtcgtaagacctgtcacaacaataagcagggaggggagatgtggaggggacacatctggttgccttggaggcagaagctgtgagtttcagaacagctgtctgcagggaacgccaccatgttgaccctctggaggagagcgctgtggagcccctcccgtgttccagctccgtctgccctgtgcctatatatacacatgcgtctatccatactgtgcttttatctgtgattttctcgctgaaaccatgtttctcagacaggccaaggccacctgactcctatcacgacgcacccaagcccctcagtccagcttcccaatgcctggcaccccccttcggcaatagctcaccgtttacaccctccctcatagatacacagaagttatttttttaatggatatttatttttttacattggtcagtacacaggtcaggagctcacgccagggccttgaggacaggctgaccctcctccccggggtggcgtggggctggggcaccctccgacggcagagcctccttcagaaagtgcagctcaagtcttaaagacaccaaaactgagccatgggcacgcgccgtctccgggccatggcgttcactgcagggcgggggcggcaccgctcccctgtgactgcatcccgcctccctggggacctgcctgtggcaggaaggaatggggggccccagccccaggccgggaaggagccagcggccgacaaagcagaaacacccgctgctccacgtagcccctgctcgctgtccttgctctcagaagtcccggtcccatgtagatagaggggggcgcatcttaccaaagcatttcctcctggaggctacgccgctgtgctcccagtcaggcggctggtagggagctttgcctgccccggggataccctctgccagccgctggaagtgggaatgctggcgacagactgtgtcctctttcccaccttcatagcaggaatcacccggacccgactggctgggcttcgtgctagcgagggttctgggggtgggtcttggtgatcttgtcctatggggagtctgcagtggtctcagccacatcctatgtattttggctctggaggagcaaagctgtatcctggagttggtctgtgatttgccgacagccttgcaggctgggctcagggacaaagtcccccccaaaacccgcaggtcctcatgtccagacgctgcccagtcctgtcctgaaaacagcacgccccaggcccacagaaccccccaccctacatttgccttgggtggagctgggggtggtcctaggactgcgggtgcccttagctgaagggggtggggagaagcgtggactgggcagcctgtgggtaattggaggttcattgagaattgagtctttggaaacactaagaaaatcaaatttttaaaagttatttatggcctgggaaacaatttgcatttgtccccaaatacgcttagctgtgtgccgcttagaacgatgcgaaaccatccctctgtgtaagcccgtgccgtgtgactcgaagcctagcgccctccctgcgaagcatcagacgccacccagccctggggggaggcccacgcctgctggaccaacgcgggttctggggtgcacagcgccaggttaacgctgaagcctgccccgctgagcccaggagccgggaggcctgcgggctgacccagaatccgatcatgcacctgtcctcatgccagcggctttggctggggttggtctgaagcctgcacgcggcagttctttgttaaagatctgagggactcctcagtcctggggcgtcgccgcctgcagcctcttccaagccctgcgtccagcgagcgtcacagcacaacctgcaaaaacggagctgggctgcagctggggctggcatggactttcatttcagagattcggtttttaagaagatgcatgcctaatgtgttcttttttttttccaatgatttgtaatatacattttatgactggaaacttttttgtacaacactccaataaacattttgattttaaaaaaaaaaaaaaaaaaa

SEQ ID NO: 30949 - DNA, 2824 bp, Homo Sapiens
gaacttttttaaaaattaaatttttattttgagatcactgtttgtgttcagttgtaagaaacaagagagattctgtgtaccctttacccattcctccatgttgcaaaactagcacaatatcaccgccacggtagacgcagtgaggccataagacatttccgtcagcaaaagggtcacttcttgtgcccctttagaaccacacccacccctgccttccaactattaatgctggcaggacttagccagaccgcaagggcgcctactccgaacaaggaagagggtcaggcgctgggagggcgactgcaagcggacaggcagcacctgcgaccacggtacttggggacaccacaaaagtccgcagagcaggcaccgcggcacttccgcgagcgccgcaggccctgcccctttcgccgtcgccgaccaattgccgcccgaagaccgaaccgcttcagcggagggccggaagtgagccgcagcttttcctttctgccaccgccttgtccaagatggcggacctccaccgccagctgcaggagtacctggcgcaggggaaagctggcggcccggcggccgcggagccgctgctcgccgcggagaaggcggaggagcccggggaccggccggcggaggagtggctgggccgcgcgggcttgcgctggacgtgggcgcggagccctgcggagtcggcagcggccggcctgacgtgcctcccgagcgtgacgcgcgggcagcggctggcggcgggcggcgggtgcctgctgctggctgcactgtgtttcggcctagccgcgctctacgcaccggtgttgctgctgcgcgcgcgcaagttcgcgctgctctggtcactgggctcggcgctggcgttggcgggaagcgcgctgctgcggggcggcgcggcgtgcggacgcctgctgcgctgcgaagaagcgccgtcccggcccgcgctgctctacatggcagcgctgggcgccacgctgttcgccgcgctgggccttcgcagcacgctgctcacggtgctgggcgcgggcgcgcaggtggccgcgctgctggccgcgctggttgggctgctgccctggggcggcggcaccgcgctgcgcctcgcactgggtcgcctgggccgcggcgccggcctcgccaaggtgctgcccgtgtgaggacctcgcgccctcgccgctggggaagtacgcggagccagcgccgtcggagaccgcgccggccgagctgaggactgcacgccgctgtgcggaagcccgtggcgaaggccctgccctaacagcctgcgagtctaatccgggagcggctgctgccagcggaggcgacagcagcgttgggagctcctcgatgtcagctttttgtgctggacttggcacacgctctgaaaactgagattttgtcattgaactggtgacaggatgtgagacggttattagaagttgctttcgaagtaactgtggtcttaggttcggctgagtaaagaaaaaggatttttcttcgagttagctgctcttgtgatttttctcaggctgttttgtcattttaaaatccagtggtagatgtagcttagcgacggtagttttttgttttggctatactaagacttggaaattattctctccagtgtcagcgaatccagaagggtatcagattaaacaccgaattcagccactggacttttaaaagtacttaagatggtttatctcgggttttttcttcagttaacaaaatcataaatatggtgccttataacatgaaaggaaaattagttgtgtatttcacgacgaaagcgacggaccaaaagaaatttcctgccccaagaagcatgggatccaggaaggggcgcgtagatgcttaacggtctcttcggaaatcctgcaaatagaaagataattctagatccggaatacctgtatctggtggaaaccatggatttctacaagctcgaattattcctcattgtatagcctgctttgtaaactagtttacaatttgcaggctgatcttaagatttttttatatctaattgctgctgccttcattttaggttcagcagttacttttaactaccttaatttattgccagaaggtatgagcctaacattctgatgagtccagaaaactacgttttgtcagtagcaatacactaggaagtaaaatatatttagaatttaaacattgtgtgccagtggtcctcgcgcttgactgcacatcagttacttgaagagccacacctcagatcaatgcagtcagaacctgggaagtaggtcccagacatcaggacctttttaaagctccccaagtgattctacgttccccaagtttgaggaccacttttctgtgcattggcttgcacaatttgaaaataatgcttttcctgagctggatcccagtgttgccttaacagggtgtctgtcgtgccgcagtagagcactgctgcttcctccaaccccaaaatttatgttcctaagtaagtcaggtccctaagccccgtcccaagaagtgacacaagtggccaacatccacactgtaggcttgcaggctacccgccctgagatttggtaaagaacactgccttgttccccatcagtaaacaaggttacctacctcaggaggctgcttgtgagagagcaaatgcagtatcttcagaatgatttatttttttaattaattgtaaagacttgtgccattggctgctctttctagtcccctaaatttctgttctagttttaaatttctctagaacttgcaatagttgggggttttataatgatgttttacaatgtttatttcttaaataaaaacttaaaaattcaaaaaaaaaaaaaaa

SEQ ID NO: 30950 - DNA, 2453 bp, Homo Sapiens; identical to SEQ ID NO: 25522

SEQ ID NO: 30951 - DNA, 2255 bp, Homo Sapiens
attttcaccctgctccaggcagcgtggtctgtatggctccgccctgggcaggaggagaaagaagagggccaggcaccacgtgcctgcactctccctggatgctggaggctgctccgccgtgggcaggaggagaaggaagagaactgggtgccgcctgcctgcactctctccggatgctggaggctggaggcagtgaggcagcaacagcgcgggggcgaggcgactttggagctgcctcatgcagcgacctcgccttccgctgcgcctcctcccagaacccaagaagcctggaacctgtggcgtccagccctgaaaggaggaggcggcaacccagccgcgcttttgcctgcactctccctggatgctggaggctggaggcagtgacgcagcaacagcgcgaggcgactttggagcggcctcatatagcgacctcgccttccgctgcgcgtcctcccagagcccaagaagcccggaacctgtggcatccatctctgaaaggagaagacggcaacccagccgaggcactactgggttggggtctccacgaccgagctggtctcatcaagtggcgtccaacaaggggctcaaacccgggttgaggggttgctggagcgacggagaacgtggaactacactggaggacaccagagtactcttaagcaatcccttggccaaaaccagcaactgatttggataccatcaagacacctgaaatcttgtcatgagccagatactgaggaagagattttgggaagaacccaaggaccccccagttgcagccatgtcaagactgacaataaggaagacatcagtcccagcaagcaacattcatcgggcacagccacccgtgtggggccagatcaagaagttgacacagatggcggaagaaaatctgaagaaagcggatgaccagctacaatgagtaatctaatgtctgcagatgtggatcccgaatcctgcgagaagtagcccaccatgacgaagctgcctttgcttttatcgctttgcaaaaacagaaaaggggacatgctgggaacaggccctaagcctgtcataaacaggccttaaactgaccatgaacaggatttctgcacgaatgtgacgtgctcctgatggctatgacgcccactgctagaagttgttagtttactggagcagggtagggaacacctggcccacccggagcggaaaactgctcaaaccacaaacaacagcatgagtggcctgagccttaacaacatgtttttgctgcagataatcggccagagactgtttctctactcctctctaagtatgctttgtttttcgtaaggaatgcttttagctaatctgtaacctatagaaacaatgcttatcactggcttgctgtcaataaacatgtgggtcaaactctgtttgtggctctcagctctcaaggctgttttccccctgattcccactttgcactttatttctgtgtgtttgtcttcattcctctagcaccactgggttggggtctccttgaccaagctggtctcggcacatatgcatgtatgcccaggtcctgaaatcagccttgtggagcctgtgggtaggaaaagtcaaccctctgtgcatgtaggcctggaacctgaccaatactgtattttcctaccacgtttggtttcaaatgtggaaactgcccatacggacctactgcatttgtttttaaaaatcctctgtaagtggacctgcacagttcaggcccagattgttccaggatcaaccctacagtagaaatcaagtatctttttcattgtctcttgggatctgccttttcaccaataaaatatgagggctgttgggagcaggcccccccaaatctggccataaactgtccccaaaactggccataaacaaaatctctgcagcactataacatgttcataatggccataacgcccaagttggaaggttgtggatttacaggaatgagggcaaggaacacctggcctgcccagggtggaaaaccacttaaaggcattcttaagccacaaacaatagcatgagtgatctgtgccttaagaacatgctcctgctgcagttaactagcccaacatattcctttaattcagtccatcccttcgtttcccataagggatacttttagttaatttaatatctatagaaagaatgctaatgactggtttgctgttaataaatacgtgggtaaatctctgtttggggctctcaactctgaaggctgtgagacccctgatttcccacttgacacctct

SEQ ID NO: 30952 - DNA, 2798 bp, Homo Sapiens
ccgcgagccgcccggcactcccgcagtccagccggctcctctagcccggccacggctccgctgcgggccacccaggattactcgcgtctggctccaggcgccgagaaggcgcgctgggcgcccgtggccgccgcgccagctcctcctcctcccgctgctcctgctcccggggcgagcgcgcagccccgagcccgccccgcgcctcccggagccctcccccccgctgctcccatgcgcgcgggtgggtcatgagcacagcgccctcgctttctgccctaagaagcagtaagcacagcggcggcggcggcggcggaggcggaggcggcggtgcagaccctgcctggaccagcgcgctctctggaaatagctccggccccggcccaggctcgtccccggccggcagcaccaagccttttgtgcacgccgtgcccccctctgaccccctgcgccaggccaaccgcctgccaatcaaggtgctgaagatgctgacggcacgaactggccacattttgcaccccgagtacctgcagcccctgccttccacgccggtcagccccatcgagctcgatgccaagaagagcccgctggcgctgttggcgcaaacatgttcgcagatcgggaagcccgacccctcgccctcctccaaactctcctcggttgcctccaacgggggcggcgcgggcggtgccggcggcggtgctgcgggcgacaaggacaccaaatcgggccccctgaagctgagcgacatcggcgtggaggacaagtcgagtttcaagccgtactccaaacccggctcggataagaaggagccgggaggcggcggtggaggcggtggcggtggcgggggcggcggcgggggtgtttcgtcggagaagtcgggattccgggtaccgagcgccacctgccagccattcacgcccaggacaggcagcccgagctccagcgcctcggcctgctcgccgggaggtatgctgtcctcggccgggggtgccccggagggcaaggacgacaagaaagacaccgacgtgggcggcggtggcaagggcaccgggggcgcctcggccgaagggggacccacggggctggcacacggccggattagctgcggcggcgggattaatgtggatgtgaaccagcatccggatgggggcccgggaggcaaggctctgggctcggactgcggcggttcatcgggctccagctccggctccggccccagcgcgcccacctcctcctcagtgttgggctctgggctggtggctcccgtgtcaccctacaagccgggccagacagtgttccctctgcctcccgcgggtatgacctacccaggcagcctggccggggcctacgccggctacccgccccagttcctgccacacggcgtggcacttgaccccaccaagccgggcagcctggtgggggcgcagctggcggcggccgcggccgggtctctgggctgcagtaagccggccggctccagtcctttggccggagcgtctccgccgtccgtgatgacagccagtttgtgccgggacccttactgcctcagctaccactgcgctagccacctggcaggggcggcggccgccagcgcttcttgcgcacatgatccggctgctgcggctgcggcgctgaagtccggatacccgctggtgtaccccacgcacccgctgcacggtgtgcactcctcgctaacggccgccgcggctgctggcgccacaccgccctccctggccggccaccccctctacccctacggctttatgctccctaacgacccactcccccacatctgcaactgggtgtcggccaacgggccgtgcgacaagcgcttcgccacgtccgaagagctgctgagccacttgcggacccatacggcatttcccgggacagacaaactgctgtcgggctaccccagctcgtcgtctctggccagcgctgccgcggccgccatggcttgccacatgcacatccccacctcgggcgcaccgggcagccctgggacgctggcgctgcgcagcccccaccacgcgctgggactcagcagccgctaccacccctactccaagagcccgcttcccacgcctggcgcccccgtgccggtgcccgccgccaccggaccgtactactccccctacgccctctacggacagagactgaccaccgcctcggcgctggggtatcagtgagggcggccgggagggcgagcgagggagaggagggagagggggaggggaggagtccagggagaggcgggatcacggcccaggctgctgacacccgcgcgtggggaggactcgggccacgaaaggaaagaaatgtataccgtatctatctacccgacagcagcgaccgagacccggtgggacactccccttctccccactttcacctccccacccaaactttataaaagttgaaaaaatatcatttgactttttatagaaaaaaaaaggaaaaaataattgagaaagtgttcatctgaggactgcatcggtggacactggtatttatttatgttagctccaagcggaccggtggttcaaaagtgcattatttagtttgagctctgtaggtaaaaaggaggtgggaaaaattttaaaacttgagggtaaaaatgtggaaaacaaaccctcccatcccttgtagattataaataaaagcaaaaccgccacagaactagaggtcttctctttaatgttactttaaaattgctatgattgtattgtacgttatttaatgtctgattgaaacacaaatttacatgcatgtttgttacaaaaaaaaaaaaaaaaaaa

SEQ ID NO: 30953 - DNA, 2277 bp, Homo Sapiens
gggaaatggcggccgcgggcttggtcgctgtggcagcggctgccgagtactctggcacggtagcgtcgggaggtaacctccctggtgttcactgcggcccaagctccggggcaggccctggttttggcccgggctcgtggagccgctctctcgatcgagccctggaggaggcggcggtcactggggtgctgagcctgagcggccggaaactgagggagtttccccggggagcggccaaccacgacctgacggacaccacccgggcggacctgtcgcgaaatcgcctttcagaaattcctatagaagcatgtcactttgtttctctggaaaatctcaacttgtaccaaaattgtattcgttatattccagaggcaattttaaacctacaagctctaacattcttaaatattagtcggaaccaactgtcaacattgccggtacacttgtgtaatttgccattgaaagtcttaattgctagtaataacaaattggtgtcacttccagaagaaattggacaccttagacatttgatggaacttgatgtgagctgcaatgaaattcaaactataccttcccaaattggtaacctggaggccttgagagaccttaatgtaagaagaaatcacctagtacatttgcctgaagagctggcggagttgcctttgatacggttagacttctcatgcaataaaattaccacaatccctgtttgttatcggaacctcaggcacctacagacgatcaccctagataacaatccactacaatcacctcctgcacagatatgtataaaaggcaaagtccacatatttaaatacctgaacatacaagcttgtaagattgctccagatctgccggattatgataggagaccgttgggttttggctcctgccatgaagaactgtactcaagtcgcccttatggagcccttgattcaggcttcaatagtgtggacagtggtgataagagatggtcagggaatgaacctacagatgaattttcagatctgcctcttcgagtagcagagattactaaagaacaaagactacgaagagaaagccagtaccaagagaaccgcggcagtttggtagtaacaaacggcggagtggaacatgatctggatcagattgactacatagacagctgcaccgcagaggaagaggaggccgaggtgagacagcccaagggaccagacccagacagccttagttcacagtttatggcgtatattgaacagcggcgaatctctcatgagggttcaccagtaaagccagtagccattagggagtttcaaaaaacagaagatatgagaagatacttacatcaaaacagggttccagctgagccatcttccctcctgtcactatcagcaagtcacaatcagctgtcacacacagacctggaacttcatcagagaagggagcagttagtagagcgcactcggagagaggctcagcttgctgccctgcagtatgaggaggagaaaataaggaccaagcagatccagagagatgctgtcctggactttgtcaaacaaaaagcatcacaaagtccacaaaaacagcacccgctcctagatggcgtagatggtgagtgccccttcccatccagaaggtctcagcacactgatgatagtgccttgtgcatgtcgctgtcagggttgaatcaagtgggctgtgctgctaccctgcctcattcttctgccttcacgcctcttaagagtgatgacagacctaatgctctattaagttcacctgcaacagaaacagttcatcattcccctgcatattcttttcctgctgctatccagagaaatcagcctcagcgccctgaaagcttccttttccgagcaggtgtcagggcagaaaccaacaaaggtcatgcttcaccccttcctccatctgctgcacctaccactgattctacagattccataacaggacagaattcaagacagagagaagaagagctggaattaatagaccaactgcgtaaacatattgagtaccggttgaaagtgtctctaccttgtgatctcggagcagctctaactgacggtgttgttctttgccatttggccaatcatgtgcgacctcgatctgtcccaagcattcatgttccctcaccagctgtagtaagttgataatcctaaaaagccttggctattcatcagacatttgttaagcacagtggacagacatttcttaagcattgtgctagatattaaggatacagatataaagagtccagtctctacaaaaaaaaaaaaaaaaaaa

SEQ ID NO: 30954 - DNA, 5680 bp, Homo Sapiens
gggcgatgggttgatgggcgccgggggacgcaggatgcggggggcgcccgcgcgcctgctgctgccgctgctgccgtggctcctgctgctcctggcgcccgaggctcggggcgcgcccggctgcccgctatccatccgcagctgcaagtgctcgggggagcggcccaaggggctgagcggcggcgtccctggcccggctcggcggagggtggtgtgcagcggcggggacctcccggagcctcccgagcccggccttctgcctaacggcaccgttaccctgctcttgagcaataacaagatcacggggctccgcaatggctccttcctgggactgtcactgctggagaagctggacctgaggaacaacatcatcagcacagtgcagccgggcgccttcctgggcctgggggagctgaagcgtttagatctctccaacaaccggattggctgtctcacctccgagaccttccagggcctccccaggcttctccgactaaacatatctggaaacatcttctccagtctgcaacctggggtctttgatgagctgccagcccttaaggttgtggacttgggcaccgagttcctgacctgtgactgccacctgcgctggctgctgccctgggcccagaatcgctccctgcagctgtcggaacacacgctctgtgcttaccccagtgccctgcatgctcaggccctgggcagcctccaggaggcccagctctgctgcgagggggccctggagctgcacacacaccacctcatcccgtccctacgccaagtggtgttccagggggatcggctgcccttccagtgctctgccagctacctgggcaacgacacccgcatccgctggtaccacaaccgagcccctgtggagggtgatgagcaggcgggcatcctcctggccgagagcctcatccacgactgcaccttcatcaccagtgagctgacgctgtctcacatcggcgtgtgggcctcaggcgagtgggagtgcaccgtgtccatggcccaaggcaacgccagcaagaaggtggagatcgtggtgctggagacctctgcctcctactgccccgccgagcgtgttgccaacaaccgcggggacttcaggtggccccgaactctggctggcatcacagcctaccagtcctgcctgcagtatcccttcacctcagtgcccctgggcgggggtgccccgggcacccgagcctcccgccggtgtgaccgtgccggccgctgggagccaggggactactcccactgtctctacaccaacgacatcaccagggtgctgtacaccttcgtgctgatgcccatcaatgcctccaatgcgctgaccctggctcaccagctgcgcgtgtacacagccgaggccgctagcttttcagacatgatggatgtagtctatgtggctcagatgatccagaaatttttgggttatgtcgaccagatcaaagagctggtagaggtgatggtggacatggccagcaacctgatgctggtggacgagcacctgctgtggctggcccagcgcgaggacaaggcctgcagccgcatcgtgggtgccctggagcgcattgggggggccgccctcagcccccatgcccagcacatctcagtgaatgcgaggaacgtggcattggaggcctacctcatcaagccgcacagctacgtgggcctgacctgcacagccttccagaggagggagggaggggtgccgggcacacggccaggaagccctggccagaaccccccacctgagcccgagcccccagctgaccagcagctccgcttccgctgcaccaccgggaggcccaatgtttctctgtcgtccttccacatcaagaacagcgtggccctggcctccatccagctgcccccgagtctattctcatcccttccggctgccctggctcccccggtgcccccagactgcaccctgcaactgctcgtcttccgaaatggccgcctcttccacagccacagcaacacctcccgccctggagctgctgggcctggcaagaggcgtggcgtggccacccccgtcatcttcgcaggaaccagtggctgtggcgtgggaaacctgacagagccagtggccgtttcgctgcggcactgggctgagggagccgaacctgtggccgcttggtggagccaggaggggcccggggaggctgggggctggacctcggagggctgccagctccgctccagccagcccaatgtcagcgccctgcactgccagcacttgggcaatgtggccgtgctcatggagctgagcgcctttcccagggaggtggggggcgccggggcagggctgcaccccgtggtatacccctgcacggccttgctgctgctctgcctcttcgccaccatcatcacctacatcctcaaccacagctccatccgtgtgtcccggaaaggctggcacatgctgctgaacttgtgcttccacatagccatgacctctgctgtctttgcggggggcatcacactcaccaactaccagatggtctgccaggcggtgggcatcaccctgcactactcctccctatccacgctgctctggatgggcgtgaaggcgcgagtgctccataaggagctcacctggagggcaccccctccgcaagaaggggaccccgctctgcctactcccagtcctatgctccggttctatttgatcgctggagggattccactcattatctgtggcatcacagctgcagtcaacatccacaactaccgggaccacagcccctactgctggctggtgtggcgtccaagccttggcgccttctacatccctgtggctttgattctgctcatcacctggatctatttcctgtgcgccgggctacgcttacggggtcctctggcacagaaccccaaggcgggcaacagcagggcctccctggaggcaggggaggagctgaggggttccaccaggctcaggggcagcggccccctcctgagtgactcaggttcccttcttgctactgggagcgcgcgagtggggacgcccgggcccccggaggatggtgacagcctctattctccgggagtccagctaggggcgctggtgaccacgcacttcctgtacttggccatgtgggcctgcggggctctggcagtgtcccagcgctggctgccccgggtggtgtgcagctgcttgtacggggtggcagcctccgccctgggcctcttcgtcttcactcaccactgtgccaggcggagggacgtgagagcctcgtggcgcgcctgctgcccccctgcctctcccgcggccccccatgccccgccccgggccctgcccgccgccgcagaggacggttccccggtgttcggggaggggcccccctccctcaagtcctccccaagcggcagcagcggccatccgctggctctgggcccctgcaagctcaccaacctgcagctggcccagagtcaggtgtgcgaggcgggggcggcggccggcggggaaggagagccggagccggcgggcacccggggaaacctcgcccaccgccaccccaacaacgtgcaccacgggcgtcgggcgcacaagagccgggccaagggacaccgcgcgggggaggcctgcggcaagaaccggctcaaggccctgcgcgggggcgcggcgggggcgctggagctgctgtccagcgagagcggtagtctgcacaacagccccaccgacagctacctgggcagcagccgcaacagcccgggcgccggcctgcagctggaaggcgagcccatgctcacgccgtccgagggcagcgacaccagcgccgcgccgctttctgaggcgggccgggcaggccagcgccgcagcgccagccgcgacagtctcaagggcggcggcgcgctggagaaggagagccatcgccgctcgtacccgctcaacgccgccagcctaaacggcgcccccaaggggggcaagtacgacgacgtcaccctgatgggcgcggaggtagccagcggcggctgcatgaagaccggactctggaagagcgaaactaccgtctaaggtggggcgggcgacgcggtagacgggctggccacgcggctcgttcccccgctcctcggggccctccaaggtgtctccgtagtcagcaggttggaggcagaggagccgatggctggaggaagcccacaggcggatgttccccacttgcctagagggcatccctctggggtagcgacagacaatcccagaaacacgcataatacatttccgtccagcccggggcagtctgactgtcggtgccctcccaggaacggggaaggcctccgtctgtgtgaaagggcacagcacatcccaggtgcaccctccccaagtactcccaccccgcctactgtccatgcggcctcactgggggccatcagcctcaccagcaaagcagagatgagagcgtgggaactgtgttctttcctccctgccctctactgatttcagcccagcccctgcctagatcctaggtcccttttcctcccgagtttggctggcacgagagctagcccagcacatgaagcaggtgatgttaagtcacaaggtgctgcttttcagatccactatgcaagaggggagggtggggccacgtgaaaggcagctctagacatcaaccagtcctgggggaggggagtgggaaccgggcacaactaggaacaatgccaccattcccacaggagtggtacttaaaccagacagcagggttcagaggtggcacaccgggacaaagctgaggccctgcacctcaacagctgactgccaggtgcctgtgggtgaactgaggggagtagagggagagggcaggtggaactggggcagaatctagtcatgccctaaagctagtcctgtaaacaatggtgccccagaaagctgcaggtggtgtttggagaagcagttacttttcagttacaagacccatctccctagtctcagccttacaacaccacgggactaaggaagagcacttccttgcctccgtaaggccagaggaagaaccatcccaatcatttgatctccagctccacagtagagagaaacctacaaaatgtcaaaccagcttcccgactcccaggagctcaagccaagcccagaggcagtggctggggtccctgcaggtcatgaggggcctatgcctttactccttttaaacaccagcacccgtcttttccccaacctaaaaccaaccaccagcatttcactacaggaccaaatggaaaccgagggaaccctgggtcttgggaagaacaacaggaaaccaaggtctgacctagggttccctcccagtcttcacatcactctggcctcatcaccaaggtgacagaggacacaggggagggggaaaacccacacacactccttggaatgggtcctgttatttatgcttgctgcacagacatattagaagaaaaaaaaaagctttgtattattcttccacatatgctggctgctgtttacacaccctgccaatgccttagcactggagagctttttgcaatatgctggggaaaggggagggagggaatgaaagtgccaaagaaaacatgtttttaagaactcgggttttatacaatagaatgttttctagcagatgcctcttgttttaatatattaaaattttgcaaagccctttgagctacaaaaaaaaaaaaaaaaaaaaaaaaaaaaaaa

SEQ ID NO: 30955 - DNA, 3070 bp, Homo Sapiens
acttttttcatgttctccttgagtgaaggatgaggaaattgaaagcagagtatgcaccttttattaggagattcaaactgcatcctactggattagcctcaaaagtcctaaaatacaaagacatccatctgacagatcactgaggggaggacttgtttttctgttttagaatagtttccgattaaactttttagctcaagaagaaaagaagctagttatttctcacccaggagtggatttgtggtttggcttcaccatggcttcctgccgtgcctggaaccttagggtgctggtggctgtcgtgtgtggactactgactggcatcattttgggactgggcatctggaggattgtgatcaggatccaaagaggaaaatctacttcctcatcaagcacccctacagagttctgcaggaatggtggaacctgggaaaatggcagatgtatttgtacagaagagtggaaaggactgagatgtacaattgctaatttttgtgaaaatagtacctatatgggttttacttttgccagaatcccagtgggcagatatggaccatccttgcaaacatgtggcaaggatactccaaatgcgggcaatccaatggcagtccggttgtgcagtctctctctatatggagagatagaattacaaaaagtgacaataggaaattgcaatgaaaatctggaaaccctggaaaagcaggtagaggatgtcacagcaccacttaataacatttcttctgaagtccagattttaacatctgatgccaataaattaactgctgagaacatcactagtgctacgcgagtggttggacagatattcaacacttccagaaatgcttcacctgaggcaaagaaagttgccatagtaacagtgagtcaactcctagatgccagtgaagatgcttttcaaagagttgctgctactgctaatgatgatgcccttacaacgcttattgagcaaatggagacttattccttgtctttgggtaatcaatcagtggtggaacctaacatagcaatacagtcagcaaatttctcttcagaaaatgcggtggggccttcaaatgttcgcttctctgtgcagaaaggagctagcagttctctagtttctagttcaacatttatacatacaaatgtggatggccttaacccagatgcacagactgagcttcaggtcttgcttaatatgacgaaaaattacaccaagacatgcggctttgtagtttatcaaaatgacaagcttttccaatcaaaaacttttacagctaaatcggattttagtcaaaaaattatctcaagcaaaactgatgaaaatgagcaagatcagagtgcttctgttgacatggtctttagtccaaagtacaaccaaaaagaatttcaactctattcctatgcctgtgtctattggaatttgtcagcgaaggactgggacacatatggctgtcaaaaagacaagggcactgatggattcctgcgctgccgctgcaaccatactactaattttgctgtattaatgactttcaaaaaggattatcaatatcccaaatcacttgacatattatccaacgttggatgtgcactgtctgttactggtctggctctcacagttatatttcagattgtcaccaggaaagtcagaaaaacctcagtaacctgggttttggtcaatctgtgcatatcaatgttgattttcaacctcctctttgtgtttggaattgaaaactccaataagaacttgcagacaagtgatggtgacatcaataatattgactttgacaataatgacatacccaggacagacaccattaacatcccgaatcccatgtgcactgcgattgccgccttactgcactattttctgttagtgacatttacctggaacgcactcagcgctgcacagctctattaccttctaataaggaccatgaagcctcttcctcggcatttcattcttttcatctcattaattggatggggagtcccagctatagtagtggctataacagtgggagttatttattctcagaatggaaataatccacagtgggaattagactaccggcaagagaaaatctgctggctggcaattccagaacccaatggtgttataaaaagtccgctgttgtggtcattcatcgtacctgtaaccattatcctcatcagcaatgttgttatgtttattacaatctcgatcaaagtgctgtggaagaataaccagaacctgacaagcacaaaaaaagtttcatccatgaagaagattgttagcacattatctgttgcagttgtttttggaattacctggattctagcatacctgatgctagttaatgatgatagcatcaggatcgtcttcagctacatattctgccttttcaacactacacagggattgcaaatttttatcctgtacactgttagaacaaaagtcttccagagtgaagcttccaaagtgttgatgttgctatcgtctattgggagaaggaagtcattgccttcagtgacgcggccgaggctgcgtgtaaagatgtataatttcctcaggtcattgccaaccttacatgaacgctttaggctactggaaacctctccgagtactgaggaaatcacactctctgaaagtgacaatgcaaaggaaagcatctagacagtaaaacttacctgttgtggtctttttaatcacctcgtttgagttttatctgtttctctcctttatttcccagtcctctcagaaagtcttcctcaatgtattttgctcaggattaagaattagataaaacctgttgtttattattattcggcataatggacttggtagtttttctatttttcaatagatttgtacttgaataaggtgaagaatttcacacaacatacaagagtaccattgttccttatatcgttaaatctttgtgacacactttgacaaaaatgtagaacctataacaaattcttttacaagttactataaaggacacaaagagaaaactttaccttccagaacaaaatgactcctgatgaacagtgtgtggggatttgcttgtatgtattaaacttttgacctctg

SEQ ID NO: 30956 - DNA, 3877 bp, Homo Sapiens
ggaggaaagtgtgccatggcggagcctgtggggaagcggggccgctggtccggaggtagcggtgccggccgagggggtcggggcggctggggcggtcggggccggcgtcctcgggcccagcggtctccatcccggggcacgctggacgtagtgtctgtggacttggtcaccgacagcgatgaggaaattctggaggtcgccaccgctcgcggtgccgcggacgaggttgaggtggagcccccggagcccccggggccggtcgcgtcccgggataacagcaacagtgacagcgaaggggaggacaggcggcccgcaggacccccgcgggagccggtcaggcggcggcggcggctggtgctggatccgggggaggcgccgctggttccggtgtactcggggaaggttaaaagcagccttcgccttatcccagatgatctatccctcctgaaactctaccctccaggggatgaggaagaggcagagctggcagattcgagtggtctctaccatgagggctccccatcaccaggctctccctggaagacaaagctgaggactaaggataaagaagagaagaaaaagacagagtttctggatctggacaactctcctctgtccccaccttcaccaaggaccaaaagcagaacgcatactcgggcactcaagaagttaagtgaggtgaacaagcgcctccaggatctccgttcctgtctgagccccaagccacctcagggtcaagagcaacagggccaagaggatgaagtggtcttggtggaagggcccaccctcccagagaccccccgactcttcccactcaaaatccgttgccgggctgacctggtcagattgcccctcaggatgtcggagcccctgcagagtgtggtggaccacatggccacccaccttggggtgtccccaagcaggatccttttgctttttggagagacagagctatcacctactgccactcccaggaccctaaagctcggagtggctgacatcattgactgtgtggtactaacaagttctccagaggccacagagacgtcccaacagctccagctccgggtgcagggaaaggagaaacaccagacactggaagtctcactgtctcgagattcccctctaaagaccctcatgtcccactatgaggaggccatgggactgtcgggacggaagctctccttcttctttgatgggacaaagctttcaggcagggagctgccagctgacctgggcatggaatctggggacctcattgaggtctggggctgacaccccactccctgtttgacggcccagcctggacttggggagaatgactttcccttttttgccccataagggctagcataagctgaggtagaacttatctttaagctgcagcaaaatcaaggagtgacttttgtcccctctcctgttgaccctggtttagagccgttaaccacttggtgagttatgtgggtgttgttgccctgggtggcctgtggctccgtccacaagtcatgctgagttttgcagcctctgtgacttggagatgtcccttcacccctcccctttcaccaccatcctcttttcctcatggaaatgtctgctttatgaaactatgcacatattgaaagtgagttgaaacaaatgagggttgggtaggagcttccaggcctgggatttacaccacgcctagcccagcagaggccttagtcccatttggggcttgggagtgacatttgcttgaggcttatacactggtgtggttgcctggcttgcaggaaatgaccaagctcacacatgctggctgaagcgtaagcagacaactgaggtactcttttgaaggatgaaggtggtggattctcagccctgggggtcttcctcacctgaggacccttcagagccaccctttctagtttgcatttcctggtgcacacatttaaggcataacagcacattcatccctttggtttgggatctcaggaatacagtcccatgcaaagattctctggttttatggcttttttccctttctttacaccatcctctcccataagcacccatgtctttgaatatgaatgtatttgtaaaataccacgtttcatgtgtgaatatgtgcttttactgtacatagtgctattgtgcaataggtcttatgctgttttcactcaatgtgtgctaagatctagccccattgactcttctagaaatgcagtattgctttgacctgccatgtggcactccacaatgtcaattgcagtttacacacattgcctaaagtgggggacacctgggtgcccctgaccccttggcaccggatacaggccacgataaacatcctttcgtgtgttcccttctgtgcttgtgtggcatgtgtacccaggatgggcctataggtcacagaggtcagtttctctttggttttccagattttctttagaacggtgactgaccctcctacttgaggccgcccttttctccttatccttgccagcacttgtattgccagactacctaatttttgccagtctcatgggtagatagtggtgcagtgctttaacatacattcatctgatcagcattaatttggggaattttttcacttagcctttctggtttcccttcctgtgcattgcccattttctcatggagtttcttatcttttttggtttattctcaggagttgcttgtacattcttgggcaattgcagataattccaagaatgcatatttgggctgggtatggaggttcactggtaatcccagcactttgggaggcccaggcagaaggatcgctgcagcccaggagttcgagactagcctgggcaacatagcgagacctcgtctctacaaaaaaaaattaaaaagggggctttgggaggccaaggcgggcagatcatgagggcaggagattgagaccctcctggccaacatggtgaaaccccgtctctactaaaatacaaaaaattagctgggcatggtggcgcacacctgtagtcccagctactctggaggctgaggcaggggaatcgcttaaacccaggaggcggagattgcagtgagccaaggttccaccactgcactccagcctggcgacagagcaaggctccactcaaaaaaaagatttaaaggggaaaaaattgaaattttctttgtatctaggggtatccgtcactgaacagaaattcttaattttggctaggcgtgatggctcaggtctgtaatcccagcactttcggtggccggggtgggtggatcacttgaggccaggagttcaagaccaccctgaccaacttggtgaaatcccatctctactaaaaatacaaaaattagctgggtgcagtggcgcatgcttgtaatcccagctactcaggaggcagaggcaggagaatcacttgaacccgggaggtggaggctgcagtgaacagagacagtgccactgcacatcagcctgagtgacagagagactttgtctcaaaaaaaaaagaaaattttaattttaatgtagacagtatgaattatcttgttctgcagttggttgctttttgattgcttatttaatagagttgttaagatattttacatcttctcctgttagctgttcagcttttcctttcatattgagaacactacacagtgctgaagtccagctggtacacaccggggtgacaccttggctgcatctgttctcaacagtcagacacttcttctaattggttgatgctgggctgtactggttgctaaatattgcacatcattttaaaactatttgagatgcacttttgtactcaggaggccaaggcaggaggattgcttgagcccaggagtttgagaccagcctgggcaacacagcgagaccttgtctcttaaaaaaaaaaaaaaaaaaaaa

SEQ ID NO: 30957 - DNA, 2609 bp, Homo Sapiens
cctgcggcgggctttagggagtggtccctggctgtggatagatctgctgatgagtccaggccccggtccattctcctcgcgctgcaaggatgctcctgggatttcggagaggccgcaggagtcatttcaaacacatcatccatggccttttacctgcagccagcgttgctccgaaggcagctgtgccacgcacacctcctccccgcagccccaacccatctccagagagaccaagatctgctctggcagcagccattctggcgacaacattgactgggcggacggttgctattcctcagcctcgccagaggtcccggtctgagagtgatgtgagcagtgttgaacaggacagcttcatcgagccctatgccaccacctcacagctgaggcctcggccaaattggcagagtgagatgggaagaagatcttctttgccatcctttgaaacactggactatggggacgaagaggacattgaaactcagctgtcatccagcggcaaggaattgggggatgtcagtgcccgggaggacagaggaggccacagtgatgacctgtacgctgtgccacacagaaatcaggtgccattgttacatgaggtgaacagtgaagacgatgaaaatatttctcatcaagatgggtttccaggctcccctcctgcaccacagcggacacaacaaaaagatggtaaacaccctgttctgaatttaaaggatgaaaaacctccattatgtgagaaacctccaccctccccagatataactggtagagcacgtcaaagatatacagaaataaccagagaaaagtttgaggcattaaaagaagaaaatatggacctaaacaatatgaatcaaagccttacccttgaactaaacacaatgaaacaagcaatgaaagaactacagttaaaacttaagggaatggaaaaagagaagagaaagctcaaagaggctgagaaggcgtcgtcacaggaagttgctgcacctgaattactttatctgcgaaaacaagctcaagaactggtggatgaaaatgatggattgaaaatgactgtccatcgtttgaatgtagaactcagtcgatatcagacaaaattcaggcatttgtccaaggaagagagcttaaatattgaaggcctcccatccaagggccctataccaccctggttgttggatataaagtacctgtcaccattgttgctggcttatgaagatatgatgaaagagaaggacgagctcaatgccaccctcaaggaggaaatgagaatgtttaggatgcgagtccaagaagtggtgaaagaaaatgaagaattgcaccaagagttaaataagagtagtgctgttaccagtgaggaatggcgtcagcttcagactcaagcaaaactggttttagaggaaaacaagttgttgctggagcagttggagattcagcaaaggaaagccaaggacagccaccaggagcgcctccaagaagtttctaagctgactaaacaactaatgctcctggaggcaaaaacccacggccaggaaaaggagctggcggagaacagggaacagctggagattttacgtgccaaatgccaagaactcaaaacacactcggatggcaaaatcgcagtggaagttcataaatcaattgtgaatgaattaaaaagccaattacagaaggaagaagagaaagaaagggctgagatggaggagttgatggagaagctgacagtcctgcaagcgcagaagaagagcctgctgttagagaagaacagtttgacagagcaaaacaaagcactggaagccgaacttgaacgagcacagaaaatcaataggaaatctcaaaagaaaattgaggtcctcaaaaagcaggtggaaaaagccatggggaacgaaatgtctgctcatcagtacctggcaaaccttgttggcctggcagaaaatataacccaggaacgtgacagtcttatgtgtttggcaaaatgtttagaaagtgagaaggatggagtgcttaataaagtcataaaaagcaacattcgcctgggaaagttagaggaaaaagtcaagggctacaagaagcaggcagcactgaagctgggggacatcagtcaccgtctgctggagcagcaggaggacttcgccggcaagacagcccagtaccggcaggagatgcggcacctgcaccaggtgctgaaggacaagcaggaggtgctggaccaggcgctgcagcagaacagagaaatggaaggtgaacttgaagttatttgggaatctaccttcagggaaaaccgaagaatccgagaacttctccaggacacactcacgaggacaggcgtgcaggacaaccccagagctctggttgcccccagcctcaatggcgtctctcaggcagacctgctggacggctgcgatgtctgctcctatgacctgaagtctcatgcccccacctgctagaatctgcgggagcccgtggtgtagcctcctctggcctgaaaggtctgcctcacacaggccttccctgcagggcagcccatggtggcagccggaggtgcgtaagcccactgaacgctgcagggcagggaagaaataaatggtctcatagtttaatccattgataaaaaa

SEQ ID NO: 30958 - DNA, 3554 bp, Homo Sapiens
gtggcccctgagtgctgggtgggaccgcggtgactgaacctagaaggtggagaggaatcgtcctcggtgcccagaggcggctctgcagccccgtgacggcgaccactgctcccgggccgtgcttccccaagtagtccgatggcagcggctgtgccgaggcgcccaactcagcagggcactgtgacctttgaagatgtggctgtgaacttttcccaggaggagtggtgtcttcttagtgaggctcagaggtgcttgtaccgtgatgtgatgctagagaacctggctctcatatcctcgctgggttgttggtgtggatcaaaagatgaggaggcaccttgtaagcagagaatttctgtacaaagagagtctcagagcaggactcctagggcaggtgtttctcctaagaaggctcacccctgtgaaatgtgtggcctcatcttggaggatgtttttcactttgctgaccaccaggaaactcatcacaagcagaagctgaacaggagtggagcatgtggaaaaaacttggatgacactgcataccttcatcagcaccagaagcagcatattggagagaaattctacagaaagagtgtcagagaagcatcgtttgtaaagaaacgtaagctcagggtgtcacaggagccatttgtcttccgcgagtttgggaaggacgttctgcccagttcaggattgtgccaagaagaagctgctgtagagaagacagacagtgaaactatgcatggcccaccctttcaggagggaaaaactaattacagttgtggaaaacgcacaaaagccttcagcaccaaacactcagttattccacaccagaaacttttcactagagatggatgttatgtgtgcagtgattgtggaaaatcctttagcagatatgtcagcttcagtaatcatcagcgagatcacactgcaaaaggaccttatgattgtggagagtgtgggaaatcttatagtcgaaagagcagccttattcaacatcagcgagtccacactggacagacagcttatccctgtgaggagtgcgggaaatcttttagtcagaagggcagccttattagccatcagcttgttcacactggagaagggccttatgagtgtagagaatgtgggaaatcttttggtcaaaagggtaacctcattcaacatcagcaaggtcacactggagagagagcttatcactgtggggaatgtgggaaatcttttcgtcagaagttctgctttattaaccatcagcgtgttcacactggagaaaggccttacaagtgtggagaatgtgggaaatcttttggtcaaaagggcaacctcgttcaccatcagcgaggtcatactggagaaaggccctatgagtgcaaggaatgtgggaaatcatttaggtacagatcccacctcactgaacaccagagacttcacactggggaaagaccttacaattgtagggaatgtgggaaattatttaacaggaagtatcatcttctagttcatgagagagttcacactggagaaaggccatatgcgtgtgaggtatgtgggaaattatttggcaataagcacagcgtgactatacatcagaggattcacactggagaaaggccgtatgaatgcagtgaatgtgggaaatcatttctttccagctctgcgcttcatgttcataaaagagttcattctggacaaaagccttataagtgcagtgaatgtggaaaatccttttctgaatgttccagtctcattaaacacaggagaattcacactggagaaaggccttatgaatgcaccaaatgtggaaaaacatttcagcgaagctctaccctccttcatcatcagagttcacacaggagaaaggccttatgagtacacaccaccacgcccagctaatttttgtgtttttagtggggatggggttttaccatgttggccaggctggtctcaaactcctgacctcaagtgatccacccgccttgactcccaaagtgctgaaattacaggcatgagcctctgcacctggccttcattcttttcgtattgcttagaatatgacatgctgaaccaggcatggtggctcatgcttgtaaacctgatgctttgggaggacaaggtggttcattggaggccaggagttggagatcagcctgggcaacatggccagacctcctctctacaaaaagaaaaaagaatgacatgcttcttgtttttgtctgttataaatgaaactgctatatttgaatgcagttgttcatgtaggtatgtttcactatggtaatatggtggtgtgcagtgcctgagtcacgtgatagattaaagtacaactcttttttgagacagagtctcactctgtcacccaggcgggagttaggtggcatgatttcggctcactgcaacctctgcctcccaagttcaactgattcttctgcctcagcctcccgagtagcagggattaccggtgtgcaccaccatgcctggataacttttttttttatttctattagcaatggggtttcaccatgctggccaggcttgttatgaactgacctcaagtgatctgcctgcctcagcttctcaggtgtgacctactgtgcttggcctaatgtacaactttttaagcaatgccaaactatgacttaagaatgaaattattgctcatttgtatatctatctaccatcagtgtccaagaatttctgttctatcttaccaagagggagtatggttagtatttgaaattgtttattattttaataagtggttataacttttgagtcagtggtttatgttttgcattttttttgttttgagacagagtctcgctctgtctcccaggctagagtaccgtggcacaatctcggctcattgcaacctctgcttcctgggctcaagcactctgcccacctcagcctccagagtagctggaaatacagtgccacccagatagcctcacaaaactttgacccagccactgttagtgtcgccaccgcccataaaggagctgagcccagcaggggcactgcctggggccctgtagccaaaaggctacagcaggagctgatgaccctcatgatgcctggtgacaaaagaatttctgcctaccctgaaagccttatcaaatggacaccatccatgaagcagctggcacagtgtatgaagatctgaggtataagctcttgctggagttcctcaatgactacccacctttacgatgcacccacagtgaagttcctcacaccctgctaccaccctaacgtggacacccagggtaacatatgcctggacatcctgaaggagaagtggtctgccccgtatgatatcaggaccatcctgctctctatccagtgcctgctaggacaactcaacattgatagccctttgaacacacatgctaccaagctctgggaaaaccccatagctttaagaagtacctgcaagggtcaggcgcagtggctcacacctgtaatcccagcactttgggaggccgaggtgggtggatggatcacctgacgtagagagtccaaggcctgacaaacatggagaaatgtcatccctattt

SEQ ID NO: 30959 - DNA, 3142 bp, Homo Sapiens
ctaagcagcaagccacgcacctcccgcgctggcgaaatccgagacccgccccttccggaagttttgacactttgtgcgccccgggcaatgcgattgagagggtaatcatccggtccgttatctaaacccgtcactccgggaaacagcgacccgatctttccggatccgcgctctcccagcatcctttgccttccggtatgtggccccgtctggctagtcccgcctagcgcgcccatttcgagcccaagtttccagctcgggtttccaggctcagaattttccaggagtaggttcttgggcagtggctgtgggagctggaatggcgcagctggaaggttactatttctcggccgccttgagctgtacctttttagtatcctgcctcctcttctccgccttcagccgggcgttgcgagagccctacatggacgagatcttccacctgcctcaggcgcagcgctactgtgagggccatttctccctttcccagtgggatcccatgattactacattacctggcttgtacctggtgtcaattggagtgatcaaacctgccatttggatctttggatggtctgaacatgttgtctgctccattgggatgctcagatttgttaatcttctcttcagtgttggcaacttctatttactatatttgcttttctgcaaggtacaacccagaaacaaggctgcctcaagtatccagagagtcttgtcaacattaacactagcagtatttccaacactttatttttttaacttcctttattatacagaagcaggatctatgttttttactctttttgcgtatttgatgtgtctttatggaaatcataaaacttcagccttccttggattttgtggcttcatgtttcggcaaacaaatatcatctgggctgtcttctgtgcaggaaatgtcattgcacaaaagttaacggaggcttggaaaactgagctacaaaagaaggaagacagacttccacctattaaaggaccatttgcagaattcagaaaaattcttcagtttcttttggcttattccatgtcctttaaaaacttgagtatgcttttgcttctgacttggccctacatccttctgggatttctgttttgtgcttttgtagtagttaatggtggaattgttattggcgatcggagtagtcatgaagcctgtcttcattttcctcaactattctactttttttcatttactctctttttttcctttcctcatctcctgtctcctagcaaaattaagacttttctttccttagtttggaaacgtagaattctgttttttgtggttaccttagtctctgtgtttttagtttggaaattcacttatgctcataaatacttgctagcagacaatagacattatactttctatgtgtggaaaagagtttttcaaagatatgaaactgtaaaatatttgttagttccagcctatatatttgctggttggagtatagctgactcattgaaatcaaagtcaattttttggaatttaatgtttttcatatgcttgttcactgttatagttcctcagaaactgctggaatttcgttacttcattttaccttatgtcatttataggcttaacatacctctgcctcccacatccagactcatttgtgaactgagctgctatgcagttgttaatttcataacttttttcatctttctgaacaagacttttcagtggccaaatagtcaggacattcaaaggtttatgtggtaatatcagtgatatttcgaactgtgaaaatggacttaataattagaccatttctacaaagaacaactgaataggtggaaaacatggaatttcttttaggtgcagtggtggtcttcaaattacattagttttttttatatatattttaaacatatgtaagaaattaagtggcaaagaactgagaaagcttaagacctgcttcaaaagcctgaaaaatggaaaaataaaattgttttcagatatctcatatcactctcataatgttggccccttaaaaagcttgggaatgttttgtatgtacaagtttattaaaactgggtatgcttcatattactggaatgaatttattctcttcagagagaaatattaggttggtgcaaaagtaattgtggtttttgccattgaaagtaatggcaaaaccacaattacttttttaccaacctaataacaatgtattagcaaatatttacaaatggtcaggtgatattcttgattgaaaagttgcttaacatttcagtaatataattttaattctaagtcaaaatacaaatgcatagatagtaaatgataaagtagagactcattatgcctgtctagacatcaaattgttggttattgtttacaatctagaaatgatgaagctctttcactaattcctaatatgaaatgtatgatggccaaagacaaattgtattgattataatcctttaaaagggggatttcctttctgaaatacatattgtattagcttcccagggcttccataacaaatgacgacaaacttgggtgcttacaacaattttcctcacagtctggaggccagaagtctaaaatcaaagtgtcagcagagttggttccttctggaggctctaaggaagaatccataaacagacattctatgtctgtttcctaatatcttgtggctgtgtgcaattcttggagttctttggcttctggacaaatcttgtccaagtattgcagacagcaatcttcactccagtctctgcctctgtgttcacacggcctttccctctgtcttctcttcattaccttttaaggacagtgtctttgaatgtagggcccaccctgatctagggtgattgtgtctggagacccttaattatgtttacaaagacccatgttccaagtaagtttgtattcacatgatctgagtagacattgtctcttcgtgggatacttttcagtccatgacagttactaaaggacattttaggatagtcttcatatgattgttaggagactacctttttagattttttttattatatatcaaattatagttgtatatacttatgagaaacaaagtggcattatgatttttgaatataatgtgggattaaataaagctaatctatccatcacctcaaaaaaaaaaaaaaaaaa

SEQ ID NO: 30960 - DNA, 2106 bp, Homo Sapiens
accaggcgcggtccggaggccgagggcgaccacagcagcctccgcctcctgctgctccggactattctgcgctgggctagtcggcggtgacccggactgcgcccggcagtggcttcgcgggcgacgcgtcgccatgggctctcgctggagcagcgaagaggagaggcagccgctgctggggcccgggctcgggcctgggctgggggcctcctggagaagccgggaggcggcggcggcggcgctgcccgcggcggtcccgggtcccgggcgggtatacgggcgccgctggctggtgctgctgctcttctcgctgctggcgttcgttcagggcctggtctggaacacctggggtcccatccagaactcggcgcgccaggcctacggcttctccagctgggacatcgcgctgctcgtgctgtgggggcccatcggcttcctgccctgcttcgcgttcatgtggctcctggacaagagaggtctccggataactgtgctcctgacatccttccttatggttttgggaactggtctaagatgcatacctatatcagacttaatccttaaaagaagattaattcatggaggacagatgttaaatggattggcaggtccaactgtaatgaatgcagcaccatttctctctacgacgtggttttctgcagatgaaagggccacagccacagctattgcatcaatgctcagttatcttgggggagcatgtgcatttttagttggaccacttgttgttccagctcccaatgggacatcacctcttcttgctgcagagagcagcagggcgcatattaaagatcgcatagaggctgtgttatatgcagaatttggagttgtctgcttaatattttctgcaacactagcttatttcccaccccgacctcctcttcctcccagtgttgctgcagctagccagcggctgagttatcggagaagcgtttgtagattattaagcaattttcgatttttgatgattgctttagcatatgccataccacttggtgtatttgctggctggtctggagttctggacttaattttaacaccagcgcatgtcagccaagtagatgctggctggattggattttggtccatagttggaggctgtgttgttggaatagctatggcaaggtttgcagattttatcaggggtatgctgaaactaattcttctcctcctgttttcgggagctacactgtcatccacgtggttcaccctgacctgtttgaacagcatcacacacctacctttaaccacagtgacattgtatgcctcctgtattctcctgggagtgttcttgaatagcagcgtgcctatattttttgagctttttgtggaaactgtctacccagttccagaaggaattacttgtggagttgtcacttttttaagtaatatgtttatgggagtacttttattttttctcacattttatcatacagagttgtcttggttcaactggtgccttcccgggtcgtgtttgctcagtctcctcctcattctgtgcttcagggaatcctatgacagactctatcttgatgtggttgtctccgtttaatagcacagacttgaaggagtttaaaaggaggctggaaatcaatactgcacactgcacatttgctcagaattgcacatctaacaggaaaagagggagaagaaagaaacttcattcagaggttttgttaggttacagattatcacattaatttaattactactaggtaataataatgggagacttgagtgataataggggattttaaaactctacagatggcatacctgtgcctgcttctggggttggaagtgtgacttcttacacataaagcactacctaagtaattctctctctgttttgtgccagtgctaaactactgattacttgtaattatgaaaagaaataaagggtgtctatcatatgaagataacgccttccctaagtcacatatcagaataggaagatatgccactaacttctaaagaagttcaaaccctgtatccaattttaatgataaaatagccaagaggtatatcgatgatggaaattagccacatgtacactacattttttctaataaagccatttcttatatg

SEQ ID NO: 30961 - DNA, 2568 bp, Homo Sapiens
gcgaagctgagaggcctatggatgaggaggacgcggcggccccggtttgttctcatgaacaagatggatgacctcaacctgcactaccggtttctgaattggcgccggcggatccgggagattcgagaggtccgagctttccgatatcaggagaggttcaaacatatccttgtagatggagatactttaagttatcatggaaactctggtgaagttggctgctacgtggcttctcgacccctgaccaaggacagcaattattttgaggtgtctattgtggacagtggagtccggggcaccattgctgtggggctggtccctcagtactacagcttggatcaccagcctggctggttgcctgactctgtagcctaccatgctgatgatggcaagctgtacaatggccgagccaagggccgccagtttgggtcaaagtgcaactccggggaccggattggctgtggcattgagcctgtgtcctttgatgtgcagaccgcccagatcttcttcaccaaaaatgggaagcgggtgggctctaccatcatgcccatgtccccagatggactgttcccagcagtgggcatgcactccctgggtgaggaggtgcggctgcacctcaacgctgagctgggccgtgaggacgacagcgtcatgatggtggacagttacgaggatgaatggggccggctacatgatgtcagagtctgtgggactctgctggagtacttagggaagggcaaaagcatcgtggatgtggggctggcccaggcccggcacccactcagcacccgcagccactacttcgaggtggagatcgtggaccctggagagaaatgctacatcgccctggggctggcacggaaggactatcccaagaacaggcaccctggctggagcagagggtctgtggcttatcatgcagacgatgggaagatcttccatggcagtggtgtgggggacccctttgggccacgctgttacaaaggggacatcatgggctgtggaatcatgttcccccgggactacattttggacagtgagggggacagtgatgacagttgtgacacagtgatcctgtctccgactgcccgggccgtccggaacgtgcggaatgtcatgtacctgcaccaggaaggggaagaggaagaggaggaagaggaagaggaagaggatggggaagagatagagccggagcatgagggcaggaaggtggtggttttcttcactcggaatggcaagatcattgggaagaaggatgctgttgttccttctggaggcttcttccccaccattggaatgctgagctgcggggagaaagtcaaagtagatctgcaccccttgagtggctagggcctcccctccagacctgctccttctccctgctcaccctctgctgggccaggcacccagttcctgacttcccagaggcttcgtttacccagcaggcccctggaggtgtgtagtcactctgcccccactggctcaggcccctgtcacgcttctctgtgcccacgtttctgacctggtgctgccactgttgtcagtccctgggcctgagtccctggttggacaggaatggacccaaagaatggtgttggtatgtgggtggtcccactcgctttggtcagtgggcttctgggtccccctttccctcaccggccctgtgtgggtggagaggcgtgagcaccctatctcagctgctattcgggcatgatgctttgtagagggtagagtagacagccccctcccctactcaccatggtatttctccttgaattcctctttcttgttttctttcctggttgtgtgaaccagttgctgctgtcatacccctggcagggccaggggacctctctttggtcatctctgtcctttcactggctgctgccccaggaagactcctctaggctctccatctttcccttgagagctggctccccaccccaacctgctcaggcaccacagaggatctaggtctctggctccccatacctggacccacatgggtgggtgcctgttgcatgtttaagagagaggggctgtgaggtgacagggcactagggccttcactcctttctccccttccatcctttctttaccagtgccacccatgtccctagctcccgggtattggggctgaggctctggggcctgtctccctgccagcgtgagggcaagaccccagagccttagctgagcaagcccagaggggcagcgtggcccctccctccccttttcctgccccgtcccatgcctcagcttgctgcttgtgccagttgcctgtttcgcttcagtgtttgattctagcacttacatgtgtcctccccaccaagccctctatctccttctaatccttcaacccctggccccctccccgtaacagtgacttttccagggaggaagaggcagcaggagctgttggccttggtttgcacagagcgggtagggctgtagggaaagcgggtgagctgttgtgctgctgggcctccctttggccctcgcttcccaccctacgatgtatgaaatgtatgtacagaccagagatgtttatacagccgataaagatgg

SEQ ID NO: 30962 - DNA, 3324 bp, Homo Sapiens
aaggcgcgagcctgcgttttccggccagaggacatgatgcagggggaggcacaccctagtgcttcccttattgacagaaccatcaagatgagaaaagaaacagaggctaggaaagtggtcttagcctggggactcctaaatgtatctatggctggaatgatatatactgaaatgactggaaaattgattagttcatactacaatgtgacatactggcccctctggtatattgagcttgcccttgcatctctcttcagccttaatgccttatttgatttttggagatatttcaaatatactgtggcaccaacaagtctggttgttagtcctggacagcaaacacttttagggttgaaaacagctgttgtacagactacgcctccacatgatctggcagcaacccaaatccctcccgctccaccttccccttcaattcagggtcagagtgtgttgagttatagcccttctcgttcgcccagtaccagtcccaagttcaccaccagctgtatgactggttacagccctcagctgcaaggtctgtcctcaggtggcagtggttcttatagccctggagtgacctactcgcccgtcagtggttataataagttggcgagctttagcccctctcctccttctccgtaccctaccactgttggaccagtggagagcagtggattgagatctcgctaccgttcttcacctaccgtctacaactcacctactgacaaagaagactacatgaccgacctacgaactttggatacttttctcagaagtgaagaggagaaacagcatagggttaagctggggagcccagattctacctctccttccagcagtcctactttctggaactatagtcgttctatgggggattatgcacaaactttaaagaagtttcagtatcagcttgcctgtaggtctcaggccccatgtgctaacaaagatgaagccgatctcagctctaaacaagccgcagaagaggtctgggcaagagtggctatgaatagacaacttcttgatcatatggattcatggacagctaaatttagaaattggatcaatgagacaatattagtgccacttgttcaagagattgagtctgtcagcacacagatgagacgaatgggttgtccagagctacagataggagaggctagtattactagcttgaaacaagctgccctggttaaagcgcctctcattccgactttggacacaatcgttcagtatctagaccttactccaaatcaggaatacttgtttgaaaggatcaaagaactatctcagggaggttgtatgagctcatttcgatggaacagaggtggcgacttcaaaggacgaaagtgggatacagacctgcccaccgattctgctatcatcatgcatgtattttgcacctaccttgattccagattacctccacatccgaagtatcccgacggaaaaacttttacttctcagcactttgttcagacaccaaataaaccagatgttacaaatgagaatgttttttgcatttatcagagtgctatcaaccctccccattatgagctcatctaccagcgtcatgtatacaacctgccaaagggcagaaataatatgtttcatacattgttgatgtttctctacatcataaagaccaaagagtcaggaatgcttgggagagttaatcttggtctatctggtgtgaatatattgtggatctttggcgagtagcaagtcatatatttaattctgacatttagactatttcactgaaccagaagtcgaaactaaacatctctgagccactgactcttctgaaataaaatacacatgggtgtatgttacagactctttagatttaacagaaaatgtagctgttatgaaatgtaattgtaaaaatatgtcccgtatcttctatatcgagacattgcctttaattttatatcgcttttcagaaatttcagttgactacaaaactgcaacccttcggatttttattgactcaaaatagtgccattccccttaatgaaatagattttgagtctttttttcattgtaacccccaaatgagaatcatctacctgattcttgtaccaaaaaaaaatttttttcagtcttttttttttttagagagggtctctgtcaacgcagactggagtgcagtggcacgatcttagctcactacaacttctgcctcccaggctcaagcaattctcctgcctcagcctcctgagtagctgggattataggtgcgagccactgcgcccagcctcagttattttatttaacagtgtaagtacttagaaagtaagaaaattgctgatttagttttttttttttttttttttttaatgtttccccagcattctgcaagttaggccaaagcccacattcaaagaaatgagattaactcttaagtaatgtattaagtttatgtatattttaaaatattattaaaggaggtttgaaagtattgacatttaaaaagtcaacacttagattaaatttagctggtagttttaatttgggttttagttaagagtgtgaggacatcaggaaaactgtttactactttggttttagcagctcagttttactattccataatgtgttatttttaaagttctctttttaagatcacagtgatatcctatcttcaaattttttaaatatgttcaaaatatctggagggtgagaagttaccaagtttgtatgttttgtttgactcaccatctttattttctgtatatgtagtagctggcaattgcatatattttcttgattaacatattagagactgcttccatcatcttatgtaaacctggaaacagctgaaactagtcttttctgaagaaccgtgtatcagtgttagatgtgcatcccgttttgtcattccctcagactttgaatacagtcattactctctggaagagaaatgtaagtatattttttgttatctgcagtatggtttaacatgtattaataatacacatatgcagactcactaaagtatccccagtaattagtaaattccaaatttaagtcagtacagttctgtatttgtaaattctgtctttcaaaaagttgttcgtgtttttaaaagttgatgtccaaaggaaaggagcttcttttaagtacttttggtgtatgttgaatatttatttgctatgatattctagaagaaaatatcaaacatgttaaatataagaacatgttaaaatttaaatttgctatttcaaaagttactgaggatgtcttggaataacaattgtcatgctgttaaactagttgcatatacttcattaaaagcaccatggagaaacattttaacaatgc

SEQ ID NO: 30963 - DNA, 3084 bp, Homo Sapiens
agttggcgggaatggctgctcgcggaggggcagtgtacgcggggccgctgtaggctgtccagcgatggatcccaccgcgggaagcaagaaggagcctggaggaggcgcggcgactgaggagggcgtgaataggatcgcagtgccaaagccgccctccattgaggaattcagcatagtgaagcccattagccggggcgccttcgggaaagtgtatctggggcagaaaggcggcaaattgtatgcagtaaaggttgttaaaaaagcagacatgatcaacaaaaatatgactcatcaggtccaagctgagagagatgcactggcactaagcaaaagcccattcattgtccatttgtattattcactgcagtctgcaaacaatgtctacttggtaatggaatatcttattgggggagatgtcaagtctctcctacatatatatggttattttgatgaagagatggctgtgaaatatatttctgaagtagcactggctctagactaccttcacagacatggaatcatccacagggacttgaaaccggacaatatgcttatttctaatgagggtcatattaaactgacggattttggcctttcaaaagttactttgaatagagatattaatatgatggatatccttacaacaccatcaatggcaaaacctagacaagattattcaagaaccccaggacaagtgttatcgcttatcagctcgttgggatttaacacaccaattgcagaaaaaaatcaagaccctgcaaacatcctttcagcctgtctgtctgaaacatcacagctttctcaaggactcgtatgccctatgtctgtagatcaaaaggacactacgccttattctagcaaattactaaaatcatgtcttgaaacagttgcctccaacccaggaatgcctgtgaagtgtctaacttctaatttactccagtctaggaaaaggctggccacatccagtgccagtagtcaatcccacaccttcatatccagtgtggaatcagaatgccacagcagtcccaaatgggaaaaagattgccaggaaagtgatgaagcattgggcccaacaatgatgagttggaatgcagttgaaaagttatgcgcaaaatctgcaaatgccattgagacgaaaggtttcaataaaaaggatctggagttagctctttctcccattcataacagcagtgcccttcccaccactggacgctcttgtgtaaaccttgctaaaaaatgcttctctggggaagtttcttgggaagcagtagaactggatgtaaataatataaatatggacactgacacaagtcagttaggtttccatcagtcaaatcagtgggctgtggattctggtgggatatctgaagagcaccttgggaaaagaagtttaaaaagaaattttgagttggttgactccagtccttgtaaaaaaattatacagaataaaaaaacttgtgtagagtataagcataacgaaatgacaaattgttatacaaatcaaaatacaggcttaacagttgaagtgcaggaccttaagctatcagtgcacaaaagtcaacaaaatgactgtgctaataaggagaacattgtcaattcttttactgataaacaacaaacaccagaaaaattacctataccaatgatagcaaaaaaccttatgtgtgaactcgatgaagactgtgaaaagaatagtaagagggactacttaagttctagttttctatgttctgatgatgatagagcttctaaaaatatttctatgaactctgattcatcttttcctggaatttctataatggaaagtccattagaaagtcagcccttagattcagatagaagcattaaagaatcctcttttgaagaatcaaatattgaagatccacttattgtaacaccagattgccaagaaaagacctcaccaaaaggtgtcgagaaccctgctgtacaagagagtaaccaaaaaatgttaggtcctcctttggaggtgctgaaaacgttagcctctaaaagaaatgctgttgcttttcgaagttttaacagtcatattaatgcatccaataactcagaaccatccagaatgaacatgacttctttagatgcaatggatatttcgcgtgcctacagtggttcatatcccatggctataacccctactcaaaaaagaagatcctgtatgccacatcagaccccaaatcagatcaagtcgggaactccataccgaactccgaagagtgtgagaagaggggtggcccccgttgatgatgggcgaattctaggaaccccagactaccttgcacctgagctgttactaggcagggcccatggtcctgcggtagactggtgggcacttggagtttgcttgtttgaatttctaacaggaattccccctttcaatgatgaaacaccacaacaagtattccagaatattctgaaaagagatatcccttggccagaaggtgaagaaaagttatctgataatgctcaaagtgcagtagaaatacttttaaccattgatgatacaaagagagctggaatgaaagagctaaaacgtcatcctctcttcagtgatgtggactgggaaaatctgcagcatcagactatgcctttcatcccccagccagatgatgaaacagatacctcctattttgaaaccaggaatactgctcagcacctgaccgtatctggatttagtctgtagcacaaaaattttccttttagtctagcctcgtgttatagaatgaacttgcataattatatactccttaatactagattgatctaagggggaaagatcattatttaacctagttcaatgtgcttttaatgtacgttacagctttcacagagttaaaaggctgaaaggaatatagtcagtaatttatcttaacctcaaaactgtatataaatcttcaaagcttttttcatctatttattttgtttattgcactttatgaaaactgaagcatcaataaaattagaggacactattgagagtgagccactagcttgattttctttctcctctgatttcagttcactgttcagtttagcattaaaataataaaataatcatacagttcc

SEQ ID NO: 30964 - DNA, 2335 bp, Homo Sapiens
gaagaagatcggtagattgagtggctagagaggtcggaggtaagtggctatagaagtcgggcggacccggaacccagaggacgcgacaccatgacttatgcttatctcttcaagtatatcatcatcggagacacaggtgtggggaagtcatgtctcctcctgcagtttacagataagcggttccagcctgtccacgacctcacaataggtgtggagtttggagctcgtatggtcaacattgatggaaaacaaatcaaactgcaaatctgggatacggctgggcaagaatccttccgttctatcacccgttcctactacaggggagcagctggagcactgctggtgtacgacattacaaggcgtgaaaccttcaaccacctgacctcatggttagaggatgcccggcagcactctagttccaacatggttatcatgctcattgggaataagagtgacctagagtcccgcagggatgtgaagagagaagaaggagaggcctttgctagggagcatggacttatattcatggaaacttcagccaaaacagcctgcaatgttgaagaggccttcattaacacagccaaagaaatatataggaagatccagcagggtttatttgatgtccacaatgaggcaaatggcatcaagattgggccccaacagtcaatttcaacatcagtgggacccagtgcctcccagcggaactctcgtgacatagggtccaactctggctgctgctgaacatctggcttgaactttttttgtccttcctggaatagcttcagatcaataggcttaatgaaagaggtctttcttgctttggctgagagcagcctctttttaaagtgtgatgttttgcctttccacctaaagaccaggagagaatttgggcccttactgacctgtcctccttcagggacatgagcattccctatagattagggttcttcttatcctcctatacaaatttcttaaattgttaggaccaaagtgctggattacaggcgtgagccaccgtgcctggcctaaataaataatttcgtaagcatatacaatccacttcccactaagaattagggtcaaagacattctgcttgaacacttgcagttacctagatctagttggcctttggttgatagatcctctgcctcagaatttcattgagtttttttcttccttgcctttgggtgtctgcttgccacttcctaagaattcttgtagaaggcagtttcctctacttgcccaagagcactgagtacttctctactatcctattattagcttctatctcttagtgtaacttcaaaacttttaagagcagtgaagttggtcagggacatgtggccacttattattacctaaagaaaacatttgttccctgttcattttattttaggggccagatctaacattgtagtgtctttcaccagatagacttctactgtttcatcaaactcccttcttaactagacctagactttctactccaatcaggctaatctacttactgaatgtgacatatttattcctagttccatacctttgcacatgccctactctccactaattatacttaaaagtccaaaaattttttctttagtaacagacttaggtactgctaagcagttattaacacaatattccttagttttcatatgttggttattcatatgtctatttatatgtatatttatttttatgtatgttactatgtaaatatggtttgcagttgtttttgtgtggaatcttgtctttccgtataagttgtaagctccttgagagcaggatccatgtcattcctttatttttataaattattccccctatcattcctttacagtgcctagtgctgctcattatgtgttcattgaatttgactgacatagttaaaaacttaaggtttattttagactttcaaggaaacaaaagactttagagtcctctctctgtaattctgccccactcatttgtttaccctgggttttatacatttctcttccttctcccctcccacctttccctggctttttgcctccattccatgaggcatacagtaaggctgcctgctagtaagcagtcacataagtgggtacctatccagccattctcttttcagagcatataatactatcttagccaaacttgcctttgcttcactcatcatgcagccttctgggttggttgctatatatatcttttttccttgatgtcccattctcttccacagccctgaggtcttacgaatttttctactttctttttgctgttgatgaattgtttcattattaaatatatgcatgtaccaaaaaaaaaaaaaaaaaaaaaaaaaaaaaa

SEQ ID NO: 30965 - DNA, 1286 bp, Homo Sapiens
gcttcctcgttgcccccgccgcgggcgcgagatggattccgggtgctggttgttcggcggcgagttcgaggactcggtgttcgaggagaggccggagcggcggtcaggaccgcccgcgtcctactgcgccaagctctgcgagccgcagtggttttatgaagaaacagaaagcagtgatgatgttgaagtgctgactctcaagaaattcaaaggagacctggcctacagacgacaagagtatcagaaagcactgcaggagtattccagtatctctgaaaaattgtcatcaaccaattttgccatgaaaagggatgtccaggaaggtcaggctcggtgtctggctcacctgggtaggcatatggaggcgctggagattgctgcaaacttggaaaataaagcaaccaacacagaccatttaaccacggtactctacctccagcttgctatttgttcaagtttgcagaacttggagaaaacaattttctgcctgcagaaactgatttctttgcatccttttaatccttggaactggggcaaattggcagaggcttacctgaatctggggccagctctttcagcagcacttgcgtcatctcagaaacagcacagtttcacctcaagtgacaaaactatcaaatccttctttccacactcaggaaaagactgtcttttgtgttttcctgaaaccttgcctgagagctctttattttctgtggaagcgaatagcagtaatagccagaaaaatgagaaagctctgacaaatatccaaaactgtatggcagaaaagagagaaacagtgttgatagagactcagctgaaagcatgtgcctcttttatacgaaccaggcttctgcttcagtttacccaacctcagcaaacatcgtttgctttggagaggaacttaaggactcagcaggaaattgaagataaaatgaaagggttcagcttcaaagaagacactttgctgttgatagctgaggttatgggagaagatatcccagaaaaaataaaagatgaagttcacccagaggtgaagtgtgttggctccgtagccctgactgccttggtgactgtatcctcagaagaatttgaagacaagtggttcagaaagatcaaagaccatttctgtccatttgaaaatcagttccatacagagatacaaatcttggcttagtgggttataaaaaacaaaaccacaaatatcttgtactgtattaattgtccttgtttacttcagacaggatccattgctaatcatggagtataaatgattatttatgttttat

SEQ ID NO: 30966 - DNA, 1775 bp, Homo Sapiens
gtgcaaagtgctgggttctgggtttctggattcgcgggccgttcacacgtagcctgtgccggctcctcgggtgagtccgtccgcgcgcggtgccccgggacggcctaggctgccgggggtccggggccccaggcattccgggctgcagattgacggggatcccggatgcaccgcgcgcccccgcgccctcaccgacgggtccagacctggtgggaagaaggtgcggggacgggtccctgaggatcccgatgcctacgagccaagatgctcagctttataggtgtgacctacacatgtgacttcacctcagttttgtgatccgtaaaatggacaaattcgaagctacttcacagtgctgttgagaggattaaatgaaacaatgcttgtaaagctctttgcaggagggagcctcggaagcagggcctggccggcagagcacacctgctgtcaccagggaccacaggcagcatgaagacccccgtggagctggccgtcagtgggatgcagaccctcggccttcagcaccgctgccgaggtggctaccgggtcaaggccaggacgtcatatgtggatgagactctgtttggcagcccagcaggcacccggcctaccccaccggacttcgatccgccctgggtggagaaggctaacagaaccagaggcgtgggcaaggaggcatcgaaggccttgggggcaaaggggagctgtgagaccaccccctcaaggggcagcacccccaccctcacaccaaggaagaagaacaaatacagacccatcagccacaccccgtcttactgtgatgagtcgctgtttggctcccgatctgaaggcgccagcttcggggccccgcggatggcgaagggggatgccgcaaagctccgtgctctcttgtggacgccaccacctacccccaggggtagccactcgccccgccccagggaggcaccactgcgagccattcacccagctggtccctccaagacagagccggggccagcggcagactcccagaagttatctatgggtgggttacactcttcacgccccctgaagcggggactttcccattccctcacccacctgaatgtccccagcactggtcatccagccaccagtgccccccacacaaatgggcctcaggatctcaggccttccacgtcaggggtgaccttccggagccccctggtgacttccagggctcgctcagttagcatttcagtgccatctaccccacgacgaggtggggccacccagaaaccaaagcccccttggaaatgatactctttcatcagggttgcctatggggccacggcgacaggtatggccccttgccagggtaggaggacattcatcacccagggaaccccaggtattaaagaagcccctgtgggggcagacagacatagcaggggtgggcagtgcctccctttatcctgacaatctctagtcgattcttgcctttttctcccgattgcggatttgggggccacctctaagatgcctctctccagccctgtctcaaccatactccaaattagtgccaacccaggggcctggcacctcccacatcatccattgtcttgctgccaagtgcgaataaacggcgtgattgccaacctggagggtcccctcttatcccttcaagccaagcttcctgctcaggattagtttccagctaagtctgcaagccctagaggagtttttccaggctgtctgtgaagcctggggaacacaacggcaactgggagatttgtgagtgaacactgtttcatctt

SEQ ID NO: 30967 - DNA, 4179 bp, Homo Sapiens
ggcggaggcggtgagcgcgggcggcgcggacggcagcggttggcgggcgggtcctccgctgttgcggccgctgcggcctccttgcccgggcttggggcgccgcgctggggaaagccgggggcccggacacattggcgtgagacctgggagtacgttgtgccaaatcattgccacttgccacatgagtgtaaatgatggcggatgccaagtatgtcctctgccgatgggaaaagcgattatggcctgcgaaggttttggcccgaaccgcgacttcaacaaaaaataagagaagaaaggaatattttctagctgtgcaaatcctctctctagaggaaaaaattaaggtgaaaagcactgaagttgagatcctagagaagtctcaaattgaagccattgcttcctcgttagcctcacagaatgaggttcctgcggcacccctggaagaactggcctacagacggtcgcttcgcgtggctctggacgttctgagcgagggctcgatttggagtcaagaaagctctgcagggacaggtagagctgaccggtctctgcgagggaagcccatggagcatgtctcctcgccctgtgattcgaactcctcatctcttccccgcggagacgtgttgggcagttccagacctcacaggaggaggccatgtgtgcaacaaagcctgtcaagttcgttcacttgtgaaaaggaccccgagtgcaaagtggaccacaagaaggggctcaggaaaagtgaaaacccaagaggcccgttggtcctcccagctggaggtggtgcccaagatgagagtgggtccagaatccaccacaaaaattggactcttgcaagtaagaggggaggaaactcagcgcagaaggctagcttgtgcctgaatggatcttccctttcagaggacgacacggagagagacatggggagcaaaggaggcagctgggcagccccgtccttgccctccggggtcagggaggacgatccctgtgccaacgctgagggacacgaccccggtctgccgttgggcagcctcactgcgcccccagcccctgagccctcggcctgctcagagcctggagaatgccctgcgaaaaagaggccgcgcctggatggcagccaaaggccgcctgccgtgcagctggagcccatggcagcaggggccgcaccatcccccgggccggggccagggcccagagagtctgtgaccccgcgcagcaccgccaggctgggcccgcctccctcccacgcctctgcggatgcaaccagatgtcttccttgcccggattcccagaagctggagaaagagtgccagtcttccgaagagtccatggggtctaattccatgcgttctatcctggaggaagacgaggaagacgaggagccaccaagagtccttttataccacgaaccacgttcgtttgaagtaggaatgctagtctggcataaacataaaaaataccccttctggccagcagtggtcaaaagcgtcaggcagagagataagaaagcaagtgtgctatacatcgaaggacacatgaacccgaaaatgaaaggtttcacagtgtctcttaaaagtttaaagcactttgattgtaaagagaaacagacgcttctgaatcaagccagggaggacttcaaccaggacatcggctggtgtgtctccctcatcaccgactacagggtccggttaggctgcgggtcttttgctggctctttcctggaatattacgcggctgatataagctatcctgtccgaaaatccatccagcaggacgtcttggggaccaagcttcctcaactgagcaaggggagccccgaggagcccgtggtggggtgccccctggggcagaggcagccctgccggaaaatgctccccgaccgctcgcgggccgcccgggaccgggccaaccagaagctggtggagtacattgtgaaggccaagggcgcggagagccacctgcgggccatcctaaagagcaggaagccatctcgctggctgcagaccttcctgagctccagccagtacgtgacctgtgtggagacctacctggaggatgaggggcagctggacctggtggtgaagtacctgcagggcgtctaccaggaggtgggggccaaggtgctccagcgcaccaacggcgaccggatccggttcattctggacgtgcttctgcccgaggccatcatctgtgcgatctctgcggtggacgaggtggactacaagacggctgaggagaagtacatcaaggggccttcgctgagctaccgggaaaaagaaatatttgacaaccagctccttgaagagcggaaccggcgccgtcggtgagggagcagccggctgtgctgtcagcggggcctggcggtggaagcgcctccagtgtgcatgagcgtgtctgaagatggggggctcagggggcacgtttgcgtttggacctgtctgtgcgttctcctgcgtggcagtcctgatttccatgcttctggagaatccatttcgttaacactgaaagccagttctcttttcctggcagtttttttcattttatttttggcattttttacaagataccgttcgggaaaggcttttgaaaggacggaagcgtattcactgtgcgccagtactcctggctgtgctgtggtttctcccgacgtgcacatcgatctcgtatgtgtggcatctgatattaaacgggaggttttaagaagcgtctgccgtgatcatggagcttcggaagcgggaatggttcttccgggtttgctgttttgtctgtttcccccttgtgtggtttccgcctgcgacagttccagaatttgctctcccactcagtgtgctctgcagctgtgaggaaacagccttcgttagaggcgggagcagagacgagccgctgctctgtgtcgtgtttgctgtggccgcagggagaggagcaggacacgcacctttccaggggcctctgtgtcccgcactgtgtgtgagtggaccgcagcgcgcagccacatgccctggctgccatgggccagaccgcctccacctcccccgcccgcctggcctgtcctgagtgcatttccctgcactgtgtcgtcactgcacagccagtcaccgcggtctcagtcatcggcgcggatggctatgctggggtcccagggtggccgcagcagtcagggtcactgtgggagccctggggtggagtgacaaaccgcattgtcctgtgcccgccatggcagaagcgcagcctttgtatggaggcccaaccgcgctcccgtctggagaagcggcttccggggtgtggctgccgggtcggctctggtccacagcacggtgccggggctgcaggttgttgagggctgtgactccgtggggctcagccaggctccagcagggtcagacgtgctgttaagagcaaagccacagacgatgacttgtccattctcagtggatgctccaggctgtgcctacacagcagtgctggtgacatgtccagggttccagggcccggtggcctgggagctgctttctccccactggctgggctgcatctggccctggctggaggccttgctttgaggggctgtgaccctcttcccccaggccctccccagccgacgacagccaccggagaggagatcggaacacgattgtctcagatgcagggcgctgtgcgggacgaagccgcaaggactctcgtatcgggcccttgggactcgggaggtgccagaggcggcggctgctctggacctcggtgttcactgacctttgtttcacttgcctctgctcgactccgagagcaggaaacccggccgtggcctggcagctccgcctcccatgcccgcacgctggggtctgtcttgtctggagcagtggggcacaccccggaggaggcgggggtcagggctgtcggccttggccccctgctggtcgctgtttcggggactcggggcggccagtaccaccgcctgaggcggggctcagcagcgttgcatgtacgggcctcgtactgcctcatggaaaatcctccggagccgccctccattgtgggttcctgagagtaggacacattgccatggttttgtgggaatcacgcgcccctgatggaacttttctgctgttgtgaagtacttttatccatttgcttctctgctgaccttgccaagttgttcgaggtggaattaaacacctcccagac

SEQ ID NO: 30968 - DNA, 4179 bp, Homo Sapiens; identical to SEQ ID NO: 30967

SEQ ID NO: 30969 - DNA, 4179 bp, Homo Sapiens; identical to SEQ ID NO: 30967

SEQ ID NO: 30970 - DNA, 333 bp, Homo Sapiens
atgagcgtgtctgaagatggggggctcagggggcacgtttgcgtttggacctgtctgtgcgttctcctgcgtggcagtcctgatttccatgcttctggagaatccatttcgttaacactgaaagccagttctcttttcctggcagtttttttcattttatttttggcattttttacaagataccgttcgggaaaggcttttgaaaggacggaagcgtattcactgtgcgccagtactcctggctgtgctgtggtttctcccgacgtgcacatcgatctcgtatgtgtggcatctgatattaaacgggaggttttaagaagcgtctgcccgtga

SEQ ID NO: 30971 - DNA, 1956 bp, Homo Sapiens
gtgcgtgagtttggtggcggccggctgtgcagagacgccatgtaccggctcatgtcagcagtgactgcccgggctgccgcccccgggggcttggcctcaagctgcggacgacgcggggtccatcagcgcgccgggctgccgcctctcggccacggctgggtcgggggcctcgggctggggctggggctggcgctcggggtgaagctggcaggtgggctgaggggcgcggccccggcgcagtcccccgcggcccccgaccctgaggcgtcgcctctggccgagccgccacaggagcagtccctcgccccgtggtctccgcagaccccggcgccgccctgctccaggtgcttcgccagagccatcgagagcagccgcgacctgctgcacaggatcaaggatgaggtgggcgcaccgggcatagtggttggagtttctgtagatggaaaagaagtctggtcagaaggtttaggttatgctgatgttgagaaccgtgtaccatgtaaaccagagacagttatgcgaattgctagcatcagcaaaagtctcaccatggttgctcttgccaaattgtgggaagcagggaaactggatcttgatattccagtacaacattatgttcccgaattcccagaaaaagaatatgaaggtgaaaaggtttctgtcacaacaagattactgatttcccatttaagtggaattcgtcattatgaaaaggacataaaaaaggtgaaagaagagaaagcttataaagccttgaagatgatgaaagagaatgttgcatttgagcaagaaaaagaaggcaaaagtaatgaaaagaatgattttactaaatttaaaacagagcaggagaatgaagccaaatgccggaattcaaaacctggcaagaaaaagaatgattttgaacaaggcgaattatatttgagagaaaagtttgaaaattcaattgaatccctaagattatttaaaaatgatcctttgttcttcaaacctggtagtcagtttttgtattcaacttttggctataccctactggcagccatagtagagagagcttcaggatgtaaatatttggactatatgcagaaaatattccatgacttggatatgctgacgactgtgcaggaagaaaacgagccagtgatttacaatagagcaagattttatgtttacaataaaaagaaacgtcttgtcaacacaccttacgtggataactcctataaatgggctggtggtggatttctgtctacagtgggtgaccttctgaaatttgggaatgcaatgctttatggttaccaagttgggctgtttaagaactcaaatgaaaatcttttacctggatacctcaaaccagaaacaatggttatgatgtggaccccagtccctaacacagagatgtcttgggataaagagggtaaatatgcaatggcgtggggtgttgtggaaaggaaacaaacgtatggttcgtgtagaaagcaacggcattatgcttcacatactggaggggcagtgggtgccagtagtgtcctgctggtccttcctgaagaactggatacagagactataaataacaaggttcccccaagaggaatcattgtttctatcatatgtaacatgcaatctgttggcctcaatagcaccgctttgaagattgcccttgaatttgataaagacagatcagactgataaccttaacaccataggtgcaaaatgagttgttctgaggtttttttgaaacattaaagttccaaaacatgacatttttaagaataaatttgaaatagagtataactgaatgcagagaattatgtacctctaattgcttaattttgtaatggtcttttattgtagaattggttctttatactcagggaagtaattatattgtttttactttttgaaaaaagtgttaactcttgaaataaaatattctgataaaataaaaaaaaaaaaaaaaaa

SEQ ID NO: 30972 - DNA, 5316 bp, Homo Sapiens
gggagcggagacggagaacaggttatgtgggagccggcgggggcatttgccggcgacacccgagcgggggccggaagtggggccacagctcgcagcaggagctccgggctagaccgtggcgccggcagcggcccctgggctggaggaggatgatgaggagcgacggaagcgacgcgggggtacgctgctgcgcggcgcccggtttcgtgcccgcggccgactgcgcagcctgtccgcgagtctgagatacttacagagagctacaatggaaaagtcctggatgctgtggaactttgttgaaagatggctaatagccttggcttcatggtcttgggctctctgccgtatttctcttttacctttaatagtgacttttcatctgtatggaggcattatcttacttttgttaatattcatatcaatagcaggtattctgtataaattccaggatgtattgctttattttccagaacagccatcctcttcacgtctttatgttcccatgcccactggcattccacatgaaaacattttcatcagaaccaaagatggaatacgtctgaatcttattttgatacgatacactggagacaattcaccctattccccaactataatttattttcatgggaatgcaggcaacataggtcacaggttgccaaatgcattacttatgttggttaacctcaaagttaaccttttgctggttgattatcgaggatatggaaaaagtgaaggagaagcaagtgaagaaggactctacttagattctgaagctgtgttagactacgtgatgactagacctgaccttgataaaacaaaaatttttctttttggccgttccttgggtggagcagtggctattcatttggcttctgaaaattcacataggatttcagccattatggtggagaacacatttttaagcataccacatatggccagcactttattttcattctttccgatgcgttaccttcctttatggtgctacaaaaataaatttttgtcctacagaaaaatctctcagtgtagaatgccttcacttttcatctctggactctcagatcaattaattccaccagtaatgatgaaacaactttatgaactctccccatctcggactaagagattagccatttttccagatgggactcacaatgacacatggcagtgccaaggctatttcactgcacttgaacagttcatcaaagaagtcgtaaagagccattctcctgaagaaatggcaaaaacttcatctaatgtaacaattatataatgtttccctttttgattattgcattgtattttaatttgtgcagaatgataaagaatgttccttttagaagtgtgttatgtctgtacctgtctgaagagtgacattaaactttgaaaggacttcactgctcctttacgatattccaaatagttttttacattggaaaaactaattcttgggattctttcatacattttcatcaaaactttcagtgtgattatgtattcatatcttcagtttaatatgtcagtataatagatattgttcaaaagtttcttgttgctaaagtggtgtaatctgttacacagatgaatagctagatgtggaaagagatatgtaaacaagaaacctttgggtattgtttcttaagtaaatattgggacaatcatggtaagcaaacttagttctgtaactgcatttttcaccttaaaagttaaatgaaatgcatgatggtattttattccttgaattatgcaatgcaacattttacatgtaaatagcactggtcatatactgatgtatatggttatctgggttatatctatttttatgtaaactctattttgtttttggcaagaagtgaaattgagacttatgtgcaggttgccattgaattttgctctggtgaatgctgagatccagctttttcttacaaataaatgggaccctgttttccaatacaaatgtaccgtgtttttgttaggtacagtctggatcatggcatgtagaaatagaaatttagaattttactgcagctttgatgtgcatatttgaactttttaacatttgtaactttggtggcaaagagaattttagcttctatcgattttgtaagtcttcagctgaaccactaatagcagtcatagtgaagattagcactacttagaattaaattaggaagtcttttatcattgcaggattgtacatactactttataaaaattctcacctttgattttaaatcccagtacctagttatatctaacctatcaaaggcaagatatcatttattggacttcttgaaaataaaagttacaaaatccaacaacaacaacaacaaaacaatgttcttggttttaatgttccagttgctgtgaaatagaactcctacaatcaaaagacagttttaggaagtcttatttattgattttaaaagttttacatgtaggagtgtgggaatgaaggaattctggagctttttgacacaaaacctattaccacatttagcagttaaatggctataggtgggaagtaggatttagatgtatagaaaagtaagaaaatcttacttagaaaaaagccccttgaaacttgcaggatttacttaataaaaatacacgctatgagtcataattgtgccaagttgtttcatgcagtcctcaaaaattagatgtaattgagctttgtgtaatattatgtcagctttaacatataatattttgaatattttagctatatttagtggctttctgcaagcaactagaacagagaagtaatgggtcaataatcttgaccttaatttaaaactttcaatggagatagggctagaaatacttttgccaaatagcattcttattcactttatgccggtatttagaaaaaataaattatagcaagtatgatttctaagaatgtttttctataaattactaattgtaaaaagtcttgctttttaaaacaagttggtaatgcatatcatggaaggcatattttgtatgtataaattcaccacaattaaagattattcttgtcagtccttgctatgtagaatgactattctaaatattaatgtattaaaaagaaaatacaacaaaatgtatatttagacacgagcttacatggcataccttatatttgtatcattctttaaagtttacaaaaaaaaaccttatgtttttatgtaatcagtcattacactagggagaaatttatcagctttagttctaaatatgctcatgaggtataaaagctatttcttcatcagtattttgcttttatgctgctttttctttttgatactccaggtttataaactatcttttaaaattttaagccaggacttcaaaaattgtagagtacttgtttggcgttccctaccttcattctcttagggttaaggagcctttctttctgcagctaagggcagaggctgtgcctagggctataccaccactagcatctgtatttgagactgtttccttagatgggtaagaggtggaaaacaaacttagtatcaggggtccatgaagcccatggcatcatttttgaaaatatttctagttttgtagccaaagcaattggttttagtaaaatgagacttcttcaggagtcactcctttactgtggacccattgcttagtgggaatggaagtatatgtatctatcttgtgtattaacttctgacttatttatacaagagcagctataggagtttacaaaagaactttaagttattaagttactataaatttggggatcctagagtgatcttaaatatggcaagatacagctcatttagaataaaatctcacatccattattttaaagggaatgattggggggaaaaactggtgaaaaagaaatataaaaaggaccctaaaaagaattctgcaaaataagagaagaaataatttgtgacaggtaatagaatactagtaggatagaaacaactagaaaggaaagtgtgacacagtttttaaatttagatgtagaaaataatgaattaatgagattggtgaaaggaaatcatgcaaaacatttgaatgcaaagcatttctaacaaaaagtgactggagcacttgccattgcaacaaccctgtttttgcaattaggtttttgactgttaaaatggatattttcataaaaatggtgttctgaattttgctacagggctgcttaaatttatgattacctgtagacacttgatatttacatagattacagctttggtaatatgtcactggagtaattacgctgtaatacctgttgagaattcataccatctgatgcttatatattaatttcttatgtttgtaagtttggctttgtgggaataggtgtggagaaattaaagagtgaaggccatatttcattttttataaattatctttcaagctcagatagcttaagagcagtttatattaaggagacccttttctccttgaggatagggataggtaaggtaaacttgtaaaaaggatgtcacagaagtcactttttaattaagtcatgattgagatactgaactcttccactcattcttctttcccattttcctattatgtttgataattatatgtatttttaaaaactgtgagaggaaaaattagtcataacccttttgggttatccacttaaatttaggtattttcatattactcaggtaaagatggaaatgacagagcacagacatttattttttaaattgatagggtagaaaatgaaatgtacttctgtttattcttaatactatatatatatatacacacatagttttagcaaattggaaataatatattcatttgtatggcaagataaatgcagtcatcttaatactagtctatacatttttgccaaatggcgcaaatatacctccatttatattttgtatcttaaaatgtagtttaaaaataggaccatgtatgagacacttttttacaaaaagtgccgtatatacatatgtaacaggtgagtgtgtgtttaacataatttataattatttctgtcagtacagcgtatatggaaaattcaagttgtttttaacatattcaagtatgttcagtataaaataagttaatcccatttcataatgtaaatcatatttttgttatttgccatattttatttgaagtgataaaattttataactcaaatttgaatgtcatagtacattgtgtgctaaccatggcaagcaaacatttacatttgttttttacaataaatttcttttaaaatatactttctatttttctgtactgacatatgcaataaattggtacattaaaaatttgattaatgtcttcaaaaaaaaaaaaaaa

SEQ ID NO: 30973 - DNA, 1835 bp, Homo Sapiens
gtggtgaggcctacagaagcggccttcagctggaccttggtctccccgccggacttcgagggtgtcatcgccgcccctgttgggggtgagcgccgcgcggctgcagcatgcctcacaggaagaaaaagccctttatagagaagaagaaagctgtgtcttttcacttggtccaccggagccaacgagatcctttagcagcagatgagagtgcaccccagagggttctattgcccacacaaaaaatagacaatgaagaaaggcgagcagaacagaggaagtatggagtgttctttgatgacgactatgactacctgcagcacctgaaggaaccatctgggccttcagagcttattccctcaagtaccttcagtgcacacaacaggagagaggagaaagaagaaacgctagtaattccaagcactggaattaagttgccttcatcagtgtttgcttcagagtttgaggaagatgttggattgttaaataaagcagctccagtttcaggacctcgactggattttgatcctgacattgttgcagctcttgatgatgattttgactttgatgatccagataatctgcttgaggatgactttattcttcaggccaataaggcaacaggagaggaagagggaatggatatacagaaatctgagaatgaagatgacagcgagtgggaagatgtggatgatgagaagggagatagcaatgatgactatgactctgcaggcctattgtcagatgaagactgtatgtctgtgcccggaaaaactcacagagctatagcagatcacttgttctggagtgaggaaacaaagagtcgcttcacggagtattcgatgacttcctcagtcatgaggagaaatgaacagctgaccctacatgatgagaggtttgagaagttttatgagcaatatgatgatgatgaaattggagctctggataatgcagaattggaaggttctattcaagtggacagcaatcgcttacaggaagttttgaatgactactataaagagaaggcagagaattgtgtaaaattgaatacccttgaacccttggaggatcaagacctgccaatgaatgagcttgatgagtctgaggaggaagaaatgattactgtagtccttgaagaagccaaagagaagtgggattgtgaatctatttgtagtacatactcaaatttatataaccatccacagcttatcaagtatcaaccaaagcccaaacaaattcgaatatcttctaaaacaggaatacctctcaatgtcttaccaaagaaaggactcacagcaaagcaaactgaaagaatacagatgattaatggcagtgatcttcctaaagtatcaactcagccacgttctaaaaatgaaagcaaagaagataaaagagcaagaaagcaagctataaaagaagagcgcaaggaacgaagagtggagaagaaagctaacaaattagcatttaaactggagaaaagaaggcaagaaaaagagctgctgaacttgaagaagaatgttgagggtctaaagctatagacagtggagcatacagggcaaggcactttattaggggctcctcatctttggttattgactagaaacttcagaaagacaaaactgtttgccatttttactggcagataagaggaaaatacaatatttgtattatttttatactagtaagtgtcccctgccaaccatcttgtaaatattgtaatactttaatttttaatattataagcttacatttgctctgaagtaaatgacttcatgaatgtgaaatgtttgataaattaaaggaaaatatcttcataaaaaaaaaaaaaaaaaaaaaaa

SEQ ID NO: 30974 - DNA, 4005 bp, Homo Sapiens
gggcaacagtctgcccacctgtggacaccagatcctgggagctcctggttagcaagtgagatctctgggatgtcagtgaggctggttgaagaccagaggtaaactgcagaggtcaccacccccaccatgtcccaggtgatgtccagcccactgctggcaggaggccatgctgtcagcttggcgccttgtgatgagcccaggaggaccctgcacccagcacccagccccagcctgccaccccagtgttcttactacaccacggaaggctggggagcccaggccctgatggcccccgtgccctgcatggggccccctggccgactccagcaagccccacaggtggaggccaaagccacctgcttcctgccgtcccctggtgagaaggccttggggaccccagaggaccttgactcctacattgacttctcactggagagcctcaatcagatgatcctggaactggaccccaccttccagctgcttcccccagggactgggggctcccaggctgagctggcccagagcaccatgtcaatgagaaagaaggaggaatctgaagccttggacataaagtacatcgaggtgacctccgccagatcaaggtgccacgattggccccagcactgctccagcccctctgtcaccccgcccttcggctcccctcgcagtggtggcctcctcctttccagagacgtcccccgagagacacgaagcagcagtgagagcctcatcttctctgggaaccagggcagggggcaccagcgccctctgcccccctcagagggtctctcccctcgacccccaaattcccccagcatctcaatcccttgcatggggagcaaggcctcgagcccccatggtttgggctccccgctggtggcttctccaagactggagaagcggctgggaggcctggccccacagcggggcagcaggatctctgtgctgtcagccagcccagtgtctgatgtcagctatatgtttggaagcagccagtccctcctgcactccagcaactccagccatcagtcatcttccagatccttggaaagtccagccaactcttcctccagcctccacagccttggctcagtgtccctgtgtacaagacccagtgacttccaggctcccagaaaccccaccctaaccatgggccaacccagaacaccccactctccaccactggccaaagaacatgccagcatctgccccccatccatcaccaactccatggtggacatacccattgtgctgatcaacggctgcccagaaccagggtcttctccaccccagcggaccccaggacaccagaactccgttcaacctggagctgcttctcccagcaacccctgtccagccaccaggagcaacagccagaccctgtcagatgccccctttaccacatgcccagagggtcccgccagggacatgcagcccaccatgaagttcgtgatggacacatctaaatactggtttaagccaaacatcacccgagagcaagcaatcgagctgctgaggaaggaggagccaggggcttttgtcataagggacagctcttcataccgaggctccttcggcctggccctgaaggtgcaggaggttcccgcgtctgctcagaatcgaccaggtgaggacagcaatgacctcatccgacacttcctcatcgagtcgtctgccaaaggagtgcatctcaaaggagcagatgaggagccctactttgggagcctctctgccttcgtgtgccagcattccatcatggccctggccctgccctgcaaactcaccatcccacagagagaactgggaggtgcagatggggcctcggactctacagacagcccagcctcctgccagaagaaatctgcgggctgccacaccctgtacctgagctcagtgagcgtggagaccctgactggagccctggccgtgcagaaagccatctccaccacctttgagagggacatcctccccacgcccaccgtggtccacttcgaagtcacagagcagggcatcactctgactgatgtccagaggaaggtgtttttccggcgccattacccactcaccaccctccgcttctgtggtatggaccctgagcaacggaagtggcagaagtactgcaaaccctcctggatctttgggtttgtggccaagagccagacagagcctcaggagaacgtatgccacctctttgcggagtatgacatggtccagccagcctcgcaggtcatcggcctggtgactgctctgctgcaggacgcagaaaggatgtaggggagagactgcctgtgcacctaaccaacacctccaggggctcgctaaggagcccccctccaccccctgaatgggtgtggcttgtggccatattgacagaccaatctatgggactagggggattggcatcaagttgacacccttgaacctgctatggccttcagcagtcaccatcatccagaccccccgggcctcagtttcctcaatcatagaagaagaccaatagacaagatcagctgttcttagatgctggtgggcatttgaacatgctcctccatgattctgaagcatgcacacctctgaagacccctgcatgaaaataacctccaaggaccctctgaccccatcgacctgggccctgcccacacaacagtctgagcaagagacctgcagcccctgtttcgtggcagacagcaggtgcctggcggtgacccacggggctcctggcttgcagctggtgatggtcaagaactgactacaaaacaggaatggatagactctatttccttccatatctgttcctctgttccttttcccactttctgggtggctttttgggtccacccagccaggatgctgcaggccaagctgggtgtggtatttagggcagctcagcagggggaacttgtccccatggtcagaggagacccagctgtcctgcacccccttgcagatgagtatcaccccatcttttctttccacttggtttttatttttattttttttgagacagagtctcactgtcacccaggctgaactgcagtggtgtgatctaggctcactgcaacctccacctcccaggttcaagcaattatcctgcctcaggctcccgagtagctgggattacaggcatgtgcaactcacccagctaattttgtatttttagtagagacagggtttcaccatgttggccaggctggtcttgaactcctgaccgcaggtaatccacctgcttcggcctcccaaagtgctgggattacaggcgcaagccacccagcccagcttctttccattccttgataggcgagtattccaaagctggtatcgtagctgccctaatgttgcatattaggcggcgggggcagagataagggccatctctctgtgattctgcctcagctcctgtcttgctgagccctcccccaacccacgctccaacacacacacacacacacacacacacacacacacacacacacacacacacacgcccctctactgctatgtggcttcaaccagcctcacagccacacgggggaagcagagagtcaagaatgcaaagaggccgcttccctaagaggcttggaggagctgggctctatcccacacccacccccaccccacccccacccagcctccagaagctggaaccatttctcccgcaggcctgagttcctaaggaaaccaccctaccggggtggaagggagggtcagggaagaaacccactcttgctctacgaggagcaagtgcctgccccctcccagcagccagccctgccaaagttgcattatctttggccaaggctgggcctgacggttatgatttcagccctgggcctgcaggagaggctgagatcagcccacccagccagtggtcgagcactgccccgccgccaaagtctgcagaatgtgagatgaggttctcaaggtcacaggccccagtcccagcctgggggctggcagaggcccccatatactctgctacagctcctatcatgaaaaataaaatgt

SEQ ID NO: 30975 - DNA, 1530 bp, Homo Sapiens
ccacgcgtccggggaggcgcggccatggcagctccggagccgctgtccccggcgggcggtgcgggcgaggaggcgccggaggaggacgaggacgaagcggaggccgaggaccctgagcggccgaatgcgggagcgggcggtggacgcagtggcggcggcggcagtagcgtcagcggaggaggcggcggcggcggggccggagcggggggctgcggcgggcccgggggcgcgctcaccaggcgcgcggtcacactgcgggtgctcctcaaagacgcgctgctggagcctggcgccggggtgctgtccatctactacctggggaagaagttcctgggcgacctgcagccagacggaaggatcatgtggcaggagaccgggcagaccttcaactcacccagcgcctgggccacccactgcaagaagctggtgaaccctgccaagaagtcgggctgtggctgggcctctgtcaagtacaaaggccagaaactggacaagtacaaggccacctggctccggctgcaccagctgcacacgcctgccacggctgctgatgagagcccagccagtgaaggggaggaggaggagttgctgatggaagaggaggaggaggacgttctggcgggggtctcagcagaggacaagagtcggagaccactggggaagagcccttcagagcctgcccacccggaggccacaaccccagggaagcgggtggacagcaagatccgggttccggtccgctactgcatgctgggcagccgcgacttggccaggaacccccacaccctggtggaagtaacatcctttgcagccatcaacaagttccagccgttcaacgtggctgtttctagcaacgtgctgttcctgctggacttccacagtcacctgacacggagtgaggtcgtgggttacctggggggccgctgggacgtcaacagccagatgctgacggtgctcagagccttcccttgtcggagccggctcggggacgcagagactgcagctgccatcgaagaggagatctaccagagcctgttcctgcggggcctgtccctggtgggctggtaccacagccacccacacagcccggcgctgccatctctgcaggacatcgacgcacagatggactaccagctgcggctgcagggctccagcaatggcttccagccctgcctcgccctgctctgctccccttactattctggcaacccaggccccgagtccaagatctcgcctttctgggtgatgcctcctcccgagatgctgctggtggagttctacaagggttcccctgacctcgtgaggctccaggaaccctggagccaggagcacacctacctcgacaagcttaagatctccttggccagcaggacgcccaaggaccagagcctgtgtcacgtcctggaacaggtgtgcggcgtcctcaagcaggggagctgagccttccagggcagggtgggctccagttgtcttgagggtccggatgggctcaggtaataaagaaacggaagcagcaaaaaaaaaaaaaaa

SEQ ID NO: 30976 - DNA, 3961 bp, Homo Sapiens; identical to SEQ ID NO: 27478

SEQ ID NO: 30977 - DNA, 4823 bp, Homo Sapiens
gactgctaggcgaggagagggaagggggcggaggagacagggctactgcaggcgcagagctgggggcagccgggggcccgagtggctgaggctggtcccgcagcggccgcttgccggcgttctggctcctgtggcctcaccaggaagcgtcagagtcccgacactggggaagctcggagcgccgcctccgctgccgccgcctcctgcctggctctgggtccccgagccccctcccctggcccagcccgactccctcctccttcccgaaccatccggctcgggctccttccctggcgatggctggccgctgagccatggctcagtacggccaccccagtccgctcggcatggctgcgagagaggagctgtacagcaaagtcaccccccggaggaaccgccaacagcgccccggcaccatcaagcatggatcggcgctggacgtgctcctctccatggggttccccagagcccgcgcacaaaaagccttggcatccacgggaggaagaagtgttcaggcagcatgtgactggttattctcccatgtcggtgaccccttcctggatgaccccctgccccgggagtacgtcctctacctccgtcccaccggccccttagcacagaagctttccgacttttggcagcagtcgaagcagatctgcgggaagaacaaggcacacaacatcttcccccacatcacactctgccagttctttatgtgcgaggacagcaaggtggatgccctgggggaagccctgcagaccacggtcagtcgctggaaatgtaagttctcggccccgctgcccctggagctctatacgtcgtccaacttcatcggcctctttgtaaaggaagacagtgcggaggtcctcaagaagtttgctgctgactttgctgcagaggctgcatccaaaaccgaagtgcatgtggaacctcataagaagcagctacatgtgaccctggcttaccacttccaagccagccacctacccaccctagagaaactggcccagaacattgacgtcaagctagggtgtgactgggtggctaccatattttctcgggatatccgatttgctaaccatgagacattacaggtcatctacccctataccccacaaaatgacgatgagctggagctggtccccggggacttcatcttcatgtctccaatggagcagaccagcaccagcgagggttggatctatggcacgtccttaaccaccggctgctctggactcctgcctgagaattacattaccaaggctgatgaatgcagcacctggatatttcatggttcttattcaatcttaaatacatcgtcatccaactctctcacgtttggggatggagtattggagaggcggccttatgaggaccaggggctcggggagacgactcctcttactatcatctgccagcccatgcagccgctgagggtcaacagccagcccggcccccagaagcgatgcctttttgtgtgtcggcatggtgagaggatggatgttgtgtttgggaagtactggctgtcccagtgcttcgatgccaaaggccgctacatacgcaccaacctgaacatgcctcatagtttacctcagcggagtggtggtttccgagattacgagaaagatgctcccatcactgtgtttggatgcatgcaagcaagactagtgggtgaagccttattagagagcaataccattatcgatcatgtctattgctccccgtcccttcgctgcgttcagactgcacacaatatcttgaaaggtttacaacaagaaaatcacttgaagatccgtgtagagcccggcttatttgagtggacaaaatgggttgctgggagcacattacctgcatggatacctccatcagagttagctgcagccaacctgagtgttgatacaacctacagacctcacattccaatcagcaaattagttgtttcagaatcctatgatacttatatcagtagaagtttccaagtaacaaaagaaataataagtgaatgtaaaagtaaaggaaataacatcctgattgtggcccacgcatcttcccttgaagcgtgtacctgccaacttcagggcctgtcacctcagaactccaaggacttcgtacaaatggtccgaaagatcccatatctgggattttgttcctgtgaagaattaggagaaactggaatatggcagctgacagatccaccaatccttcctcttacccatggaccaactgggggcttcaactggagagagaccttgcttcaagaataaaccacaccagtgaacaagaaggaaaggccttttggagtgtgtctttctgtgtgtttaaaaacagtgggaaaatccacaccacactctaagtggacagctcagaataatttagcatatttcctttcacacttaaagttcttaagatgagactgtgtaaatgagagaaagacttgattcagaggaaaaaaatgtgttctctctggactcttgcctagctcacaaggctttggagaattgtcttcctaaatcggggcacctgctacagaagagaatgtttcgttccctctgggtatgcacagctaaggggcctcatttctcccagagggagctgctggcccgctctaaggggtgcaagaggaaggagtgtgcccagaccagctgggggagcattgaaaggacagcttggggatggaatttttttttttttatctccattttccagttaggtagagccaagctgaggaatccttttaagattattagaaaacatgccctgaagagagttgttcttaggttacacatgaaatcctaccgtcactagcccccatacaccagtgttgctggctgaagatacccgcttaaggatgctaacatttaccctggtactgccacattttctctagagcagctggcccttcttgctacagccctatcccccctccttgcttctgtgaaatggggagacaaagcacttttgctctccaaagcacttttggatactcaggaggaaagataagatacatgtttgaagtattcaatcataggagcaaagaacttgcaaaatatgaagtgacttggaattaaccatgttgtagcctaacgtgctactgcatttctaaatcatcaatatttgcttgtctttgcccctagactctagactatgttaactagttaaggatgttacattttgaaaggatgtatgttagatatattatttgcagcaagaagttcattctgtgcaatatggacatgtttgcaaaccataccaagggtcaggttgttgtacacttacagtacgtgtcaaccataatggaacatccacaaatgcatcaattataccagggatgtatagtaagtcagggaactaatataaatgatgacagtcatggctgcactgctacttgtgctgtcgttttgtttgtttttctatgataatttaaaatacataggtagggctactgaggaaatttggagagccacattctgtggtttctcattatacttacttcctgcatttagagggagtttatttaaaagaaataaatgacaatcaaaccaaatcatcagttatcaatgtctgtttaattgtgtgactatctgactgttgatggccacagatgatggtctcctatggtatagttcactctgtagaagatgtatgcaaagtgaaatgccagccctttaaagagacattagttagtgtaaaatggatctttacatgttgcagtaacattgactatgtttcaaaactcagatgcataaaacgtaaggtatataaaaatacatctatgcttgcgtttgaaactacaacttgataacccctagaaagaagaggacatgaaaggatgctggctatatatgttaatgagcaaaaggattatagttgttttgttttgtttttagagacagggtctcactataatgcttagactggtcttgaactcctgggctcaagcgatcctcctgcccctgtctcccaaagtgctaggattacaggtgtgagccaccacacctggcccatagttgtattttttttaggtcacttagaaaaatatgtcatgtattttacattttgagaaacaaatcaatcatggtttcttctagcgttgcgcaaacactgacccagcttctgggtatggaaataaccctgtgatgatgtgttaatataaaatgttgggagggaatattcccaataaaggtcttaagagaaaagtcacattacaagtaatgtaatggctctaccattcattcttctggtatttgtaatgaagtgaatccactgtttaatcagatccataatctttaacagattcaccacaaattttcatgggcgttgagtgctcagaataatgcttgaacacctcaccttgaaactgtagcagtgtgttctgggcagtatctgtaatgtatgaaatagagtctggaataggttatccactccatcttctaggttatcttagttgtatgacgaactgataaatctgtctgactgggctacaatccattgttcttagtccaatatggacactgccttaggcaatggtctatataagcaaaaggagatagagatctgaaataattttccgaataattcaggtggaaaacaagaaagattgtatttctctgctttcatttcaatttcattatttcaaattgcttgtcaaaatggcccaaaagatctgaattcacattaagttccccttgcacacttacctatttaaaaaactaaacttgcactgcaactgagaaattatttgtaaatcatgtggcatctatgtataataaaagaaagagacaactatattactcaatttcatatacatccaaaaagtataggct

SEQ ID NO: 30978 - DNA, 2423 bp, Homo Sapiens
gagagccgagctagcgacgagcagtcgttgcggccgccggcgccgcgggaggtggtggaggcctagccggagccgagaggtctcttgttcccgtcccacggtcccggcgtcacccctccggcgcccagtccccgtcccggaactcccgggcctgtcctgggcccccggtctgtgcactccgctcgccgcagcgcccggcccgggccgcacccgccggccccatgaggagggacgtgaacggagtgaccaagagcaggtttgagatgttctcaaatagtgatgaagctgtaatcaataaaaaacttcccaaagaactcctgttacggatattttcttttctagatgttgttaccctgtgccgctgtgctcaggtctccagggcctggaatgttctggctctggatggcagtaactggcagcgaattgacctatttgatttccagagggatattgagggccgagtagtggagaatatttcaaaacgatgtgggggctttttacgaaagttaagtcttcgtggatgtcttggagtgggagacaatgcattaagaacctttgcacaaaactgcaggaacattgaagtactgaatctaaatgggtgtacaaagacaacagacgctacatgtactagccttagcaagttctgttccaaactcaggcaccttgacttggcttcctgtacatcaataacaaacatgtctctaaaagctctgagtgagggatgtccactgttggagcagttgaacatttcctggtgtgaccaagtaaccaaggatggcattcaagcactagtgaggggctgtgggggtctcaaggccttattcttaaaaggctgcacgcagctagaagatgaagctctcaagtacataggtgcacactgccctgaactggtgactttgaacttgcagacttgcttgcaaatcacagatgaaggtctcattactatatgcagagggtgccataagttacaatccctttgtgcctctggctgctccaacatcacagatgccatcctgaatgctctaggtcagaactgcccacggcttagaatattggaagtggcaagatgttctcaattaacagatgtgggctttaccactctagccaggaattgccatgaacttgaaaagatggacctggaagagtgtgttcagataacagatagcacattaatccaactttctatacactgtcctcgacttcaagtattgagtctgtctcactgtgagctgatcacagatgatggaattcgtcacctggggaatggggcctgcgcccatgaccagctggaggtgattgagctggacaactgcccactaatcacagatgcatccctggagcacttgaagagctgtcatagccttgagcggatagaactctatgactgccagcaaatcacacgggctggaatcaagagactcaggacccatttacccaatattaaagtccacgcctacttcgcacctgtcactccacccccatcagtagggggcagcagacagcgcttctgcagatgctgcatcatcctatgacaatggaggtggtcaaccttggcgaactgagtatttaatgacacttctagagctaccgtggagtctctccagtggaagcaaccccagtgttctgagcaagggttacaaagtgagggagggcagtgtccagatccccagagccacacatacatacacatacacacccttacccccatccactctagctttgtgaccatgggactgaagtttgtgatggcttttttatcaagtagattggtaaaatttaaccattcctgttgaggtgcccataagaaaatcataggccaagatagggaggggcattccagcaaaccccgtgttaatgctactgtggtttttaaatttttgtctaggggtttctttggggattttagaacagcatctgctgtcctccggggtcaagaaaagcatggaaagacaatatatgatgtacccagggaccagaaagaaaatttctttgcatcttagaaatggtagacattcattgtgactaaagagcttctatgcttccttgtttccatgccaacatgctgagcatgctcacaaagaaggctcgtccattcctcctgtgttttagtatttggcccagaggtttcctaaatggttgccttgaaatcactgtggtccaaatgtaattcttacacactcaaattatcactgtctgtagcacacttgtgcacctgtcttacattctctgttgctcccccccacactcttgctcagtctgtcacctgttcagtctgcttactcactcaattgttacccttttgctgttgtcgtgtttacagtttgcattttgaatgattagttgggattaccaaacattttttaaaaagatattatcaataaatatttttttaattctaaattttaaaaaaaaaaaaaaaaaaa

SEQ ID NO: 30979 - DNA, 2533 bp, Homo Sapiens
cgcagccctggcgcagacgcgtgggctccgtggcgatgcggggtgttgcctgaggctccactgaagctatggcataatttgcagaatttgcacttcattacttttctgaaattcaaacaaattctgaaactgcacgagttctggctgagagctgtggatctgtgcattttgatggtgacagtgcctacgtggggatgagtgacggaaacccagagctcctgtcaaccagccagacctacaacggccagagcgagaacaacgaagactatgagatccccccgataacacctcccaacctcccggagccatccctcctgcacctgggggaccacgaagccagctaccactcgctgtgccacggcctcacccccaacggtctgctccctgcctactcctatcaggccatggacctcccagccatcatggtgtccaacatgctagcacaggacagccacctgctgtcgggccagctgcccacgatccaggagatggtccactcggaagtggctgcctatgactcgggccggcccgggcccctgctgggtcgcccggcaatgctggccagccacatgagtgccctcagccagtcccagctcatctcgcagatgggcatccggagcagcatcgcccacagctccccatcaccgccggggagcaagtcagcgaccccctctccctccagctccactcaggaagaggagtcggaagtgcatttcaagatctcgggagaaaagagaccttcagccgacccaggaaaaaaggccaagaacccgaagaagaagaaaaagaaggaccccaatgagccgcagaagcctgtgtcggcctacgcactcttcttcagagacactcaggccgccatcaagggtcagaaccccagtgccactttcggtgacgtgtccaaaatcgtggcctccatgtgggacagcctgggagaggaacagaagcaggcctacaagaggaagacagaagcagcaaagaaggaatatctgaaggccctggcagcctaccgggctagcctcgtctccaagagctccccagatcaaggtgagaccaagagcactcaggcaaacccaccagccaaaatgctcccacccaagcagcccatgtatgccatgccaggcctggcctccttcctgacgccgtcggacctgcaggccttccgcagtggggcctcccctgccagcctcgcccggacgctgggctccaagtctctgctgccaggcctcagtgcgtccccgccgccgccaccctccttcccgctcagccccacactgcaccagcagctgtcactgccccctcacgcccagggcgccctcctcagtccacctgttagcatgtccccagccccccagccccctgtcctgcccacccccatggcactccaggtgcagctggcgatgagcccctcacctccagggccacaggacttcccgcacatctctgagttccccagcagctcgggatcctgctcacctggcccatccaaccccaccagcagcggggactgggacagcagctaccccagtggggagtgtggcatcagcacctgcagcctgctccccagggacaaatcgctctacctcacctaatcccgcctccctaccatccctgaggctcgctggaaggcactgctcagagcctgaagggctgacagcagaaaagaggccctggccagaggcagggtggcccatcggagagagcagtgacacacccattgcccgggggctgagtctcttcctcaacctcccaccagactctgcagaggcagcccactgcccaccaccagcccaaagaacctgcaggaaccttccgcccgctgacctgcttgctccagggtaactgtggaccctgtcctcgccctgcgcacggtaccctatgtctggacacccggccccagctccagccccagcccaggtgggccgcccctggcggggtcgcttaccaacggacacccaccccagatgcatgggccagagggccggcccccggcatagatgtgcacatcggttttccagtgtgaacaaaagattacgaaacctagaaactgttggttccgtgtaagtagttgactacgtgttttagaactgtgctgaagacatctgtaagactattttgtgggggaaaaaagtagtttcctttaaggtaaaaagcattttatatgatccttagcacatttttaagttttatcttaagggagacgcgcacaaaagcggctgccaaaccgtttcgtcatcctcacagcaaggaccggacgcttgctagccaccccggagcactgctctccttttaatcatgtattcatctattttaaattgccggcgacgacttttgtctatttatgaagaaaccttgagaacgaagttacagcttatcctaccgtgtgtgtggttttggggtttcgtttgggtttgggttcttgacgtcgtttgcagctgtttcctggccctggcgagtgtctgtcttggtgcccagtgcttctctcaaatctctttataataaaacttctgaaaagctgaaaaaaaaaaaaaaaaaa

SEQ ID NO: 30980 - DNA, 2069 bp, Homo Sapiens
gttgagctgtaccatggagcatcctcctgtgtcctgccaacccctgccattatagtcaccggagactcctttacctatccctatctgttagggttttcagatgtcctctcgctgggtttatatttgaaggtatagaatctgggaaagggtggggtgcaagctaaccaaatagggatgctagggttgggtggggaattgaggactcttctgtgcttttattgtagggctggggatcgaggatctgggcaaaaaaaatatgacatttccaaccagggacaaaatggaggcttgggcttagtgatgggtaaatggaagactggttgagtgggatgataatgggagaacttactgatgctcttttgggaaaaggtgctttaaagactcgatttgggagcctactggggcaaggcgactggggaggtgtacgtgttagtcaagtggaggtcaggtgggttatcttctgcctccttcactggcttcatgtgaacttgcctgtgacagaatatcttgccctagatgtcctcttccctcttgccatcgtgcaaaagcattcgatcttatgaccgtgagttcttatttgtggatgctaataactggggtaatctcagggagtactggggccatggctctttcccttgcttctctttctgctcactgctttgctttcaggtgcttagctgctcctttttatttctttgcaggactgggaaagcatgggaggaggattttgataagtttcttgttctctgcgtggtgatggggtggtctgagggccaagttaataagcctacctttggttattaccctggaaaattgagggttgatggtagggttatgattgtggcctgtgtatttgcaatttttctttgtcagtgtggctttctgtcatcttcctttttctccagtgagggttctgccactgtctcaatcccttggttcctgcaaaaaacagctaaatgtgctctcagggccagtggtgatgttctgtgttgcagccccagctcttgaaagtgacctggcccagatgagctctgcctgcttgtcatctttaggtcctgctgcccctgctgcctcagccctcaggctcctaactgctcaagccagaaggagctacaaagccaaatcatttgtcatttttctctggcagattgttttaaaatctccctcccctcttttattttaattatgccacctgtgttaatcctatagcctgcttctttgctttgtggattactgatttcaagttctataacttggggaaagttaggttgagtgaatgggaggacagacactgaatgtgtgttttggaaaaatggactctatcttcagattattcagcttctccacctatcacctctacaacttggccttcattggagaagttttagttggcttattcctggaacaagaccacctagaggcttttagccttgtcagcctgccctcttctgaggtttggaccttgttttaaattgtgtgcatggtgggcttgagactctcttgtaatggaggtaatgggactatcactgaggggttcagcctatccaggtaggctaccgttctagtcatacccatcacttaaattctgccacagtctgcacagacggttggtcctccaggcatattgtcctattaagccaaataggtggacatcatgggatggatgaggtcatcatgaaaacagatttactggatttatggacctagtatatactatgtaacagatggaaaactgaattttacaatctataggtacctttgaaaggtcataaagggtaaaagtctatagttttccagaaaataattcttaaaactgggttttatgtctagatttaaatcatgtatctgtctgtagtgcttcaaatgtggccaggtgtggtagctcacacctgtaattcccagcgctttgggaatttgaggcaagaggattgctagaggccaggattttgagaccagcttcggcaatacggtgagaccttgtctctaccaaaaaaaaaaaaaaaaaaaaaaaaaaaaaaaaaaaaaaaaaaaaaaaaaaaaaaaaaaaaaaaaaaaaaaaaaaacttggg

SEQ ID NO: 30981 - DNA, 2835 bp, Homo Sapiens
ggcacgaggccagcaggaggcaacggcagcgacggggccggggtgatggtgcaggtgcctggggtcggtgcggagctgccgggctgagggacgcctggtccagggtccgcagcgccgccgcgtcgctcccgggcgggcgggcgggaagatgctgagcaggttgatgagcggcagcagcaggagcctggagcgcgagtacagctgcaccgtgcggctgctggacgacagcgagtacacctgcaccatccagagagatgccaaaggccagtacctgtttgaccttctttgccaccatctgaacctacttgagaaagactattttggtatccgctttgtagacccagataagcagcggcattggctggaatttacaaagtctgtggtgaaacaattgagatcccagcctccattcaccatgtgcttccgtgtgaagttttatcctgcagaccctgctgctctgaaagaagaaataaccagtgcagtcgcaacagagtggacttctttccttcaagaagtgtgaatactacctcttgaactggtcactctcaaagggctctggagtaactaatcagaagcgtcttttcttttacctatgatgttgccactgtggacatttttggagagagctatgttgctgcttatttcggaggttgcaaatagattcaagtggtctaatggatatacttggaaaatgccaaaggcataacactgaaagataagctgggagatactgaagatttaaaatcaaaatggataaactctgtggtgctgttggatcaggtatttagtcttcctgcagatcaaaagggatctctaccatggccgactcctctgtaaaacatcggatgctgccttgttagcagcttacatccttcaagcggagattggggattatgactcagggaaacaccctgaaggctacagctccaagttccagtttttccctaaacattcagagaagctggaaaggaaaattgctgagattcacaagacggaactgagtggtcaaacaccagcaacatcagagctgaacttcttaagaaaagcacagacattggaaacatatggagtggatcctcacccatgtaaggacgtgtcaggaaatgctgcatttctggccttcactccttttgggtttgttgttcttcaaggaaacaagagggtccacttcattaaatggaatgaggtgaccaagctgaaatttgaaggaaagactttctatttatacgtaagtcagaaagaggaaaagaaaattattcttacatattttgctccaactcctgaagcgtgtaagcacctctggaaatgtggaatcgagaaccaagccttctacaagctggagaagtcaagccaagtccgcacagtgtccagcagcaatttattctttaaagggagccggttccgatacaggtaaatagtgacatggccgagttgcaaaggaagtcatggaatcaagtgctaagatcaaacgggagccaccggaaatacacagagcagggatggttcccagccggagctgtccctccataacccatggcccaaggctgagcagcgtccccaggacccgcagaagagctgttcacatctccatcatggaaggcctagagtccttacgggacagtgcccattccacaccagtgcgttccacttcccatggggacaccttcctgcctcacgtgagaagcagccggacagatagcaatgagcgagtagctgtgattgcagacgaggcctacagccctgcagacagcgtgctgcccacccctgtggctgagcacagcctggagctgatgttgctttcccggcagatcaatggagccacctgcagcattgaggaggagaaggaatctgaagccagcaccccaactgctacagaggtggaggcccttgggggagagctgagggccctgtgtcaggggcacagcgggcccgaggaggaacaggtgaataagtttgttctaagtgtcctccgtttgctccttgtgaccatgggactcctctttgttttgctcctcctcctgatcatccttaccgagtctgaccttgacattgcctttttccgtgatatccgccagacccccgagttcgaacaattccactatcaatacttttgtcccctcaggcgatggtttgcctgcaaaatccgctcagtggtgagcctgctcattgacacctgagaaggcatgactcctcccaaaaactagccaggtggaccaaggaacccggctacccattcccagcaatgggacccatcgcggaaccatcggcacatataccaagtcctcctctcatgactcaaagtccactgcagcctaggagggtgtttcccagaagaagaaagggataggctcatgccctgtctaaacaaactgggaaaactcattttcttcagaagttatttcaagaaaggctcagcgactctgtttctcatctttccaatttgcaggataatttttggttttgaattttgatttttcatagatgtatattattttgaagtatcaaataaaaataatttattttactattactgattattgcagtagtatcacctagcagaggggacactagttgaaaactagagagctgctgtcctctgtattctgcaggagcttttcctgctggtgccactgggttccagtagactcatcactgcagcctcagcagggcaggccagggatctggacaatggggactgtttagttttttgtttgttttttttgccagccagaacttttaaaaaagtaaacatccatgtagaatgattaaatggaaagttgcttcttaaaaaaaaaaaaaaaaaaaaaaaaaaaaaaaaaaaaaaaaaaaaaaaaa

SEQ ID NO: 30982 - DNA, 1461 bp, Homo Sapiens
gagagggccagagtgagtgtttacaccggcggcagtgcggccgggttccttccgcgggacgggtgagggcgctggggccctgggcagcgcgggctcgatgtgtgtcagccaagtagctggtcccactggagcgggagaaagagagagcgcgaaagagagaggatgtctctctcagactggcacctggcggtgaagctggctgaccagccacttactccaaagtctattcttcggttgccagagacagaactgggagaatactcgctagggggctatagtatttcatttctgaagcagcttattgctggcaaactccaggagtctgttccagaccctgagctgattgatctgatctactgtggtcggaagctaaaagatgaccagacacttgacttctatggcattcaacctgggtccactgtccatgttctgcgaaagtcctggcctgaacctgatcagaaaccggaacctgtggacaaagtggctgccatgagagagttccgggtgttgcacactgccctgcacagcagctcctcttacagggaggcggtctttaagatgctcagcaataaggagtctctggatcagatcattgtggccaccccaggcctcagcagtgaccctattgctcttggggttctccaggacaaggacctcttctctgtcttcgctgatcccaatatgcttgatacgttggtgcctgctcacccagccctcgtcaatgccattgtcctggttctgcactccgtagcaggcagtgccccaatgcctgggactgactcctcttcccggagcatgccctccagctcataccgggatatgccaggtggcttcctgtttgaagggctctcagatgatgaggatgactttcacccaaacaccaggtccacaccctctagcagtactcccagctcccgcccagcctccctggggtacagtggagctgctgggccccggcccatcacccagagtgagctggccaccgccttggccctggccagcactccggagagcagctctcacacaccgactcctggcacccagggtcattcctcagggacctcaccaatgtcctctggtgtccagtcagggacgcccatcaccaatgatctcttcagccaagccctacagcatgcccttcaggcctctgggcagcccagccttcagagccagtggcagccccagctgcagcagctacgtgacatgggcatccaggacgatgagctgagcctgcgggccctgcaggccaccggtggggacatccaagcagccctggagctcatctttgctggaggagccccatgaactccctgcttcccctgaacccccagcaagttgcagaggctactgcccttgggaggcactcatgaaggtgcctccatctctcccttccccaatatacctgatggtcaactctcaaaaaaaaaaaaaaaaaaaaaaaaaaaaaaaaaaaaaaaaaaa

SEQ ID NO: 30983 - DNA, 5674 bp, Homo Sapiens; identical to SEQ ID NO: 24909

SEQ ID NO: 30984 - DNA, 2359 bp, Homo Sapiens
gtggggtcttccacaacggtctcaagatctgcgagaagtttgggcccaatctggacacgtgccctgaaggcaccatcctgggactgcggctggacagctctggggggctgcatcttcatgttaatggggtggaccagggggtagctgtgccagatgtgccccagccctgccatgcgcttgtggacctctatgggcagtgtgagcaggtgacaatcgtgaaccctgagccaggggctgccagtgggaaaagtgctggaacccaaggggacatggagaaagcagacatggtggacggtatcaaagagagtgtgtgctggggtccaccacctgccgctagtcctctaaagagctgcgagtaccatgccctttgctctcgcttccaagaactcctgctgcttcctgaagattatttcatgcctccgccaaagcgaagcctgtgctactgtgagtcttgccggaagctgcgaggagacgaggcccacaggcgcagaggggagcctccccgggaatatgcactgccctttggctggtgcaggttcaacctcagagtgaatccccgcctggaggctgggacactaaccaagaagtggcacatggcatatcacgggagcaatgttgccgctgtacggagagtgctggaccgaggggagctgggagcaggtactgcctccatcctgagctgccgtcctttgaagggagaacctggggtagggttcgaggagcctggcgagaactgtgcacctcctcgggaggagcagccccctcctgtgctgctttccccctcccttcaatatgctggggcggagaccctggcctccaaagtgcaattccgggaccccaaatcccagcggacgcaccaggctcaggtggcgttccaggagccaataaacaccgtctcagagcctccgcctcggcctctctctcgcgcgcccctctccggagcccgcgtcccctggggtgccaccaggtgggcccgcgaaattaaagagagctgaggatgccaaggccagtctgcagccgtcgtcgctcacgttcccggcgacggggtttgtacgccgcgggcacccgtcgcagcgcgcttccgccttctttcacctgtgaggtcggccgccgccgtgactccggaaggactcggccgggccgccggatgtgacgcaggggccagggcgcgtcggagccgctgagaaagcgcagagaaggcgggccccgtctgaggtctggcagtcagagacagccgggcgcccacggcccgagcgcccacggcagcaccatgcccgcactcctggagcgccccaagctttccaacgccatggccagggcgctgcaccggcacattatgatggagcgggagcgcaagcggcaggaggaagaagaggtggataagatgatggaacagaagatgaaggaagaacaggagagaaggaagaaaaaggagatggaagagagaatgtcattagaggagaccaaggaacaaattctgaagttggaggagaagcttttggctctacaggaagagaagcaccagcttttcctgcagctcaagaaagttttacatgaggaagaaaaacggaggcgaaaggaacagagtgacctgaccaccctgacatcagctgcataccagcagagcctgactgttcacacaggaactcatctcctcagcatgcaggggagccctggaggacacaatcgcccaggcaccctcatggcagctgacagagccaaacaaatgtttggaccccaagtgcttacgacccggcactacgtgggctcagcagctgcttttgcagggacaccagagcatggacaattccaaggcagtcctggtggtgcctatgggactgctcagcccccacctcactatgggcccacacagccagcttatagtcctagtcagcagctcagagctccttcggcattccctgcagtgcagtacctatctcagccacagccacagccctatgctgtgcatggccactttcagcccactcagacaggtttcctccagcctggtggtgccctgtccttgcaaaagcagatggaacatgctaaccagcagactggcttctccgactcatcctctctgcgccccatgcacccccaggctctgcatccagcccctggactccttgcttccccccagctccctgtgcagatgcagccagcaggaaagtcgggctttgcagctaccagccaacctggccctcggctccccttcatccaacacagccagaacccgcgattctaccacaagtgaccatcagattatatcttcaacaccacaccccccaccccatcgtgggtgagggtatcccctgtgtgtcccaggccaataaaatctacctgccactgaaaaaaaaaa

SEQ ID NO: 30985 - DNA, 3985 bp, Homo Sapiens
aacaagcgacctgtttggcaaggaatacagcatccttctgagagcctcttctcgacactatcccacagaccaggacttcctcatgggaaagagcacttaggatcttgctatcagctgccctaaacttttgctgagccaaaataagactttgatgcagaactgaacaagatatttcatttttgtgtgttttaatcttcctggttgcagtcttagttgttcagccctgagaattttgagccacatttgttgctattatttttgcatgcacttttcaaaatgattgacttaagcttcctgactgaagaggaacaagaggccatcatgaaggttttgcagcgggatgctgctctgaagagggccgaagaagagagagtcagacatttgcctgaaaaaattaaggatgaccagcagctgaagaatatgagtggccaatggttttatgaagccaaggcaaaaaggcacagggacaaaatccatggcgcagatatcatcagagcatctatgagaaagaagaggccccagatagcagctgagcagagtaaagacagagaaaatggggcaaaggaaagctgggtgaataatgtcaacaaagatgctttccttcctccagagctggctggcgttgtagaagagccagaagaagatgcagcaccagcaagcccgagttccagtgtggtaaatccagcttccagtgtgattgatatgtcccaggaaaacacaaggaaaccaaatgtgtctccagagaagaggaagaatccgtttaatagctccaagttgccagaaggtcactcatcacaacaaactaaaaatgaacagtcaaaaaatggaagaactggtttatttcagacttcaaaagaggatgaattgtcagagtcaaaagaaaagtcaactgtcgcagatacttcaatccaaaagttagagaaatcaaagcagactttgccaggcctttcaaatgggtcccaaatcaaggctccaatccccaaagccaggaagatgatctacaaatcaactgatttaaacaaagatgataaccagtcttttcctagacaaaggacagactccctgaaagcgagaggggctccgagagggatcctcaagcgcaactccagttccagtagcacagactcagaaacccttcgttataatcacaactttgaacccaaaagcaaaattgtgtcacctggcctaaccatccatgagagaatttctgagaaggagcattctttagaagacaactcttccccaaactccctggagccattaaagcatgtgagattctctgcagtgaaggatgagcttccacagagtcctgggctaatccatggtcgggaagtaggagaatttagtgttttagaatctgacagattgaaaaatggaatggaagatgcaggggacacagaagagtttcagagtgaccctaagccttctcaatacagaaagccttcgctttttcatcaatcaacctcaagcccatatgtatcaaaaagtgaaacacatcagccaatgacttctggttcttttccaattaatgggctgcattctcattcagaagttttaactgcaagaccacagtctatggagaattcaccaaccatcaatgaacccaaagataaatcatcagaattaacaaggcttgaatctgtattacccagaagccctgctgatgaactgtctcattgtgttgagcctgagccatctcaggtgccaggtggcagttctagagaccgtcagcaaggttcagaagaagaacccagtcctgttttgaaaactttggaaaggagtgccgctaggaaaatgccttccaaaagtctagaagacatttcatcagattcatcaaatcaagcaaaagtagataatcagccagaagaattagtgcgtagtgctgaagatgatgagaaaccagatcagaagccagttacaaatgaatgcgtaccaagaatttccacagtgcctacacaacctgataatccattttctcaccctgacaaactcaaaaggatgagcaagtctgttccagcatttctccaagatgaggtgagtggcagtgtgatgagtgtttatagtggagactttggcaatctggaagttaaaggaaatattcagtttgcaattgaatatgtggagtcactgaaggagttgcatgtttttgtggcccagtgtaaggacttagcagcagcggatgtaaaaaaacagcgttcagacccatatgtaaaggcctatttgctaccagacaaaggcaaaatgggcaagaagaaaacactcgtagtgaagaaaaccttgaatcctgtgtataacgaaatactgcggtataaaattgaaaaacaaatcttaaagacacagaaattgaacctgtccatttggcatcgggatacatttaagcgcaatagtttcctaggggaggtggaacttgatttggaaacatgggactgggataacaaacagaataaacaattgagatggtaccctctgaagcggaagacagcaccagttgcccttgaagcagaaaacagaggtgaaatgaaactagctctccagtatgtcccagagccagtccctggtaaaaagcttcctacaactggagaagtgcacatctgggtgaaggaatgccttgatctaccactgctaaggggaagtcatctaaattcttttgttaaatgtaccatccttccagatacaagtaggaaaagtcgccagaagacaagagctgtagggaaaaccaccaaccctatcttcaaccacactatggtgtatgatgggttcaggcctgaagatctgatggaagcctgtgtagagcttactgtctgggaccattacaaattaaccaaccaatttttgggaggtcttcgtattggctttggaacaggtaaaagttatgggactgaagtggactggatggactctacttcagaggaagttgctctctgggagaagatggtaaactcccccaatacttggattgaagcaacactgcctctcagaatgcttttgattgccaagatttccaaatgagcccaaattccactggctcctccactgaaaactactaaaccggtggaatctgatcttgaaaatctgagtaggtggacaaatatcctcactttctatctattgcacctaaggaatactacacagcatgtaaaagtcaatctgcatgtgcttctttgattacaaggcccaagggatttaaatataacaaaatgtgtaatttgtgactctaatattaaataagatatttgaacaagctaggaaaattgaatttctgctgctgcttcaaagaaaaagctgccccagagcattaaacatggggtattgttaagaagcaaaatgttcttgtttgccatcatgtgtttcacaccacaattctgtgccacagttaagagggtctggtacccttgcaggacctttgtaggttgtgggaaaaagtcgcagaaagatactcaaagtggagcagggaatggagacagacatcagtgatgataaaaaaaaaaatggaccttaagaaactatttactctgtaatctctaataaaatatggaattccatattagggcaatgagactgaaactactggtgtttttctgccttgagaaaacaaacagttaaaacaagcctcaaatgtattttagtgccacccactggccataggtacaattcagttgttggcttgttttgacttaattctaaaataggtctcaagcctgtatttttatgagtttatttttttaaaaccctgcatatatatgattgtttttcttataactttactatatgaaagcagcataagagtagtcacaaacatgttttgcaacaaagttttaattagaatgtaagttgctcagttatactgttcttcttatgtatgtaaaattttcgtattttgtaaaaacccttagaataaattatcatttgatttaaattgtattagaaaattagcgtgacttctcattttaaataaaatattttaggaattctaaacatctaaaaa

SEQ ID NO: 30986 - DNA, 3688 bp, Homo Sapiens
tgaagattcagttttcacttaaacaaccagcaagtcttgaagtctcttcccaagcaaatgggagcttctttggaccttggagcacacagaggattctactttctttaaaactttgttttcaggcaatttccctgagaaccgtttacttccagaagattggtggagcttgatctgaaggctggccatgaaatctcaaggtcaacattggtattccagttcagataaaaactgtaaagtgagctttcgtgagaagcttctgattattgattcaaacctgggggtccaagatgtggagaacctcaagtttctctgcataggattggtccccaacaagaagctggagaagtccagctcagcctcagatgtttttgaacatctcttggcagaggatctgctgagtgaggaagaccctttcttcctggcagaactcctctatatcatacggcagaagaagctgctgcagcacctcaactgtaccaaagaggaagtggagcgactgctgcccacccgacaaagggtttctctgtttagaaacctgctctacgaactgtcagaaggcattgactcagagaacttaaaggacatgatcttccttctgaaagactcgcttcccaaaactgaaatgacctccctaagtttcctggcatttctagagaaacaaggtaaaatagatgaagataatctgacatgcctggaggacctctgcaaaacagttgtacctaaacttttgagaaacatagagaaatacaaaagagagaaagctatccagatagtgacacctcctgtagacaaggaagccgagtcgtatcaaggagaggaagaactagtttcccaaacagatgttaagacattcttggaagccttaccgcaggagtcctggcaaaataagcatgcaggtagtaatgagggcagctgtgtacaggatgaatcggaaccacagaggcctctgtgtcattgtcaacaaccacagctttacctccctgaaggacagacaaggaacccataaagatgctgagatcctgagtcatgtgttccagtggcttgggttcacagtgcatatacacaataatgtgacgaaagtggaaatggagatggtcctgcagaagcagaagtgcaatccagcccatgccgacggggactgcttcgtgttctgtattctgacccatgggagatttggagctgtctactcttcggatgaggccctcattcccattcgggagatcatgtctcacttcacagccctgcagtgccctagactggctgaaaaacctaaactctttttcatccaggcctgccaaggtgaagagatacagccttccgtatccatcgaagcagatgctctgaaccctgagcaggcacccacttccctgcaggacagtattcctgccgaggctgacttcctacttggtctggccactgtcccaggctatgtatcctttcggcatgtggaggaaggcagctggtatattcagtctctgtgtaatcatctgaagaaattggtcccaagacatgaagacatcttatccatcctcactgctgtcaacgatgatgtgagtcgaagagtggacaaacagggaacaaagaaacagatgccccagcctgctttcacactaaggaaaaaactagtattccctgtgcccctggatgcactttcattatagcagagagtttttgttggttcttagacctcaaacgaatcattggctataacctccagcctcctgcccagcacaggaatcggtggtctccacctgtcattctagaaacaggaaacaccgtgttttctgacacagtcaattctgattttctttttcttttgcaagtctaaatgttagaaaactttcttttttttggagatagtctcattctgtcacccagactggagtgcaggggggcaatcacggctcactgtagtctcgacctcccaggctcaagctgtcctcccacctcagcctcccaagtagctgagactacaggtgtgtgtccatgcacagctaactttttattttttttgtggagatggggtttcactatgttgcctaagctggtctcaaactcctgggctcaagcgatcctcccacctcagcttctcaaagttctgggactacaggcatgaaatactgtgcctggcctggggaccaggtgcattttaaggttccttggtgttcaaaaaccacgttcttagcctagattgagcttagattgcctctctagacaactaccccttagttataattctgtgtcccctctgcatgcccttaaacattggacagtgaggtcacagtccacccaccctctctctgatctcccccttcctaagacttctcttttgcacatctagtgaggtgaaaatttggtctatgccaggcccatttcctgcttttgtgtaaggaaggtgctcacataggaagtttttatttggttagagacaggtttccctgtaggaagatgatggctcatttacactcagctgctctgcaagcagaaactttacaacctgatgtcatattccattttggactgggtgcggtgactcatgcctgtaatcccagtactctgggaagccaaggcaggcagatcacttgaggtcaggagttcgagaccagcctggccaatacggcaaaacctcatcattactaaaaacacaaaaattagccaggtgtggcggcgagcacctgtaatcccagctactcgggaggctgagacaggagaatctcttgaatccaggaggcagaggctgtggtgagccaagatgacacaactgcactccagcttgggcaacagggcgagaccttgtttaaaaaaaaaattcaatattggggttggaacatttcagttgccattgacagaacacccaattcaaattgactgaagcaaagaagggaatttattgcctctttcacattgaaacccaggagtggataacactggcttcaggcaaagcttgaatcaggactcaatctacaggccagcacctttctcttggccggatgtcctcagggctggcagatgcagtagactgcagtggacagtccccaccttgttactgctactacactttgctcctctggcccaaggcatgaggagagaggctgtgtcagaaactgaagctgttctcaggatcactgggctcttcttggcagaggggatgtctggcttgcctgaagggagtggctctgtaaggacgccttgatgctttcttcattaagattttgagcatttttacgtacttgagcttttttttttttttttttcaatttctagaggaactttttctctgttaattcctggaactgtattttgaatccttaaaggtgagccctcatagggagatccaaagtcctgtggttaacgccttcatttatagatgaggcagctgaggcctggggatgtgaacaacctgctcacagtcctcatttactggatttgacttcagccaggtgaactggaatgccttggggcgtggaagggcattaggagtgtttcatttgatatgtgaatgctcataaaaaaatgtcaaggaatgaagaacaacaactctcagtggtgcctgcatttataattatttatgtgaaagtcaaattcatgtacagtaaatttgttataagaatattcacaagaacactgttctgatatctctgattgtcatgtggatttgaatgtagcttgacagagaaaaaaaaaaaaa

SEQ ID NO: 30987 - DNA, 3927 bp, Homo Sapiens
gggtggcctggtgtgtgggcgcggcagggcgcaggcgcaggcgcagtgtgcgtccgcgtctgaggggagggatgtgggggaagcgacggcccccggtttgtttgggctgtgggcggtgcgcagcggagagcccgggaaaagcgggaaatggcggcgccgagcgcggggtcttggtccaccttccagcacaaggagctgatggccgctgacaggggacgcaggatattgggagtgtgtggcatgcatcctcatcatcaggaaactctaaaaaagaaccgagtggtgctagccaaacagctgttgttgagcgaattgttagaacatcttctggagaaggacatcatcaccttggaaatgagggagctcatccaggccaaagtgggcagtttcagccagaatgtggaactcctcaacttgctgcctaagaggggtccccaagcttttgatgccttctgtgaagccttgcactcctgaattttatcaaacacacttccagctggcatataggttgcagtctcggcctcgtggcctagcactggtgttgagcaatgtgcacttcactggagagaaagaactggaatttcgctctggaggggatgtggaccacagtactctagtcaccctcttcaagcttttgggctatgacgtccatgttctatgtgaccagactgcacaggaaatgcaagagaaactgcagaattttgcacagttacctgcacaccgagtcacggactcctgcatcgtggcactcctctcgcatggtgtggagggcgccatctatggtgtggatgggaaactgctccagctccaagaggtttttcagctctttgacaacgccaactgcccaagcctacagaacaaaccaaaaatgttcttcatccaggcctgccgtggagatgagactgatcgtggggttgaccaacaagatggaaagaaccacgcaggatcccctgggtgcgaggagagtgatgccggtaaagaaaagttgccgaagatgagactgcccacgcgctcagacatgatatgcggctatgcctgcctcaaagggactgccgccatgcggaacaccaaacgaggttcctggtacatcgaggctcttgctcaagtgttttctgagcgggcttgtgatatgcacgtggccgacatgctggttaaggtgaacgcacttatcaaggatcgggaaggttatgctcctggcacagaattccaccggtgcaaggagatgtctgaatactgcagcactctgtgccgccacctctacctgttcccaggacaccctcccacatgatgtcacctccccatcatccacgccaagtggaagccactggaccacaggaggtgtgatagagcctttgatcttcaggatgcacggtttctgttctgccccctcagggatgtgggaatctcccagacttgtttcctgtgcccatcatctctgcctttgagtgtgggactccaggccagctccttttctgtgaagccctttgcctgtagagccagccttggttggacctattgccaggaatgtttcagctgcagttgaagagcctgacaagtgaagttgtaaacacagtgtggttatggggagagggcatataaattccccatatttgtgttcagttccagcttttgtagatggcactttagtgattgcttttattacattagttaagatgtctgagagaccatctcctatcttttatttcattcatatcctccgccctttttgtcctagagtgagagtttggaaggtgtccaaatttaatgtagacattatcttttggctctgaagaagcaaacatgactagagacgcaccttgctgcagtgtccagaagcggcctgtgcgttcccttcagtactgcagcgccacccagtggaaggacactcttggctcgtttgggctcaaggcaccgcagcctgtcagccaacattgccttgcatttgtaccttattgatctttgcccatggaagtctcaaagatctttcgttggttgtttctctgagctttgttactgaaatgagcctcgtggggagcatcagagaaggccaggaagaatggtgtgtttccctagactctgtaaccacctctctgtctttttccttcctgagaaacgtccatctctctcccttactattcccactttcattcaatcaacctgcacttcatatctagatttctagaaaagcttcctagcttatctccctgcttcatatctctcccttctttaccttcatttcatcctgttggctgctgccaccaaatctgtctagaatcctgctttacaggatcatgtaaatgctcaaagatgtaatgtagttctttgttcctgctttctctttcagtattaaactctcctttgatattatgtggcttttatttcagtgccatacatgttattgttttcaacctagaaacctttatccctgcttatctgaaacttcccaacttccctgttctttaagactttttttttttttttttttttttttgagacagagtctcgctctgtcgcccaggctggagggcagtggcacgatctcagctcactgcaagctccaactcccgggttcacgccattctcctgcctcagccttccaagtagctgggactacaggtgcccgccaccgtgcccggctaatttttttgtatttttagtagagacagggtttcaccatgttagccgggatggtcttgatctcctgacctcatgatccacccacctcagcctcccaaagtgttgggattacaggcgtgagccactgcgcccgggcaagacctttttttaaaaaaaaaaaaaaaaaaacttccattctttcttcctccagtctgttctcacataacagagtagttttggtttttaattttttttggttgtttgctgttttttgttttttaaggtgagttctcactatgtttctcagactggtctcgaactcctggcctcaagccatcttcccgcctcagcctctcaaatagctgggcttacaggcatgagccaccacacctggccaggatttggttgtttaaatataaatctgatcacccccctgcttagaacccttctgctttctattacccctcatttaaaatgtaaactcttcaccttggtttatgagaactggttcttgccttccccttgaacctcattaaatggtgatttcttgctaagctccagcccgagtggtctcctctcagcttctaattttgtgctctttcctgcccttttcctgggccttctcagctctccacccccaccactcttgactcaggtggtgtccttcttcctcaagtcttgacaattcccgggcccttcagtccctgagcagtctacttctgtgtctgtcaccacatcttgtcttttcccctcattgcatttattgcagtttatatatatgctacttttacttgttcatttctgtctcccctaccaggctgtaaatgagggcagaaaccttgtttgttttattcaccatcatgtaccaagtgcttggcacatagtgggccttcattaaatgtttgttgaataaaagagggaagaaggcaagccaaccttagctacaatcctaccttttgataaaatgttccttttgacaatatacacggattattatttgtactttgtttttccatgtgttttgcttttatccactggcatttttagctccttgaagacatatcatgtgtgagataacttccttcacatctcccatggtccctagcaaaatgctaggcctgtagtagtcaaggtgctcaataaatatttgtttgggtggtttgtgagccttgctgccaagtcctgcctttgggtcgacatagtatggaagtatttgagagagagaacctttccactcccactgccaggattttgtattgccatcgggtgccaaataaatgctcatatttattaaaaaaaaaaaaaaaaaaa

SEQ ID NO: 30988 - DNA, 3766 bp, Homo Sapiens
gaacgatttaaggagcgaatactactggtaaactaatggaagaaatctgctgcaccactggatattgggagtgtgtggcatgcatcctcatcatcaggaaactctaaaaaagaaccgagtggtgctagccaaacagctgttgttgagcgaattgttagaacatcttctggagaaggacatcatcaccttggaaatgagggagctcatccaggccaaagtgggcagtttcagccagaatgtggaactcctcaacttgctgcctaagaggggtccccaagcttttgatgccttctgtgaagccttgcactcctgaattttatcaaacacacttccagctggcatataggttgcagtctcggcctcgtggcctagcactggtgttgagcaatgtgcacttcactggagagaaagaactggaatttcgctctggaggggatgtggaccacagtactctagtcaccctcttcaagcttttgggctatgacgtccatgttctatgtgaccagactgcacaggaaatgcaagagaaactgcagaattttgcacagttacctgcacaccgagtcacggactcctgcatcgtggcactcctctcgcatggtgtggagggcgccatctatggtgtggatgggaaactgctccagctccaagaggtttttcagctctttgacaacgccaactgcccaagcctacagaacaaaccaaaaatgttcttcatccaggcctgccgtggagatgagactgatcgtggggttgaccaacaagatggaaagaaccacgcaggatcccctgggtgcgaggagagtgatgccggtaaagaaaagttgccgaagatgagactgcccacgcgctcagacatgatatgcggctatgcctgcctcaaagggactgccgccatgcggaacaccaaacgaggttcctggtacatcgaggctcttgctcaagtgttttctgagcgggcttgtgatatgcacgtggccgacatgctggttaaggtgaacgcacttatcaaggatcgggaaggttatgctcctggcacagaattccaccggtgcaaggagatgtctgaatactgcagcactctgtgccgccacctctacctgttcccaggacaccctcccacatgatgtcacctccccatcatccacgccaagtggaagccactggaccacaggaggtgtgatagagcctttgatcttcaggatgcacggtttctgttctgccccctcagggatgtgggaatctcccagacttgtttcctgtgcccatcatctctgcctttgagtgtgggactccaggccagctccttttctgtgaagccctttgcctgtagagccagccttggttggacctattgccaggaatgtttcagctgcagttgaagagcctgacaagtgaagttgtaaacacagtgtggttatggggagagggcatataaattccccatatttgtgttcagttccagcttttgtagatggcactttagtgattgcttttattacattagttaagatgtctgagagaccatctcctatcttttatttcattcatatcctccgccctttttgtcctagagtgagagtttggaaggtgtccaaatttaatgtagacattatcttttggctctgaagaagcaaacatgactagagacgcaccttgctgcagtgtccagaagcggcctgtgcgttcccttcagtactgcagcgccacccagtggaaggacactcttggctcgtttgggctcaaggcaccgcagcctgtcagccaacattgccttgcatttgtaccttattgatctttgcccatggaagtctcaaagatctttcgttggttgtttctctgagctttgttactgaaatgagcctcgtggggagcatcagagaaggccaggaagaatggtgtgtttccctagactctgtaaccacctctctgtctttttccttcctgagaaacgtccatctctctcccttactattcccactttcattcaatcaacctgcacttcatatctagatttctagaaaagcttcctagcttatctccctgcttcatatctctcccttctttaccttcatttcatcctgttggctgctgccaccaaatctgtctagaatcctgctttacaggatcatgtaaatgctcaaagatgtaatgtagttctttgttcctgctttctctttcagtattaaactctcctttgatattatgtggcttttatttcagtgccatacatgttattgttttcaacctagaaacctttatccctgcttatctgaaacttcccaacttccctgttctttaagactttttttttttttttttttttttttgagacagagtctcgctctgtcgcccaggctggagggcagtggcacgatctcagctcactgcaagctccaactcccgggttcacgccattctcctgcctcagccttccaagtagctgggactacaggtgcccgccaccgtgcccggctaatttttttgtatttttagtagagacagggtttcaccatgttagccgggatggtcttgatctcctgacctcatgatccacccacctcagcctcccaaagtgttgggattacaggcgtgagccactgcgcccgggcaagacctttttttaaaaaaaaaaaaaaaaaaacttccattctttcttcctccagtctgttctcacataacagagtagttttggtttttaattttttttggttgtttgctgttttttgttttttaaggtgagttctcactatgtttctcagactggtctcgaactcctggcctcaagccatcttcccgcctcagcctctcaaatagctgggcttacaggcatgagccaccacacctggccaggatttggttgtttaaatataaatctgatcacccccctgcttagaacccttctgctttctattacccctcatttaaaatgtaaactcttcaccttggtttatgagaactggttcttgccttccccttgaacctcattaaatggtgatttcttgctaagctccagcccgagtggtctcctctcagcttctaattttgtgctctttcctgcccttttcctgggccttctcagctctccacccccaccactcttgactcaggtggtgtccttcttcctcaagtcttgacaattcccgggcccttcagtccctgagcagtctacttctgtgtctgtcaccacatcttgtcttttcccctcattgcatttattgcagtttatatatatgctacttttacttgttcatttctgtctcccctaccaggctgtaaatgagggcagaaaccttgtttgttttattcaccatcatgtaccaagtgcttggcacatagtgggccttcattaaatgtttgttgaataaaagagggaagaaggcaagccaaccttagctacaatcctaccttttgataaaatgttccttttgacaatatacacggattattatttgtactttgtttttccatgtgttttgcttttatccactggcatttttagctccttgaagacatatcatgtgtgagataacttccttcacatctcccatggtccctagcaaaatgctaggcctgtagtagtcaaggtgctcaataaatatttgtttgggtggtttgtgagccttgctgccaagtcctgcctttgggtcgacatagtatggaagtatttgagagagagaacctttccactcccactgccaggattttgtattgccatcgggtgccaaataaatgctcatatttattaaaaaaaaaaaaaaaaaaa

SEQ ID NO: 30989 - DNA, 4258 bp, Homo Sapiens
cagaaaaaactcagggcaaggttggccttggctcataagaccttttcaaactttattgagtcaatggttctagagaaagagaacacccatgaacgttccccaagttctcccaagggcgagaaggggaagagcaggctgcgccagggttcctggcgggcgtttctgaaaagcaaagatgccggaagccccaaaaagcccaccctagtgagtctgcctctaggacccgaagttctctccccagcagagactgacagccactgtgaggaacgggcggaggacaaagagggctatgtttttagcgatcactgggcaccgccacttgcctccacacctttgtcctccagtttagtttctccagaacacaggaggaaaagtgaaccgaccatcaagtgcacagccacccaggaaggcgacgctaaaccaagatgagcagaaggaagagagcagggaaggaggccagggtccgcgcggcttgggcacagtgccctggctcagggaccttcctgggagtgagaaccacatgccctgggaagaaccagcaggtgagaagcccagttgctctcacagtcagaaggcgttccacatggagcctgcccagaagccctgcttcaccactgacatggtgacatgggccctcctctgcatctctgcagagactgtgcgtggggaggctccttcacagcctaggggcatccctcaccgctcgcccgtcagtgtggatgacctgtggctggagaagacacagagaaagaagttgcagaagcaggcccacgtcgaaaggaggctgcacataggggcagtgcacaaagatggagtcaagtgctggagaaagacgatcattacctctccagagtctttgaatctccctagaagaagccatccactctcccagagtgctccaacgggactgaaccacatgggctggccagagcacacaccaggcactgccatgcctgatggagctctggacacagctgtctgcgctgacgaagtggggagcgaggaggacctgtatgatgacctgcacagctccagccaccactacagccaccctggagggggtggggagcagctggctatcaatgagctcatcagcgatggcagtgtggtctgcgctgaagcactctgggaccatgtcaccatggacgaccaggagctgggcttcaaagctggggacgtcatcgaagtgatggatgccaccaacagagagtggtggtggggccgggtcgccgatggcgagggctggtttccagccagcttcgttcggctgagggtgaatcaggacgagcccgcggatgacgacgcccctctggccgggaacagcggagcggaggacggcggggcggaggcgcagagcagcaaggaccagatgcggaccaacgtcatcaacgagatcctcagcactgagcgggactacatcaagcacctgcgcgacatctgcgagggctacgtccggcagtgccgcaagcgcgcagacatgttcagcgaggagcagctgcgtaccatcttcgggaacatcgaggacatctaccgctgccagaaggccttcgtgaaggccctggagcagaggttcaaccgcgagcgcccacacctgagcgagctgggtgcctgcttcctggagcatcaagccgacttccagatctactcggagtactgcaataaccaccccaacgcctgcgtggagctctcccggctcaccaagctcagcaagtacgtgtacttcttcgaggcctgccggctgctgcagaagatgattgacatctccctggatggcttcctgctgactccggtgcagaagatctgcaagtaccctctgcagctggccgagctgctcaaatacacgcacccccagcacagggacttcaaggatgttgaagccgccttgcatgccatgaagaacgtggcccagctcatcaacgagcggaagcggagacttgagaacatcgacaagattgctcagtggcagagctccatagaggactgggagggagaagatctcttggtcaggagctcagaactcatctactcgggggagctgactcgagttacacagcctcaagccaaaagccagcagcgaatgttctttctctttgaccaccagctcatctactgtaagaaggacctgctccgccgcgacgtgttgtactacaagggccggctggacatggacggcctggaggtggtggacctggaggacgggaaggacagagacctccatgtgagcatcaagaacgccttccggctgcaccgtggcgccacaggggacagccacctgctgtgcaccaggaagcccgagcagaagcagcgctggctcaaggcctttgccagggagagggagcaggtgcagctggaccaggagacaggcttctccatcactgaactgcagaggaagcaggccatgctgaatgccagcaagcagcaggtcacagggaagcccaaaggtaggcggacagcagccccacctcctcggctgcccggtccttaccctgctgacatcattcccttctctgaaccacaaagccaagccagctagccaccaggcctgaggggggcccactgccctttgcagctgtttgttcccaaaggttggtaataaggggccactggggaagcctgggtcagtatatggttgacattcttactctcaacaccttggctcccccagatcagggccattggtgacaatgcttgtttccccagggttccttcctgacaggcatctggggttggtgtagggatggagctgctttccccatttctacagagagccatgcccctgaaacatcacatgcctttgcacaggccacccccctcttcaggctgctgcaggaggccaggcccaggccagagaccccaggcagcctgagctcttggatgtggtcagctctccaggagcaagtcctgtgtggcaaaactgcctcctacggcggctctgaagcagagccctgggacggaccccatgctgtccccaacagctggggtggcactctgccctgggcacccatgaccctctgctgtctctccctgttcagctgttggccggccctgctacctgacgcgccagaagcacccagccctgcccagcaaccggccccagcagcaggtcctggtgctggcggagcccaggcgcaagccatctaccttctggcacagcatcagccggctggcacccttccgcaagtgaactggtccctgcctgacagcacctgctgggccttcctgccagtggcccccagtttttcttccccgaggcccactcggcctggccttcctctgcctgcaagtgagcagggatgggctggggagttgcttgtgccaccaagacgtgccaggtctgtactcctgttgtctttttccctgctcctggtgccctgaagagaccagcaagggggcagaccccgcactcgccacaccgccgctgcagcttgggccccatccgccctctggacctgtgtagggcctcactgctggagcggggaaaccgcagctcagcccaggcccagctggggagaaggcgctacctgcgtgggaccctcttctctggaaacctaatcctcctttcatttcctctgggcaggactctctggccttctgtggcctgcaatgccaggccatgtgcccctctgccctctagttctccaagtccccagcccggccagtggtgccaggcagcttgccacttgggagggcagaagccaggaattccacacccttgtgttgcgcccggagcccgcccttcgcctcccagcccctcaagacaccgctggctgctggacaccctcttcacttgtgtgtgtgtgtgtagcggaaaaggacaagacggtgcagtcggctgcatactcccagtcgggagtgtggtcagtctgcctgctgctgtgcggtagctccagaaccacctcgttcctggttttgtttggattttggcatcttgtttttctaacaacaaacaatggagaaaaagaattgattcttagtgacacagaagattgccttacgctcgtgagcgtgagaagccataagagagagaccgaattctgtggctcagcacacaggactgacccacagcccaggcagcgggtgtgtggagatggcgccctgtcctgccaaggggcgccaggagcagagccagggcctggcgagctggcgtggagcccacaggattcagcagcatggacagtcactcttgcactattccttctccaagccagaaaccacatttaatttcataaataaatttatgaaaagtaacctggctgct

SEQ ID NO: 30990 - DNA, 2482 bp, Homo Sapiens
gacttccggccgcgcagcggtgggctgagctaaaatggctgaggagagagtcgcgacgagaactcaatttcctgtatctactgagtctcaaaaaccccggcagaaaaaagctccagagtttcctattttggagaagcagaactggttgattcatcttcattatatccggaaagattatgaagcctgcaaggctgttatcaaagaacagcttcaagagactcagggattgtgtgaatatgctatctatgtccaagcattgatatttcgcctagaaggaaatatccaagaatccctagaactcttccagacatgtgcagttcttagtcctcagagtgctgataacctcaagcaggtggccagatctttatttcttttgggaaaacataaagctgccattgaagtatataatgaagcagctaaactcaaccagaaagattgggagatcagccataacctaggagtttgctacatatacctgaagcagttcaacaaggcacaagaccagttgcacaatgccctgaatcttaataggcacgatctgacttatataatgctggggaagatccacttgctggagggagacttggacaaggccattgaagtctacaagaaagcagtggagttctcaccagaaaatacagagcttcttacaactttaggattactctacttacagctcggcatttaccagaaggcatttgaacatcttggcaatgcactgacttatgaccctaccaactacaaggccatcttggcagcaggcagcatgatgcagacccacggggactttgatgttgccctcaccaaatacagagttgtggcttgtgctgttccagaaagtcctccactctggaataacattggaatgtgtttctttggcaagaagaaatatgtggcggccatcagctgcctgaaacgagccaactacttggcacccttcgattggaagattctgtataatttgggccttgtccatttgaccatgcagcagtatgcatcagcttttcattttctcagtgcggccatcaacttccagccaaagatgggggagctctacatgctcttggcagtggctctgaccaatctggaagatatagaaaatgccaagagagcctacgcagaagcagtccacctggataagtgtaaccctttagtaaacctgaactatgctgtgctgctgtacaaccagggcgagaagaagaacgccctggcccaatatcaggagatggagaagaaagtcagcctactcaaggacaatagctctctggaatttgactctgagatggtggagatggctcagaagttgggagctgctctccaggttggggaggcactggtctggaccaaaccagttaaagatcccaaatcaaagcaccagaccacttcaaccagcaaacctgccagtttccagcagcctctgggctctaatcaagctctaggacaggcaatgtcttcagcagctgcatacaggacgctcccctcaggtgctggaggaacatcccagttcacaaagcccccatctcttcctctggagccagagcctgcggtggaatcaagtccaactgaaacatcagaacaaataagagagaaataagaatagaatgaatgaccccaaaatagggttttcttgggcgaggatgtgctggattaggaaaggtgacatgacacaggcagagcagagtggcacccaccacagaatacagtgtgtgttattacgaggagccagcagttgagcctaaggtccttctacctacctggtattggcatttgaggtcggaaaccctctactgccccataagccaggaaaagtgaaaagagaacacagttcctttaagaactggcagcaaggcttgaggccttatgtatgtagctgagtcagcaaggtacatgatgctgtctgctttcaaaaggacttttctctcctagctgactgactccttccttagttcaaggaacagctgagacagacctctgctgagtagctctgtgatgacaaagccttggtttaactgaggtgatcctcaggttgtgaggtttattagtccccaaggcaaacacaaatattagattaataatccaactttaatagtatacatttaaaagaaaaaaaacaaaagccctggaagttgaggccaagcctgctgagtattgcagctgcatttgcccaaagggaatccagaacaagtccctccctgtattttgttcttgagaggggtcagtctagaagctagatcctatcaggatgaggagcagcagcccagggcttgtctggatcagcaccaacgattttaaagaaaaaaggaagagtttcttagatgagtaattgttattgaagatagtcagtgataaccactgaccagatgctatcaatacactatgtgtcctttttagaataaagattacatatcatcattcctttggggaaaattgttattcaggtataaaaacaagagatcataataaaaacctaaaagaacctatg

SEQ ID NO: 30991 - DNA, 2990 bp, Homo Sapiens
gcggttcctctaggaaaattcctttgtgcagatcaggcccgtggattggtgagtgaatcctaaccacgtcttccctggcctgtcttcactcttctccccagaatcaccacttctgcactggtgtctgaaggtgtattgagtgattttgtggagggcagaagtaggaagtctttgggacaaaactgtatttaccttgggatctgtgaacaagaggaacctcagcagccaggacaggcaggagcagtggaatagctactatggcttctggaatcctggttaatgtaaaggaggaggtgacctgccccatctgcctggaactcctgacacaacccctgagcctggactgcggccacagcttctgccaagcatgcctcactgcaaaccacaagaagtccatgctagacaaaggagagagtagctgccctgtgtgccggatcagttaccagcctgagaacatacggcctaatcggcatgtagccaacttagtggagaagctcagggaggtcaagttgagcccagaggggcagaaagttgatcattgtgcacgccatggagagaaacttctactcttctgtcaggaggacgggaaggtcatttgctggctttgtgagcggtctcaggagcaccgtggtcaccacacgttccccacagaggaggttgcccaggagtaccaagtgaagctccaggcagctctggagatgctgaggcagaagcagcaggaagctgaagagttggaagctgacatcagagaagagaaagcttcctggaagactcaaatacagtatgacaaaaccaacgtcttggcagattttgagcaactgagagacatcctggactgggaggagagcaatgagctgcaaaacctggagaaggaggaggaagacattctgaaaagccttacgaactctgaaactgagatggtgcagcagacccagtccctgagagagctcatctcagatctggagcatcggctgcaggggtcagtgatggagctgcttcagggtgtggatggcgtcataaaaaggacggagaacgtgaccttgaagaagccagaaacttttccaaaaaatcaaaggagagtgtttcgagctcctgatctgaaaggaatgctagaagtgtttagagagctgacagatgtccgacgctactgggttgatgtgacagtggctccaaacaacatttcatgtgctgtcatttctgaagataagagacaagtgagctctccgaaaccacagataatatatggggcacgagggacaagataccagacatttgtgaatttcaattattgtactggcatcctgggctctcaaagtatcacatcagggaaacattactgggaggtagacgtgtccaagaaaactgcttggatcctgggggtatgtgctggcttccaacctgatgcaatgtgtaatattgaaaaaaatgaaaattatcaacctaaatacggctactgggttatagggttagaggaaggagttaaatgtagtgctttccaggatagttccttccatactccttctgttcctttcattgtgcccctctctgtgattatttgtcctgatcgtgttggagttttcctagactatgaggcttgcactgtctcattcttcaatatcacaaaccatggatttctcatctataagttttctcactgttctttttctcagcctgtatttccatatttaaatcctagaaaatgtggagtccccatgactctgtgctcaccaagctcttgaaccttcttacacactcagccccttctgtacagcacctcttgtccaggtgcatctcatacacctgaactcatttgcatcattttaaccatcttttccttgctgtctcccttctttctatttgaacgtccttcactcatcagtaaaatgtaataattgccttgtgccatattgtccccaatattttattgacatttgatagcaatttttttcatcattttccgtactcctaaggaaaactgacctatacctcataaaatgagaccgctatttaggtattacttctgccagatatttatcacccaattgcctctgacactgactaagaagatgaagaaaagcttttcaacagcctttctatatcatcgtgtgataattgttcaccaatgaatgagtccttagccctgtgtcagtttaccctcgatgcccttatttgtgagttaaagagaaaatatcataaatggtatactcttaagtatagaggttttgtatctagaggatctcagttcaactcctgtctctccatataccagcagtgtaactgtgaataacatacttaaatggctgtgcttatttccttttcttttcttttttctttttttttttttttgagatgaagttttgctcttgttccccaggctggagtgcaatggcacgatctcggttcactgcaacctccacctctcagattcaagcaattctcctgcctcagcctcccaagtagctgggattacaggtgcccaccaccacccctggctaaatttgtattttcagtagagacggggtttccccatgttggttaggctcgtctagaacctctgacctcaggtgatccacccgcctcggcctcccaaagtgctgggattacaggcgtgagccacggcgcccagcctgtgcttattttcttaaaataatttttgtattaaaaacttcacattaaataagtgctaatgttttattgcatagtagggtgactagagttaacaataacctattgcatatattttgaaatagctagaagagaggattttgaaagttctcaacacaaagaaacgacacatatttgaggtgatggatatgctaattaccctggttcggttattacgcaatgtatacatgtatcaaaacatcacactgtaccacataaatatgtatatttattatttgtcaattaaaagcaaaataaaacaaaaaaccttcatctaatactttggatcattgtgaaaaaataaattcctgaagtataaagcatct

SEQ ID NO: 30992 - DNA, 19271 bp, Homo Sapiens
ggctctgattcagttttctttttcttctcttttccttttttttttttttttttttttttttttaggaatgcagagcagttgctggggtgattgacctaggcacagtggagatatttcccatcttcaaagccatgcaaaagggcctccttgaccaagacacaggcctagtgcttctggaatctcaggttatcatgtctggcctcattgcccctgagacgggtgaaaacctctctttggaggagggcatagccagaaacctcattaatccccagatgtaccagcagctccgggagctacaggatgccctggccttaataagcaggcttactgagagcagaggccctctttctgtggtggaagcaattgaaaagagaataatcagtgagacagttggactgaaaatcttagaagctcacctggcaactggaggtttcagtctttcccctagtgagaactgtattaacctggaagaggcttttcatcaaggcctcatttctgcatggcttcattcagtattagagtcttatcttagaacatccaagaatttgatagaccctaacacagctgagaaaattggtttgctggatctgatgcagcgatgtattgtccaccaggaatcaggattcaaattactgcctgtcaaacaattggcaggggggatggtgagcttgaaatcaggccggaaggttagcattttccgtgcagttcaggaagggctaatagataggcaggtcactgtccggttgctggaagctcagctttttgctggtggcatagtagatccaagaacaggacacagacttacagtggaagaggctgtaagacataatctgattgaccaagatatggcctgtgctatcctcataaggcagcttcagacaggaggcatcatagacactgtcacggggcaaaggctaacaatagatgaagcagtgagcaatgatctagtagctgctaagatcgcccttgtgattctggagtccctctggtcattcatggggttgctgtggcctgaatctggagagatcctcccaattacagatgccctagaacaaggtattgtgtctactgaactagcacataaaatccttagtaaccgacagcatattaaggctctgtttctaccagcaaccacagagattttgtcctggaagaaagcaatagaaagtggtatcctggatagagatcttgccaataacttaaaatcgatttgtatacctgatgtgatgccccacatgcaactagcagactctgcagaacaaaatattaatcctggagcagcagttctaccgtgcagcaagagccaccctaaggccacagcaagccagagtgagaatctgttgttccagctgatgactcacagctatattaatgtgcaaaatggacagaggctgcttctgttagataaagagctgatggagacactaacatccagagatgagtatcaaacaagtcctccaaaagtggttgaaattgggcatcaaaggcaaaaaactcctgagggattgcaagaatcagctaatgtgaaaatctcaggaactttcagcagtgggtggactgtgaggctgcctgagttccagttttcttctcagaacaaagaatatcccgatcgggaagattgcactacagaaaaaggcaaaaagaccactgtagaaacagaagattcttctgtagagaaccctgaacaggatctgtttgtagaacaaaaagagagaaatccaaacattgatgctttgaaggtaataaataaagtcaaattagaggtacaaaggcagttgataggtacccaaagggaagaccaaacagcagtgtctgtcagagaaaatgccagcaggggacacctcctgaccatacctcctgctgaggcggaaggtgtgccgttggtggttgacaaagatgttttttctgttgaaacaccaaagaaagaacatcaacctctaagaaacacttcctttacatgtcagaatgaacaagcacacactcttgagactgaatatattcatgatgaaactggaggatctcacataaaaccccaaagcaaaaagttacaagttcaggtaaagaaaactctaggtataaagttagaactaaagtctgaaactgatgggaatgttcatcctctggacaaaaaggaaatgttaaagaaaacatttctggctaaggatgaccataaagaaagtcaagaagcacagaacatcgcaggtggtagtatgatgatgtcagaaaagaccgatgaggaagatagtggcagggaaatttttctgtcatgcagtcatccattagaattgcttgaagaagctaccttaaatgtattatctgcacagttactagatggtggtatctttcatgaacaaacaggtcaaaagctcttactaaatgaagcaatatcccgaggcattgtgccaagtcacactgccgtgaagcttatggagaagctgaacatgtttcaggggttctttgactctcagacttgtgagtctttgacaactgaagaagtcattaatgaaggtctgatggatgagaaattattacataatgtcctcatggcagacaaagctataagtggtgtcttagacccccgtacccagacactgtgctctgtaaaggatgcagttacagttggacttcttgacaaggaaacagccaccagaattttagagaggcaggtggtgactggtggaattattgatctgaaacgaggcaaaaaagtttcagtaactttggcctcaactcttggcttggtggacgttgctgaccagccagaacttataaatctggagaaagcttccaaaggtagagatgctgaaaaaacagttagggagagattaattagtttacaaatggaaacaacaggacttatagaccctgatagtaaagcacctttaacagttgtgcagtccattgacagaggtcttttggagagagaggaggccgttcgtttgttgactaagcaagtggtagatggaggtatcattcaccatatatctgggatgagactttctgttgataatgccttcagacatggcttaattggtgaagatttagccgagaaactcaaaagagttgagaacttaaacatccatcagatttttaatcctgaaacgaaggaaaatatttccctccctaaagccataaaattagatcttattacctcagacctgaaaagagaaatccaggaggttcaggcctttactggaaactttgtggatctcatttctggtcagagattgaccttggcagaagctaaaaaagaaggactgttaactaatgaagcagtattgtctccaggaatgatgcatggcattgtagatcccgagaactgcagaattgtcccctactcagaattagtcaagaaatgtaagattgatattgaatctggacagagatatctagaagtaattcccttctcagacattaaagatggggtgagcgacaaagtgcttacattgtctcaagcaattcagcttggaaaagtagactttgcatctacgctgaaggttctagaagcccaggcaaatactggtggaatcatagatactgctactggaaaaagactgacattggcatcagctttggaagagaaactggtggatgaaaacatggtcagaattattgcatctcatcaggtgttaaatggaggaattgttgacatatttagtgatcagagagtgactttagtagaagctattgagaaaagactgatcagccctgaactggcaaatatgatccaaatagatagttcagagttcagcgatcacagggctcagattgaaaagcaagaagggattgaagtgtgtgcattacaaaatgaatttctaggaaaggatatgttaattgcttgtaatcagactgctgaaatgagttgtaataaagtagaagagagtgagagattatttcaagttgaaaatcagtctgcacaagaaaaggttaaagtgagagtttctgatggggagcaggcaaaaaagagcagggaaatttccttaaaggaatttgggtgcaaggatcaacgtaagccaagaatgtcttcagatgctaaagaatttatcagtatcataaatcctcataatcttaaaggtaaatccttgggccaagtgtcattgacacacccttactctgaatgtgattttaaacttaaagaagtggctagaaataacatgggaaatgatacaaatgaagagcaggaaaaagcagtgacaaaaatagaaattatttctcatatgaagcagtctacctcatgtctagattctgaagaaataagagaaaatcaaggggaagtgattttggaagtacaagaaacatattgtgaaacgtcaggcaaattgccgagtgagcaggttttgcagcaaccaatgaatgctcgggtgaaaagtaagagagagaagagggaggtgattgtagaagaaagtatcagaacatgcaaaccagcatttctttctgaagaaaagttgtatcaggaaactgccattagagatgagcatgactcccatataaagagccaacctagggaaatgacctcaagtgaaaaagggaaagaagctgatacagaaatgggattttctattacttttaaaattgaagagtcctcttcccaagtggtacctcaaggaatttctgtaaaacatttagatgctttaacactcttcagctctaaacaggccaatgaaggaaaagtaaacaatttaagtctctgcttgactttaaaaccagaagaaaacttatctcgagaaattgcctgtggggcccagagtgaaccattcccttgtatgaccccaagacctgaaggattgcactaccaggaatcagatggaaaagcccaagtgacaggcccatcccaaatttccaaaacagacaagtctttccaaggaaccaccagacaggagaccaactatcaagattcctgggttacttcgaaaactaaggaaaccaaacatcaaatttcctcatctaatgaatgtaaagaaaagtcataccaagaagtatcttttgacccagcaagaggtcttaaattggaagaaatcacagtttctagaccagattcaaaagaagtcaggtatctagaattctcagacagaaaagaccttcatcatcagggcagcaaaagtgatgataaactttgtggaactctcaaatctgaaatagcaacacaggaactaactggagagaaatttctagaaatggcaaaccctaatgttgcaggtctagaagcaggatccattgaggacatagtgactcagagaggttccagagtcttgggatcctttcttccagagaaactgttcaaaggagtgtctcaaaaagagaatacagggcaacagaatgccatcattagtcctactgttctagagaccagtgaagaaaagacagtgtccctaacagtatgctctgcagtgaagacagagaagacaccacaggaaaagctcagagaaagccctggcagtgaacaaactcccttcatgactgcacctgaaggaaagggaaatggaggtgtaaacccagagcccttcagagcaactcagaatgtatttacccggcaactctgtttagaacatgatgaaaagctagtatcctatctgtctctgttacggaacattgaaatgaggaccaaacagattcaacctttggagctaaacctggcagaactacaggatctgctgtgtcaggccaaggtattagaaagggagttaaaggatctgaccaccttggtcagtcaggagctggagtgtgtgaatcagattatcatcagccagcctcaagaagttcctgctcaactgttgaaggctctagagaaagatgccaagaatcttcagaagtctctcagctctgtgagtgacacttggaattccaggctactccacttccagaatgctgtggaaatagaaaagactaaagtgttaaatcagcacacacagctagaaggccgacttcaagatctgagagcctgggttggcaataaaaatcttattctgaacagcaagggatctaacagtgaaatagatgttgacagcctgaacctctgcctccaacagtatgaggatttgaaacagcccatggctgaaaggaaagctcagctggatgctcttgcttttgatattcagttctttatctcagaacatgcccaggacttgtcccctcagcagaatcgacagatgctgaggcttctgaatgaactgcagaggtccttccaggacattttggaacagactgccgctcaggtggatgccttgcagggccatcttcaacaaatggagcaggaagccctggtgaagaccctgcagaaacaacaaaatacctgtcaccagcaactggaggatctttgcagttgggtaggacaggcagaaagagcactggcaggccaccaaggcagaaccacccagcaggatctctctgctttgcagaagaaccaaagtgacttgaaggatttacaggatgacattcagaatcgtgccacctcatttgccactgttgtcaaggacattgaggggttcatggaagagaatcagaccaagctgagcccacgtgagttgacagctcttcgggaaaagcttcatcaggctaaggagcaatatgaggcgctccaggaagagacacgtgtggcccagaaggaactggaggaagcagtgacctccgccttacagcaggagactgaaaagagtaaagcagcaaaggaactggcagagaacaagaagaagatcgatgctctcctggattgggtaacttcagtaggatcatctggtggacagctgctgaccaaccttccaggaatggagcagctctcgggagctagcttggagaaaggagccttggacaccactgatggttacatgggggtgaatcaagccccagagaaactggacaagcaatgtgagatgatgaaggcccgtcaccaagaattgctgtcccagcagcaaaatttcattctggccacccagtcagctcaggccttcttggatcagcatggccacaatctcacacctgaggagcaacagatgctgcaacagaagctgggagagctaaaggaacaatactctacttccctggcccaatcagaggcagaactgaagcaggtgcagacacttcaggatgagttgcagaaatttctgcaggatcataaagagtttgaaagctggttggaacgatccgagaaagagctggagaacatgcataagggaggcagcagccccgagacccttccctccctgctaaagcggcaaggaagcttctcagaggatgtcatttcccacaaaggagacttgagatttgtgactatctcaggacagaaagtcttggacatggaaaacagttttaaggaaggcaaagaaccatcagaaattggaaacttagtaaaggacaagttgaaggatgcaacagaaagatacactgctctccactcaaagtgtacacgattaggatctcacctgaatatgctgttaggccagtatcatcaattccaaaacagtgctgacagcctgcaggcctggatgcaggcttgtgaggccaacgtggagaagctcctctcagatactgttgcctctgaccctggagttctccaggagcagcttgcaacaacaaagcagttgcaggaggaattggctgagcaccaagtacctgtggaaaaactccaaaaagtagctcgtgacataatggaaattgaaggggagccagccccagaccacaggcatgttcaagaaactacagattccatactcagccacttccaaagcctctcctatagcctggctgagcgatcttctctgctgcagaaagcaattgcccaatctcagagtgtccaggaaagcctggagagcctgttgcagtctattggggaagttgaacaaaacctggaagggaagcaggtgtcatcactctcatcaggagtcatccaggaagccttagccacaaatatgaaattgaagcaggacattgctcggcaaaagagcagcttggaggccacccgtgagatggtgacccgattcatggagacagcagacagtactacagcagcagtgctgcagggcaaactggcagaggtgagccagcggttcgaacagctctgtctacagcagcaagaaaaggagagctccctaaagaagcttctaccccaggcagagatgtttgaacacctctctggtaagctgcagcagttcatggaaaacaaaagtcggatgctggcctctggaaatcagccagatcaagatattacacatttcttccaacagatccaggagctcaatttggaaatggaagaccaacaggagaacctagatactcttgagcacctggtcactgaactgagctcttgtggctttgcgctggacttgtgccagcatcaggacagggtacagaatctaagaaaagacttcacagagctacagaagacagttaaagagagagagaaagatgcatcatcttgccaggaacagttggatgaattccggaagctggtcaggaccttccagaaatggttgaaagaaactgaagggagtattccacctacggaaacttctatgagtgctaaagagttagaaaagcagattgaacacctgaagagtctactagatgactgggcaagtaagggaactctggtggaagaaatcaattgcaaaggtacttctttagaaaatctcatcatggaaatcacagcacctgattcccaaggcaagacaggttccatactgccctctgtaggaagctctgtaggcagtgtaaacggataccacacctgcaaagatctgacggagatccagtgtgacatgtcagatgtaaacttgaagtatgagaaactagggggagtacttcatgaacgccaggaaagccttcaggctatcctcaacagaatggaggaggttcacaaggaggcaaactctgtgctgcagtggctggaatcaaaagaggaagtcctgaaatccatggatgccatgtcatctccaaccaagacagaaacagtgaaagcccaagctgaatctaacaaggccttcctggctgagttggaacagaattctccaaaaattcaaaaagtaaaggaagccctggctggattactggtgacatatcccaactcacaggaagcagaaaattggaagaaaattcaggaagaactcaattcccgatgggaaagggccactgaggttactgtggctcggcaaaggcagctagaggaatctgcaagtcatctggcctgcttccaggctgcagaatcccagctccggccgtggctgatggagaaagaactgatgatgggagtgctggggcccctgtctattgaccccaacatgttgaatgcacaaaagcaacaggtccagtttatgctaaaggaatttgaagcacgcaggcaacagcatgagcaactgaatgaggcagctcagggcatcctaacaggccctggagatgtctctctgtccaccagccaagtacagaaagaactccagagcatcaatcagaaatgggttgagctgactgacaaactcaactcccgttccagccaaattgaccaagctattgttaagagcacccagtaccaggaactgctccaggacttatcagagaaggtgagggcagttggacaacggctgagtgtccagtcagctatcagcacccaaccagaggctgtaaagcagcaattggaagagaccagtgaaattcgatctgacttggagcagttagaccacgaggttaaggaggctcagacactgtgcgatgaactctcagtgctcattggtgagcagtacctcaaggatgaactgaagaagcgtttggagacagttgccctgcctctccaaggtttagaagaccttgcagccgatcgcattaacagactccaggcagctcttgccagcacccagcagttccagcaaatgtttgatgagttgaggacctggttggatgataaacaaagccagcaagcaaaaaactgcccaatttctgcaaaattggagcggctacagtctcagctacaggagaatgaagagtttcagaaaagtcttaatcaacacagtggctcctatgaggtgattgtggctgaaggggaatctctacttctttctgtacctcctggagaagagaaaaggactctacaaaaccagttggttgagctcaaaaaccattgggaagagcttagtaaaaaaactgcagacagacaatccaggctcaaggattgtatgcagaaagctcagaaatatcagtggcatgtggaagaccttgtgccatggatagaagattgtaaagctaagatgtctgagttgcgagtcactctggatccagtgcagctagagtccagtctcctaagatcaaaggctatgctgaatgaggtggagaagcgccgctccctgctggaaatattgaatagtgctgctgacattctgatcaattcttcagaagcagatgaggatggaatccgggatgagaaggctgggatcaaccagaacatggatgctgttacagaagagctgcaggccaaaacagggtcactcgaagaaatgactcagaggctcagggagttccaggaaagctttaagaatattgaaaagaaggttgaaggagccaaacaccaacttgagatctttgatgctctgggttctcaagcctgtagcaacaagaacctggagaagctaagagctcaacaggaagtgctgcaggccctagagcctcaggtagactatctgaggaactttactcagggtctggtagaagatgccccagatggatctgatgcttctcaacttctccaccaagctgaggtcgcccagcaagagttcctcgaagttaagcaaagagtgaacagtggttgtgtgatgatggaaaacaagctggaggggattggccagtttcactgccgggtccgagagatgttctctcaattggcagacctggatgatgagctagatggcatgggtgctattggcagagacactgatagcctccagtcccaaatcgaggatgtccggctattccttaacaaaattcacgtcctcaaattagacatagaggcctctgaagcagagtgtcgacatatgctagaagaagaggggactctggatttgttaggtctcaaaagggagctagaagccctgaacaaacagtgtggcaaactgacagagagggggaaagctcgtcaggaacagctggaactgacactaggccgtgtagaggacttctacaggaaattgaaaggactcaatgacgcgaccacagcagcagaggaggcagaggccctccagtgggtagtggggaccgaagtggaaatcatcaaccaacaattagcagattttaaaatgtttcagaaagaacaagtggatcctcttcagatgaaattgcagcaggtgaatggacttggccagggattaattcagagtgcaggaaaagactgtgatgtacagggtttagaacatgacatggaagagatcaatgctcgatggaatacattgaataaaaaggtcgcacaaagaattgcacagctacaggaagctttgttgcattgtgggaagtttcaagatgccttggagccattgctcagctggttggcagataccgaggagctcatagccaatcagaaacctccatctgctgagtataaagtggtgaaagcacagatccaagaacagaagttgctccagcggctcctagatgatcgaaaggccacagtagacatgcttcaagcagaaggaggcagaatagcccagtcagcagagctggctgatagagagaaaatcactggacagctggagagtcttgaaagtagatggactgaactactcagtaaggcagcagccaggcaaaaacagctggaagacatcctggttctggccaaacagttccatgagacagctgagcctatttctgacttcttatctgtcacagagaaaaagcttgctaactcagaacctgttggcactcagactgccaaaatacagcagcagatcattcggcacaaggctctggaagaagacatagaaaaccatgcaacagatgtgcaccaggcagtcaaaattgggcagtccctctcctccctgacatctcctgcagaacagggtgtgctgtcagaaaagatagactcattgcaggcccgatacagtgaaattcaagaccgctgttgtcggaaggcagccctacttgaccaagctctgtctaatgctaggctgtttggggaggatgaggtggaggtgctcaactggctggctgaggttgaggacaagctcagttcagtgttcgtaaaggatttcaaacaggatgtcctgcacaggcagcatgctgaccacctggctttaaatgaagaaattgttaatagaaagaagaatgtagatcaagctattaaaaatggtcaggctcttctaaaacaaaccacaggtgaggaggtgttacttatccaggaaaaactagatggtataaagactcgttacgcagacatcacagttactagctccaaggccctcagaactttagagcaagcccggcagctggccaccaagttccagtctacttatgaggaactgaccgggtggctgagggaggtggaggaggagctggcaaccagtggaggacagtctcccacaggggaacagataccccagtttcagcagagacagaaggaattaaagaaggaggtcatggagcacaggctggtgttggacacagtgaatgaggtgagccgtgctctcttagagctggtgccctggagagccagagaagggctggataaacttgtgtccgatgctaacgagcagtacaaactagtcagtgacactattggacaaagggtggatgaaattgatgctgctattcagagatcacaacagtatgagcaagctgccgatgcagaactagcttgggttgctgaaacaaaacggaaactgatggctctgggtccaattcgcctggaacaggaccagaccacagctcagcttcaggtacagaaggctttctccattgacattattcgacacaaagattcaatggatgaactcttcagtcaccgtagtgaaatctttggcacatgtggggaggagcaaaaaactgtattacaggaaaagacagagtctctaatacagcaatatgaagccattagcctactcaattcagagcgttatgcccgcctagagcgggcccaggtcttagtaaaccagttttgggaaacttatgaagagctcagcccctggattgaggaaactcgggcactaatagcacagttaccctctccagccattgatcatgagcagctcaggcagcaacaagaggaaatgaggcaattaagggaatctattgctgaacacaaacctcatattgacaaactactaaagataggcccacaactaaaggaattaaaccctgaggaaggggaaatggtggaagaaaaataccagaaagcagaaaacatgtatgcccaaataaaggaggaggtgcgccagcgagccctggctctggatgaagccgtgtcccagtccacacagattacagagtttcatgataaaattgagcctatgttggagacactggagaatctttcctctcgcctgcgtatgccaccactgatccctgctgaagtagacaagatcagagagtgcatcagtgacaataagagtgccaccgtggagctagaaaaactgcagccatcctttgaggccttgaagcgccgtggagaggagcttattggacgatctcagggagcagacaaggatctggctgcaaaagaaatccaggataaattggatcaaatggtattcttctgggaggacatcaaagctcgggctgaagaacgagaaatcaaatttcttgatgtccttgaattagcagagaagttctggtatgacatggcagctctcctgaccaccatcaaagacacccaggatattgtccatgacttggaaagcccaggcattgatccttccatcatcaaacaacaggttgaagctgctgagactattaaggaagagacagatggtctgcatgaagagctggagtttattcggatccttggagcagatttgatttttgcctgtggagaaactgagaagcctgaagtgaggaagagcattgatgagatgaataatgcttgggagaacttaaacaaaacatggaaagagaggctagaaaaacttgaggatgctatgcaagctgctgtgcagtatcaggacactcttcaggctatgtttgactggctagataacactgtgattaaactctgcaccatgccccctgttggcactgacctcaatactgttaaagatcagttaaatgaaatgaaggagttcaaagtagaagtttaccaacagcaaattgagatggagaagcttaatcaccagggtgaactgatgttaaagaaagctactgatgagacggacagagacattatacgagaaccactgacagaactcaaacacctctgggagaacctgggtgagaaaattgcccaccgacagcacaaactagaaggggctctgttggcccttggtcagttccagcatgccttagaggaactaatgagttggctgactcataccgaagagttgttagatgctcagagaccaataagtggagacccaaaagtcattgaagttgagctcgcaaagcaccatgtcctaaaaaatgatgttttggctcatcaagccacagtggaaacagtcaacaaagctggcaatgagcttcttgaatccagtgctggagatgatgccagcagcttaaggagccgtttggaagccatgaaccaatgctgggagtcagtgttacagaaaacagaggagagggagcagcagcttcagtcaactctgcagcaggcccagggcttccacagtgaaattgaagatttcctcttggaacttactagaatggagagccagctttctgcatctaagcccacaggaggacttcctgaaactgctagggaacagcttgatacacatatggaactctattcccagctgaaagccaaggaagagacttataatcaactacttgacaagggcagactcatgcttctaagccgtgacgactctgggtctggctccaagacagaacagagtgtagcacttttggagcagaagtggcatgtggtcagcagtaagatggaagaaagaaagtcaaagctggaagaggccctcaacttggcaacagaattccagaattccctacaagaatttatcaactggctcactctagcagagcagagtttaaacatcgcttctccaccaagcctgattctaaatactgtcctttcccagatagaagagcacaaggtttttgctaatgaagtaaatgctcatcgagaccagatcattgagctggatcaaactgggaatcaattaaagttccttagccaaaagcaggatgttgttctgatcaagaatttgttggtgagcgtgcagtctcgatgggagaaggttgtccagcgatctattgaaagagggcgatcactagatgatgccaggaagcgggcaaaacaattccatgaagcttggaaaaaactgattgactggctagaagatgcagagagtcacctggactcagaactagagatatccaatgacccagacaaaattaaacttcagctttctaagcataaggagtttcagaagactcttggtggcaagcagcctgtgtatgataccacaattagaactggcagagcactgaaagaaaagactttgcttcccgaagatagtcagaaacttgacaatttcctaggagaagtcagagacaaatgggatactgtttgtggcaagtctgtggagcggcagcacaagttggaggaagccctgctcttttcgggtcagttcatggatgctttgcaggcattggttgactggttatacaaggtggagccacagctggctgaggaccagcccgtgcacggggaccttgacctcgtcatgaacctcatggatgcacacaaggttttccagaaggaactgggaaagcgaacaggaaccgttcaggtcctgaagcggtcaggccgagagctgattgagaatagtcgagatgacaccacttgggtaaaaggacagctccaggaactgagcactcgctgggacactgtctgtaaactctctgtttccaaacaaagccggcttgagcaggccttaaaacaagcggaagtgtttcgagacacagtccacatgctgttggagtggctttctgaagcagagcaaacgcttcgctttcggggagcacttcctgatgacacagaggccctgcagtctctcattgacacccataaggaattcatgaagaaagtagaagaaaagcgagtggacgttaactcagcagtagccatgggagaagtcatcctggctgtctgccaccccgattgcatcacaaccatcaaacactggatcaccatcatccgagctcgcttcgaggaggtcctgacatgggctaagcagcaccagcagcgtcttgaaacggccttgtcagaactggtggctaatgctgagctcctggaagaacttctggcatggatccagtgggctgagaccaccctcattcagcgggatcaggagccaatcccgcagaacattgaccgagttaaagcccttatcgctgagcatcagacatttatggaggagatgactcgcaaacagcctgacgtggaccgggtcaccaagacatacaaaaggaaaaacatagagcctactcacgcgcctttcatagagaaatcccgcagcggaggcaggaaatccctaagtcagccaacccctcctcccatgccaatcctttcacagtctgaagcaaaaaacccacggatcaaccagctttctgcccgctggcagcaggtgtggctgttagcactggagcggcaaaggaaactgaatgatgccttggatcggctggaggagttgaaagaatttgccaactttgactttgatgtctggaggaaaaagtatatgcgttggatgaatcacaaaaagtctcgagtgatggatttcttccggcgcattgataaggaccaggatgggaagataacacgtcaggagtttatcgatggcattttagcatccaagttccccaccaccaagttagagatgactgctgtggctgacattttcgaccgagatggggatggttacattgattattatgaatttgtggctgctcttcatcccaacaaggatgcgtatcgaccaacaaccgatgcagataaaatcgaagatgaggttacaagacaagtggctcagtgcaaatgtgcaaaaaggtttcaggtggagcagatcggagagaataaataccggttcttcctcggcaatcagtttggggattctcagcagttgcggctggtccgtattctgcgcagcaccgtgatggttcgcgttggtggaggatggatggccttggatgaatttttagtgaaaaatgatccctgccgagcacgaggtagaactaacattgaacttagagagaaattcatcctaccagagggagcatcccagggaatgacccccttccgctcacggggtcgaaggtccaaaccatcttcccgggcagcttcccctactcgttccagctccagtgctagtcagagtaaccacagctgtacatccatgccatcttctccagccaccccagccagtggaaccaaggttatcccatcatcaggtagcaagttgaaacgaccaacaccaacttttcattctagtcggacatcccttgctggtgataccagcaatagttcttccccggcctccacaggtgccaaaactaatcgggcagaccctaaaaagtctgccagtcgccctgggagtcgggctgggagtcgagccgggagtcgagccagcagccggcgaggaagtgacgcttctgactttgacctcttagagacgcagtctgcttgttccgacacttcagaaagcagcgctgcagggggccaaggcaactccaggagagggctaaacaaaccttccaaaatcccaaccatgtctaagaagaccaccactgcctcccccaggactccaggtcccaagcgataacactgtctaagcacccccaagccactatccactttgaatcctgctccatacattgggtgtatatttattctgaacgggagaagttatattgttaaaagtgtaaaagaataattgtgttatgaagctgccttattttttttctttttgtaagttactattttcatgtgaatatttatgtagataaaatttgcctcctggtaaccctgtaatggatggggcccagaaatgaaatatttgagaaaaacaagtgaaaaggtcaagatacaaatgtgtattaaaaaaaaaaaagcctattaatagggtttctgcgcggtgcagggttgtaaacctgctttatcttttaggattattcctaaatgcatcttctttataaacttgacttgctatctcagcaagataaattatattaaaaaaataagaatcctgcagtgtttaaggaactctttttttgtaaatcacggacacctcaattagcaagaactgaggggagggctttttccattgtttaatgttttgtgatttttagctaaagagagggaacctcatctaagtaacatttgcacatgatacagcaaaaggagttcattgcaatactgtctttggatattgtttcagtactgggtgtttaaaggacaaatagctgctagaattcaggggtaaatgtaagtgttcagaaaacgtcagaacatttggggttttaaactgatttgttgctccctatccagcctagacaccagtaactcttgtgttcaccaggacccagacccttggcaagggataggctcgttggtgacattgtgaatttcagatttgttttatccactttttttgctatttatttaaatggtcgatcaacttcccacaaactgaggaatgaattccacgagcctgttctgaaaatgtggacgtaagacaaacacgtgctcgtcctttaatggagttcaccagcacacttgttaaccagtcctgtttgctttcgtctttttttgtgcgtaataaagtcaactgaccaagtgaccatgaaaaggggctgtctggggctcctgttttttagctgctgttcttcagctccgaccatgttgctgtgtgattatctcaattggttttaattgaggcagaaactgaagctctaccaatgaactgtttagaaacaagacacacttttgtattaaaattgcttgcagtaacaaatattttgtatttcctgattttcttttcaactattaccttatctataaatgttaccctggggtataatcatgttgtaggtacttaaatgcattccgcaaatcaaaatatcttgatggataaattatagagctt

SEQ ID NO: 30993 - DNA, 4705 bp, Homo Sapiens
catcagttcctaaattcacctgcagggctagggccaggcgcactcaccccacagccagccccactgggcctcggaggcagaatacgggaagaaccgcgaaacaaccctaaaccaattctgaggaccacgaattcggattatccgggagttcttttgccatggcaccgcccccgccacttccgctaggaacccggaagttcctacccgacgccggaagtcccacggccttgcctcctcagattcctctctcacccccacgcagaggagagaacttgcttctggacccgggtgggtgccggctcggctctccttgtcttccagagcggtggcccggaagcacagtcctcccagacgccagcgccagaagctcggatcgcggctgcaccgggagagcgccgatctgggtgcgaggcaggtgcggggccatgaatgggaccgcaaacccgctgctggaccgcgaggaacattgcctgaggctcggggagagcttcgagaagcggccgcgggcctccttccacactattcgttatgattttaaaccagcatctatagacacttcctgtgaaggagagcttcaagttggcaaaggagatgaagtcacaattacactgccacatatccctggatccacaccacccatgactgtgttcaaggggaacaaacggccttaccagaaagactgtgtgcttattattaatcatgacactggtgaatatgtgctggaaaaactcagtagcagcattcaggtgaagaaaacaagagctgagggcagcagtaaaatccaggcccgaatggaacagcagcccactcgtcctccacagacgtcacagccaccaccacctccaccacctatgccattcagagctccaacgaagcctccagttggacccaaaacttctcccttgaaagataacccctcacctgaacctcagttggatgacatcaaaagagagctgagggctgaagttgacattattgaacaaatgagcagcagcagtgggagcagctcttcagactctgagagctcttcgggaagtgatgacgatagctccagcagtggaggcgaggacaatggcccagcctctcctccgcagccttcacaccagcagccctacaacagtaggcctgccgttgccaatggaaccagccggccacaaggaagcaaccagctcatgaacaccctcagaaatgacttgcagttgagtgagtctggcagtgacagtgatgactagtgctggatctttcgaaacctactttttggtgcacaaacatgccgcaagactgagctactttggcgtggagtccattgcaagaggaaaatgttatggatcagtgactgtagtaggagtttgaggctctggaactctcacatattcaagtctttaacttagtggtgatgggtgattttctcgtgtcatttttgaacaatctcatctttcaaagtttaagtagacctgtagaagagctaacagaattatatttctatttagttaaaattgttaatgaaaaacagataaatgtgccctggtctaagttactcaaaggccatatcttcaccaggccagagattcagttttaaacctcagcagccatcagtttggccaagtggttggtaccagtggaatgaagtctttgatgggtaggagagagagggaaaacctcaaactacatcatagaagtatgttaaaaccactttaaattgttgacacaaagtggtaaggaagttttgtctgactcagcctgacaagcctggatagaaatggacctcagaatacagaatggagtccttgagtgtcagttggtgaggaccatggagtcctgccagctcaacctgtcatttacagactaagaaagggaagtacacacctggcttgtggccagtctcctgccccctctctgggctttcctcactgttctctcccttgaatctcatttgtaggaatcaagagattcctatacatgggacttttagatgtacattggcacttggattagattccaaaagacaaaagtgttgggtgcttctagcttgaattcagtccctaaatacatgaggctgggtgagcagatgaaaccggtagccactgtgctgatgcatgtgactccattcagttggggattttggttccatgtggatccatactaagtattcttcagtcagtggattttagcaaggggaggtaggagtggaagagaggtgtgaagaaacctctccgaacaaatgaaccagcagtaagtttctaaaaatcagaatctagatagaagttctgcaatatgaaatgagcacattctttgataaggcgtatctattcatgcttttgtaccactgttttgtacctgactccctgaccgatttgtattttttatatacaactagaaggaagtcacaagattgccttctacagtgtgccatttccaaatggatctgttgttggaggaaactggttgctagtcaatgttctatatttaatgaatgtgtgataaatcatcctgtaatcagtatggagtaacctgtttttgtagtttggatgaatatgtcctgagaaatttccatccactttggttcagcggacatcaaggtagtaataataatttttcctccacaggtccctccactcatatggcctctccctccccagctagtggaggggaagcagtctggacttagaaaggaaataggtggtctgtcataggggctttcattagagttaaacttcatagagtcaactgtttcatcatcatagtgagcccagagagccactgcccagcagcatgctcacaccacctaccctagtgtaggtaataggtctacgctaggaccccgtgctgggctctcagcccatcatgagattttggtggatttaatggcaggtaggaacttatttatagtggattgataattgctttataattccttggtaatgacagctcagggaaggtttcacaaggtcatgatcaggagacttgaattgttactggatgtaggaattgtttcactgctcttaacttgctcaaactggggcaggttccaggaacttgaactaaaaatatctatttaagcctctctctctttctctcctccccaacttttttctgaaagccttgatttctgtagacagaactatggtttttggcatgttgggtcaagacgtgtttctataggaaatgcttgcacgtggcactggcttggtgagtcaagcttcctgagcttcagaccgtttgtcctgtcatctgtcctgcccaacactgtatggtttttctctagcacggcttcaattttgttctctgcacaaagcctttggtggttctgccctctgccctccagctttacccaccagagtaagcaatcttttctttttagaaatcaagaatttggcttcacagatggcttctcacagatgccctcctgccagccaaaccggacttgttcttcctgcctctgtgccttctctcattctccttctctccctccataccccacttttgaggttctgtgggtaccatctttgtggactcttgtcttttttttcaacccacatggagtgccctgtgtgtacatactgaccttttttttttttttttttttttgcttgaactctggtcggtatgagctccttaaaagcaggtactgggctggctgtggtgactcatgcctgtaatcccagcactttgggaggctgaggtgggaggattgcttgagtccaggagtttgagaccagcctgggcaacatggcgagaccctgtttctacaaaaagaaaaagggaaaaaaaaagcagggactgtcattctcatctcctccctggggtatccacaggaatggacattcaaatggttgtagcctggtggggtagaaggcagagaagactacccagccagtgaagtgcagaggatagacataggaaaacattccaggcatttggagacagctgaaagtatccatgctgactttcatgatttagaagtctttaactgaattattaaaattgccttttttttgtgctgtacaatgtctactgtactgtgggtcatttagatgagatgaaaaacttaattaaatctgaagtgtcagaggcgcttagtaagccttagtaaagttgtgattgaagaaacttaatacaaatgaactagaggtttgtaatcatgccactcactaacgattttatttctgtagcagaatcattttttctatgtaaggtgttaatgtgtgtgtatgtgctttggttgtaggaaaacttgaaaattccaaaatccttattttcctatttgagaggctggttcagcagggtgtgtgtgtgtgtgtgtgtgtgtgtgtatgaatggtatatttattacattattttgaaagagaattagtgtgttatgtggataatgttatatacagccaaagtggatgtttctatttggcaaggaaggtaggatttctgaaactcaggccttaaccaataggttggaagacaagaccaattgaagagttaggaaatgtgagtttttgttacttctgttattccagtcttggtttcattgtctcattctttatttttaaaatcttgtgcctaaaagtttttttgcttaattatgaagtagacatgcatgtttacatttatgtaaaatatttgctgtgtaaagtattttttgtttattctcttaaaagatcactatatttaaataaaagtgaaggtcagcaacacaaaaaaaaaaaaaaaa

SEQ ID NO: 30994 - DNA, 5189 bp, Homo Sapiens; identical to SEQ ID NO: 27190

SEQ ID NO: 30995 - DNA, 4871 bp, Homo Sapiens
ctggctctttttatgaatttggaagtttttagactaggtggttgtagtgttgcctcccgggtgttaggatccctgggcgtcacctctcagctcctgctttccatttcctcatcataaaccctgtttttgttctcactgtgaccctgttctgctttgaccctacagctcgctaccacctctgtggtttttttcttttcaggaagcttagggtggtaaatgcttttggccattcttgttcatactcatttattcagataccatttattaatagtaagcccctgctttgtgtaagcactttgttagacactagggtgctcctttgacccccccatcccactccattgtgagctggctcttgtcctcagggtcctgctcaacatcatgtacctgatagtggagaccgttcatcaggagtgtgagggtgacaaggctgagtggaggaccatgcggcagaccttcagagccgagctgggtaggaccctggggatcctctctagaggccctgcctggaagctgaggcggaaggctttgggagggtcctgatacctttgtgtcacctccaggctccccgctgtacaacaatgagccatttgccatcatgctgtttgggatggtgaccaaattttgcagtggtcacgcccctcactttcccatgaagaaagttctcttgctgctctggaagacagtattgtgcacgctaggcggctttgaggagctgcagagcatgaaggctgagaagcgcagcatcctgggcctccccccgcttcctgaggacagcatcaaagtgattcgcaacatgagagcagcctctccaccagcatctgcttcagacttgattgagcagcagcagaaacggggccgccgagagcacaaggctctgataaagcaggacaacctagatgccttcaacgagcgggatccctacaaggctgatgactctcgagaagaggaagaggagaatgatgatgacaacagtctggagggggagacgtttctcctggaacgggatgaagtgatgcctcccccgctacagcacccacagactgacaggctgacttgccccaaagggctcccgtgggctcccaaggtcagagagaaagacattgagatgttccttgagtccagccgcagcaaatttataggttacactctaggcagtgacacgaacacagtggtggggctgcccaggccaatccacgaaagcatcaagactctgaaacagcacaagtacacgtcgattgcagaggtccaggcacagatggaggaggaatacctccgctcccctctctcagggggagaagaagaagttgagcaagtccctgcagaaaccctctaccaaggcttgctccccagcctgcctcagtatatgattgccctcctgaagatcctgttggctgcagcacccacctcaaaagccaaaacagactcaatcaacatcctagcggacgtcttgcctgaggagatgcccaccacagtgttgcagagcatgaagctgggggtggatgtaaaccgccacaaagaggtcattgttaaggccatttctgctgtcctgctgctgctgctcaagcactttaagttgaaccatgtctaccaggtacccacagggctttccctcctgtcctgtgggctggggcctcgggcactgctgctcctccagcccacaagaacgggggccttggcctttgacccacttgaactctgcatgaatgttctaagacatggcccttcagccaaggcctttcatccctggaggaaagagggcaaggtcccaagggccgcgccttttttttttttttttttttcctgttggcttcagtttgaatacatggcccagcacctggtgtttgccaactgcattcctttgatcctaaagttcttcaatcaaaacatcatgtcctacatcactgccaagaacaggtgatgagggccagggaccatgaaggggtggatatggtcagacggcagagttcccagctggtatttcccactgtgtccatttttccagcacctacgagccagcactgtgctaggcatcaagacataaagataaatgagacatggcctctgcctgtggagagcccactgtgtcaaatctgagtctagctagtcctgccccaggtgacttggtctgtgcctgggcaggagggttttcatcccaggatctagtactttcctccctgtcccttctgtactttttttttttttttttgaggagtccatgggctgcttgctgtctctaaggggctcggccatgtgccttgtaatgccctatctgctgactcttagcccctgctgttggcctggtgccagctgtgcttgacattacttgctcgtcagtgtgatataccacagggcgccggccagaccctgtctccagaaaggtttggcataaattagttgccctgagcgatctcctcccccgccccacattgattgctgtgggggaagctgtgagggtctcttccccttacaagatcaacaagctggcctctggctacaggggtgctttacaagttctcttgtaacagatatttcctcatcttataggtggggaaactggggtgggacacatcaggtagattcctacttctgctccaacaagtgagggaggaaagctgggagctggctcaggcacggctgctccaccaggccctgggcctttgctcatggtgggcatctggttcctctcccctctgcagcatttctgtcccggattaccctcactgcgtggtgcatgagctgccagagctgacggcggagagtttggaagcaggtgacagtaaccaattttgctggaggaacctcttttcttgtatcaatctgcttcggatcttgaacaagctgacaaagtggaagcattcaaggacaatgatgctggtggtgttcaagtcagcccccatcttgaagcgggccctaaaggtgaaacaagccatgatgcagctctatgtgctgaagctgctcaaggtacagaccaaatacttggggcggcagtggcgaaagagcaacatgaagaccatgtctgccatctaccagaaggtgcggcatcggctgaacgacgactgggcatacggcaatgatcttgatgcccggccttgggacttccaggcagaggagtgtgcccttcgtgccaacattgaacgcttcaacgcccggcgctatgaccgggcccacagcaaccctgacttcctgccagtggacaactgcctgcagagtgtcctgggccaacgggtggacctccctgaggactttcagatgaactatgacctctggttagaaagggaggtcttctccaagcccatttcctgggaagagctgctgcagtgaggctgttggttaggggactgaaatggagagaaaagatgatctgaaggtacctgtgggactgtcctagttcattgctgcagtgctcccatcccccaccaggtggcagcacagccccactgtgtcttccgcagtctgtcctgggcttgggtgagcccagcttgacctccccttggttcccagggtcctgctccgaagcagtcatctctgcctgagatccattcttcctttacttcccccaccctcctctcttggatatggttggttttggctcatttcacaatcagcccaaggctgggaaagctggaatgggatgggaacccctccgccgtgcatctgaatttcaggggtcatgctgatgcctctcgagacatacaaatccttgctttgtcagcttgcaaaggaggagagtttaggattagggccagggccagaaagtcggtatcttggttgtgctctggggtgggggtggggtgtttctgatgttattccagcctcctgctacattatatccagaagtaattgcggaggctccttcagctgcctcagcactttgattttggacagggacaaggtaggaagagaagcttcccttaaccagaggggccatttttccttttggctttcgagggcctgtaaatatctatatataattctgtgtgtattctgtgtcatgttggggtttttaatgtgattgtgtattctgtttacattaaaaagaagcaaaaataattcccgttggcttgtctacaggaaatatggcctctacgtatctcctccaggtctagaaagtggttttttctgctagcattgctggtcaacgcttgtccttgtcaagctgcctgcctttcccatcctgggggaagaggagagagagttggcatttatccagtttatcaagaagtttactgtggaggatgaaaatatcacccagggaaatgtcaccaacaatttaaacaaggcagcctggatcaaaggctgagtcttctgcctcccatgacaaccttgctgagcctcagtttcctcatcagaaaggagagcctaccatgtgatccccatttgctggtaccaggatatagtggcacacacgacatgtgatccctgccttcacagtgcttacactttgctggaatggaagtgtctcatccacgttgaagaaaatcatcctcatttggctgtgaattagaatagaatctggtcttgtgagaagagttcctggctctgggcctcaactgtaaggtcagttcttcatttagggaaacatcagccccagcaccactttccgtttcattctctgcttccctcagcctgcaccacaggaaggacatgtgcttctttttcccccagtggatttccagaagggatagggacgatgagaaagaggtaacctcagatctgagatttgcttgacatacacaaaatttccttccaacagggaaaactcagttgctttttttccttcaaaggaaatacagttggtattacctttgtcctgtttagatactgaaatcctaaattgattcatataaaaattctgggtttgggaaccc

SEQ ID NO: 30996 - DNA, 5337 bp, Homo Sapiens
atgaggcgctgccggtgggccgccctggccctggggctgctgcgcctctgcttggctcaggccaacttcgccccgcacttcttcgacaacggggtcggcagcaccaacggaaacatggctctgttcagcctcccagaggacacccctgtaggctctcacgtatacaccctgaatgggacagaccctgagggagaccccatctcctaccacatcagctttgaccccagcactagaagcgtcttttctgttgaccccacttttggaaacatcaccctggttgaagagctggacagagagagggaagatgagattgaagccatcatcagcatttctgatggcctgaatctggtggccgaaaaagtcgtgatcctggtgaccgatgccaatgatgaggcgcccaggttcatccaggagccttatgttgccctggttcccgaggacatacctgctgggagcatcatctttaaggtccatgcagtggacagggacacaggctctggagggagtgtcacctacttcctgcagaacctgcactccccatttgccgtggaccgccacagcggtgtgctgcgcctccaggctggggccactctggactacgagaggtcccggacccactacatcaccgtggtcgccaaggatggcggtgggaggcttcatggggctgatgtggtgttctcagccaccaccacggtcacggtcaatgtggaggatgttcaggacatggcccctgtcttcgtgggcacaccctactatggctatgtgtacgaggacacccttccgggctcggaggtactgaaggtggtcgccatggatggagaccggggcaaacccaatcgaattctctacagccttgtaaatgggaacgatggagcctttgaaattaatgagacatctggagccatctccatcactcagagcccggcccagctccagagagaggtgtatgagctgcatgtacaggtgactgaaatgagccctgcggggagcccagctgcccaggccaccgtcccagtcaccatcaggattgtggacctcaacaaccacccgccaacattctatggagagagcggaccccaaaacaggtttgagctgtccatgaatgagcacccaccccagggagagatcctgcggggcctcaagatcaccgtcaatgactccgaccagggagccaatgccaaattcaacttgcagctggtgggacccaggggcatcttccgagtggttccacagacagtcctgaatgaagcccaagtcacaatcattgtggagaactcagctgccattgactttgaaaagtccaaagtattaaccttcaagctcctggctgttgaagtgaacaccccagagaagttcagttccacagcggatgttgtgatccagctcctggacaccaatgacaatgtccccaagttcgactccctctactacgttgccaggattcctgagaacgccccagggggctccagcgtggtggctgtcacagctgtggatccagatacaggaccctggggcgaagtgaaatattccacctatgggactggggcagacctcttcctgatccacccatccactgggcttatctacacccagccctgggctagcctggacgctgaggccactgccaggtacaacttctatgtgaaggcagaggacatggaaggcaagtacagcgtagctgaggtgtttatcacactgctggatgtcaatgaccacccccctcagtttggaaagagcgttcagaagaagacgatggtgctagggaccccagtgaaaattgaggccatagacgaggatgcagaggaacccaacaacctggtggactattccatcacccatgcagagcccgccaacgtgttcgacatcaattcccacacgggggagatctggctcaagaattccatccgctccctggatgccctgcacaacatcacacctggaagggactgcctatggtccctagaggtgcaggccaaggaccggggctccccatccttcagcaccacagccttactcaagattgacatcacagatgctgagaccctctcccggagccccatggctgccttcctgatacagaccaaggacaaccccatgaaggccgtgggtgtgctggccggcaccatggccaccgtcgtggccatcactgtcctcatctccaccgccaccttctggcgcaacaagaagtctaacaaggtcctgccaatgcggcgggtgctccgcaagcggcccagccctgcgccccgcaccatccgcattgagtggctcaagtccaagagcaccaaagccgctaccaagttcatgctcaaagagaaacctcccaatgagaactgtaacaacaacagcccagaaagctctctgctcccgagagctccggctctccctccaccacccagcgtggcgcccagcactggcgcagcccagtggaccgtgcctactgtctctggctctctcactccgcagccgacccaacccccgccaaaacccaaaactatgggaagccccgtccagtcaactctgatctctgagctcaagcaaaagtttgagaagaagagtgtgcacaacaaggcttacttctagtgtatgccctatgaccccccatctttcctccgcccctgacccccaccaccctgctgctcggactatgctccccttcctctgctccttaaggtcactgacccctgttttgcacaatggtataatccccactgtcctcatctctaccgccaccttctggcgcaacaagaagttgcgctctgacagggctctagtcagggccttgggcaagacattgggctctaggatgcaattggcaaatacgtccccgttactcaaatccttggcactactacaatgccctccattcttcagggctgagaattgacgagaagccagctcacccatcccagacctcacagtccctcaggttctactgggatctcatcatcatccttagtcaagcagcagggccctggccacgtggagcaacactgactagaatctggatcctgacgcctgcagctgagagcaggagcaggaaaaggaggctcagcactgtctcaggctggaggtcagcgaacctcgtgggctgtaggaaagcaaatgtaggtaaggggagagcaaggatgcacagaaaacacactgactgtgggactgtgccaggatgcatttggaaagatagagcattctgtctgggcagagactgtggaccctggtatgcccacgtgggacagaggacacagaggtggaagattgatcttgccaagagtgagggcagatgtctccagccaggactgccctgagccgcaaaatgtcaaagctggagctatagaggtagccctaaaggcaactagaagagcatcagggctgctctctgaggagctgccccaccagccatccttgaagagacaattcagggcagttgatgaatatcagggctgagatgtggtgagacttccgtttttatccagctcttttgctcacatcgcgtaaccttgggaaagctgtttaaagtcgctgatcatcctcttcctcatctgtaaatgaagaaagtaggccctgtctacctcacatgcaggtctagggtgaggattgaagaaaatagtggtgatgagggctttaaccaagtgcaaagcggcatgaatgcaaagtatttttctgcagcccagttctgtgggtgcagctcttccagaaagtattaggagcctcacatctactctgccaagcgccccagcaggcactgtgctgggcttaggggctaccactggatgatggcattgccgtgactcacacacctctacttctgttcttccctcactccatccccgctaccgtcctggccagctaccgtcagagagaaccagagctccaagtctttaatttgccaagatgaagaaaatgagttctcaaggagggaatgctttgcttgaggccacacagcaggttggtagcaaagatcttgtctagccagggcagcccttatcagcttgtgacaaccttccccaggacagaagtcatacaaggcctctggggttaatacaaataggttgtgccctgctttaaggaacctgctatcaggaaatctacatgtgtgcacagagagagaaaagtagaacagttctttgcatttggctctacttactaacaacccctctagaatacattggtgatttcatttaaagagattgtatgcatttgtggctttcctgatttctgagtctgtgtttggaggtgttactgagatgtgccagtgtgcagaatccttgctggggtttctacagtccccaacgtgaacagtattaagcaagaggtggactcgagcaatccaggagcccagactgagcaaataagtactttccagcctgtgtttcaggagaggactgtgctggatcatgcttgccctccacagggaatacagcatccttacagcttgcatgcaatcaacctcttttgtaaatggaaaataaagtctgttacccaaaggccatgctgatcccctgctccctgctttcatttatgtttgctgacctgtggagaccagtctttctgacacacagtgaagctcaacttgcctcctggctgcttcagcaggtggatccattcttcgacccccagatgtgactctaaagaaggctgaaaatttttgtccaaattgccatgcagatatcttgaacagcaggacatttgcaggccttgtctactggacttttctcccaaacaggacaagcccaggcagggctgcatggagaggaatggaacctggagctagaattaattgcccactctcccaccctaccagtgcagcccggcaagggcaggaattgggaggcctagggtgggcatgaaagcttgggaagcactgtcgtctctcagacaggcgtcctaaagacctctaggctggaagcttgggcttgcaagtggatccgggaccgagggtggtctcttggacaaccccaggaacttggaccaaggcagagccaatcttgcaaactggccatggatggggaagtgcccggtagccagcatgagccacactaggaaagaggaggagggtgcagccaaacttaaggcaccggcaagtgttgtcagcactggaggagaccccgccagtggggtgaggccagccaagtccctgtgttacgaatggtgggccaaggggctgtctgctaggtcccagtaggacaggcagagctccaggctggcaccatggtaggcctccagggaaagagctgggaggcaggaatggcacactgggcaggcttgcccattcctggccctgagaatggagctgtagcctcatggacaataaatggatgtgacaccaaaaaaaaaaaaaaa

SEQ ID NO: 30997 - DNA, 3410 bp, Homo Sapiens
gggaaccagcctgcacgcgctggctccgggtgacagccgcgcgcctcggccaggatctgagtgatgagacgtgtccccactgaggtgccccacagcagcaggtgttgagcatgggctgagaagctggaccggcaccaaagggctggcagaaatgggcgcctggctgattcctaggcagttggcggcagcaaggaggagaggccgcagcttctggagcagagccgagacgaagcagttctggagtgcctgaacggccccctgagccctacccgcctggcccactatggtccagaggctgtgggtgagccgcctgctgcggcaccggaaagcccagctcttgctggtcaacctgctaacctttggcctggaggtgtgtttggccgcaggcatcacctatgtgccgcctctgctgctggaagtgggggtagaggagaagttcatgaccatggtgctgggcattggtccagtgctgggcctggtctgtgtcccgctcctaggctcagccagtgaccactggcgtggacgctatggccgccgccggcccttcatctgggcactgtccttgggcatcctgctgagcctctttctcatcccaagggccggctggctagcagggctgctgtgcccggatcccaggcccctggagctggcactgctcatcctgggcgtggggctgctggacttctgtggccaggtgtgcttcactccactggaggccctgctctctgacctcttccgggacccggaccactgtcgccaggcctactctgtctatgccttcatgatcagtcttgggggctgcctgggctacctcctgcctgccattgactgggacaccagtgccctggccccctacctgggcacccaggaggagtgcctctttggcctgctcaccctcatcttcctcacctgcgtagcagccacactgctggtggctgaggaggcagcgctgggccccaccgagccagcagaagggctgtcggccccctccttgtcgccccactgctgtccatgccgggcccgcttggctttccggaacctgggcgccctgcttccccggctgcaccagctgtgctgccgcatgccccgcaccctgcgccggctcttcgtggctgagctgtgcagctggatggcactcatgaccttcacgctgttttacacggatttcgtgggcgaggggctgtaccagggcgtgcccagagctgagccgggcaccgaggcccggagacactatgatgaaggcgttcggatgggcagcctggggctgttcctgcagtgcgccatctccctggtcttctctctggtcatggaccggctggtgcagcgattcggcactcgagcagtctatttggccagtgtggcagctttccctgtggctgccggtgccacatgcctgtcccacagtgtggccgtggtgacagcttcagccgccctcaccgggttcaccttctcagccctgcagatcctgccctacacactggcctccctctaccaccgggagaagcaggtgttcctgcccaaataccgaggggacactggaggtgctagcagtgaggacagcctgatgaccagcttcctgccaggccctaagcctggagctcccttccctaatggacacgtgggtgctggaggcagtggcctgctcccacctccacccgcgctctgcggggcctctgcctgtgatgtctccgtacgtgtggtggtgggtgagcccaccgaggccagggtggttccgggccggggcatctgcctggacctcgccatcctggatagtgccttcctgctgtcccaggtggccccatccctgtttatgggctccattgtccagctcagccagtctgtcactgcctatatggtgtctgccgcaggcctgggtctggtcgccatttactttgctacacaggtagtatttgacaagagcgacttggccaaatactcagcgtagaaaacttccagcacattggggtggagggcctgcctcactgggtcccagctccccgctcctgttagccccatggggctgccgggctggccgccagtttctgttgctgccaaagtaatgtggctctctgctgccaccctgtgctgctgaggtgcgtagctgcacagctgggggctggggcgtccctctcctctctccccagtctctagggctgcctgactggaggccttccaagggggtttcagtctggacttatacagggaggccagaagggctccatgcactggaatgcggggactctgcaggtggattacccaggctcagggttaacagctagcctcctagttgagacacacctagagaagggtttttgggagctgaataaactcagtcacctggtttcccatctctaagccccttaacctgcagcttcgtttaatgtagctcttgcatgggagtttctaggatgaaacactcctccatgggatttgaacatatgacttatttgtaggggaagagtcctgaggggcaacacacaagaaccaggtcccctcagcccacagcactgtctttttgctgatccacccccctcttaccttttatcaggatgtggcctgttggtccttctgttgccatcacagagacacaggcatttaaatatttaacttatttatttaacaaagtagaagggaatccattgctagcttttctgtgttggtgtctaatatttgggtagggtgggggatccccaacaatcaggtcccctgagatagctggtcattgggctgatcattgccagaatcttcttctcctggggtctggccccccaaaatgcctaacccaggaccttggaaattctactcatcccaaatgataattccaaatgctgttacccaaggttagggtgttgaaggaaggtagagggtggggcttcaggtctcaacggcttccctaaccacccctcttctcttggcccagcctggttccccccacttccactcccctctactctctctaggactgggctgatgaaggcactgcccaaaatttcccctacccccaactttcccctacccccaactttccccaccagctccacaaccctgtttggagctactgcaggaccagaagcacaaagtgcggtttcccaagcctttgtccatctcagcccccagagtatatctgtgcttggggaatctcacacagaaactcaggagcaccccctgcctgagctaagggaggtcttatctctcagggggggtttaagtgccgtttgcaataatgtcgtcttatttatttagcggggtgaatattttatactgtaagtgagcaatcagagtataatgtttatggtgacaaaattaaaggctttcttatatgtttaaaaaaaaaaaaaaaaaaaaaaaaaaaaaaaaaaaaaaaaaaaraaaaaaaaaaaaaaaaaaaaaaaaaaaataaaaaaaaaaaa

SEQ ID NO: 30998 - DNA, 3273 bp, Homo Sapiens
ttcagcaaaacaagctatcgatcagggaagatctccagttataatagataacactaatatacaagcttgggaaatgaagccatatgtggaagtggtaaatatgaaacatgagaaagtttttattttttattcttgtcaattttttcacattctaaaattttggctggttggatcttgattattaaaacatttgtcctttgttttctaaagaggtttgttggtttgcttagtttttaaaaaaattgtgaatgatgttttttaaggaacatgttcatcttgttaatttttgtttgtttttttgagacggagtctcgctctgtcacccaggctggagtgcagtggcaccatcttggctcactgcaagctccgcctccccagttgaagcgattctcctgcctcagccacctgagtagctgggattataggtgcctgcccccatgcccagctaatttttgtatttttagtagagacagggtttcaccgtgttggccgggctggtctcgaactcctgagctcagcccatctgccgtgctcagcctcccaaagtgctgggattacaggcatgagccaccacgcccagcctcatattgttttgactttccttaaggatagtaatcttaaggaattactattccttgagaatagtaatcaaaatttatccggttaaatagtcttaactgttataaaccatattattttataaagcgtcatttttcttggtcgagcaagtgtatagtattgtcgaaatgaaatttaactgtctgccttctttttactttaagaagtacttctttgggtttttgttttcttcctttcctttgtgtaggccataggaaaaggatacagagtagagtttcatgaacctgaaacttggtggaaatttgatcctgaagaattagaaaagaggaataaacatggtgtgtctcgaaagaagattgctcagatgttggatcgttatgaatatcaaatgtccatttctattgtaatgaattcagtggaaccatcacacaaaagcacacaaagacctcctcctccacaggggagacagagagaaagagttttgaagaaaactgggcataggctcagcaaaaccaaacagaagaggaacagaaaaagaaacaaaaagcagaacagtcagaatagaatcatggaggaaaactcattagaattcttaagtgatcttacaccgggagatcaggacccatctcagagtgaagaggaagacattgaaaagaccagaagagaatcagaatatcccttcattgatggtctacaaaatgaagtcggagattttgtgactggatataaagaaaaaagatggaaaaataaagatcctaaagacagtttccaaaacgttatgtctatagttgaattagacaacacaccaaagaattacctctctaaggaaggtgataacttgtttgtaagtttgttactgaggccaaatgaaatctccgttacttgtccaatactgactcaaaacctttcctgtgtaacaactgatgactgctctggcatgaaggtagaaaagcatattagaaataggcataccatagcattagacacccaggacctttctgcggaaacttcatgcttatttatgaagaagagagaaatagtagataaaaatctctcacatgaacccattctgtgccatcaacatggaatcagaatgtcagataaagttttaagagaggaacaagtgtatacaactaaaatcaatcactgggcttttttcacaaccaatttatctgatgaagatttacagctgggctctgacagacagccctattttggtagctggcctgcaggacctcataagtttatatgtgaacagagaccaaagaaagatagagcatgtaagttggctggtcctgacagcagggggcaatggattcaaatgatcttcacttcggtggcagcatcagaaccaggaaacaatccagaaatattgacagacaaactactgataggaaatgaagatttttcacctccacctgaaactatggattcattcatagaaacaaacctcttcagaagctgcttacctcaaccggatataccaaagaatgccttagaatcaacaaaaaataagaaaaggaggaagaaaaggattttcaatttggtaccaaattttgacttattaggacagagtcgtatcggtgtaaaagaaagggagaaatgtgacctgttaacaaaaaaccatggactaaaaattactttgggagaagaaaaagatagaatttcagaaaggaacagtgaagaggagaataaacaaaaacttatgacctttgatcatcatccattgtggttttaccttgatattatcaaagctacccctttaaatattgatggacagcgttattctcattgcctgtcatttaacagactaaggtgctctgcatctttatacaaaaattatattccttcttttgtgctacataatttatctagtatttggaagccatcttttacaaacaagaaactgtttttgactttcgaatctcagacaagagtaggtaataaactaaatgatgcagggtttatttctccagaaattttacatagtcatcctgatacttcgtgctctttgggagtcacttctgattttcactttttaaatgaaaggtttgatagaaagctgaaaagatgggaagaacctaaggaattaccagctgaggacagccaagacttaacaagcactgactaccgttcccttgagctaccattatcacaagggtttgcctttcaattagtaaagctttttggatctccaggcgttccaatggaatccttgttgcctgatgactatgtggttccccttgactggaagacactaaagatgatctacttgcaatggaagatgtcagtggagaaaagacagaagaagattggttgaaaaatgaaaattccttgaactttgagttctgctgtcttcatggtactgctgaagatcatgatcacggagaaaagtcagagtgctcagtgccaacccaagggattctttccagagacgtacccgttggataccaaaattagtttggataatctgttcaaccattatatagcctcgatgatgagagagttacaaagaacaaaactccagacacaaacctccaaatttttcagcagaagcactctgcgtcgctgagctgaggtcggctctgcgatccatacgtggccgcacccacacagcacgtgctgtgacgatggctgaacggaaagtgtacactgttcctgaatattgaaataaaacaataaacttttaatggt

SEQ ID NO: 30999 - DNA, 1834 bp, Homo Sapiens; identical to SEQ ID NO: 26428

SEQ ID NO: 31000 - DNA, 3012 bp, Homo Sapiens
ggccccagggctcagcttccgccttcggcttccccttctgccaagagccctgagccactcacagcacgaccagagaacaggcctgtctcaggcaggccctgcgcctcctatgcggagatgctactgccactgctgctgtcctcgctgctgggcgggtcccaggctatggatgggagattctggatacgagtgcaggagtcagtgatggtgccggagggcctgtgcatctctgtgccctgctctttctcctacccccgacaagactggacagggtctaccccagcttatggctactggttcaaagcagtgactgagacaaccaagggtgctcctgtggccacaaaccaccagagtcgagaggtggaaatgagcacccggggccgattccagctcactggggatcccgccaaggggaactgctccttggtgatcagagacgcgcagatgcaggatgagtcacagtacttctttcgggtggagagaggaagctatgtgagatataatttcatgaacgatgggttctttctaaaagtaacagccctgactcagaagcctgatgtctacatccccgagaccctggagcccgggcagccggtgacggtcatctgtgtgtttaactgggcctttgaggaatgtccacccccttctttctcctggacgggggctgccctctcctcccaaggaaccaaaccaacgacctcccacttctcagtgctcagcttcacgcccagaccccaggaccacaacaccgacctcacctgccatgtggacttctccagaaagggtgtgagcgcacagaggaccgtccgactccgtgtggcctatgcccccagagaccttgttatcagcatttcacgtgacaacacgccagccctggagccccagccccagggaaatgtcccatacctggaagcccaaaaaggccagttcctgcggctcctctgtgctgctgacagccagccccctgccacactgagctgggtcctgcagaacagagtcctctcctcgtcccatccctggggccctagacccctggggctggagctgcccggggtgaaggctggggattcagggcgctacacctgccgagcggagaacaggcttggctcccagcagcgagccctggacctctctgtgcagtatcctccagagaacctgagagtgatggtttcccaagcaaacaggacagtcctggaaaaccttgggaacggcacgtctctcccagtactggagggccaaagcctgtgcctggtctgtgtcacacacagcagccccccagccaggctgagctggacccagaggggacaggttctgagcccctcccagccctcagaccccggggtcctggagctgcctcgggttcaagtggagcacgaaggagagttcacctgccacgctcggcacccactgggctcccagcacgtctctctcagcctctccgtgcactactccccgaagctgctgggcccctcctgctcctgggaggctgagggtctgcactgcagctgctcctcccaggccagcccggccccctctctgcgctggtggcttggggaggagctgctggaggggaacagcagccaggactccttcgaggtcacccccagctcagccgggccctgggccaacagctccctgagcctccatggagggctcagctccggcctcaggctccgctgtgaggcctggaacgtccatggggcccagagtggatccatcctgcagctgccagataagaagggactcatctcaacggcattctccaacggagcgtttctgggaatcggcatcacggctcttcttttcctctgcctggccctgatcatcatgaagattctaccgaagagacggactcagacagaaaccccgaggcccaggttctcccggcacagcacgatcctggattacatcaatgtggtcccgacggctggccccctggctcagaagcggaatcagaaagccacaccaaacagtcctcggacccctcttccaccaggtgctccctccccagaatcaaagaagaaccagaaaaagcagtatcagttgcccagtttcccagaacccaaatcatccactcaagccccagaatcccaggagagccaagaggagctccattatgccacgctcaacttcccaggcgtcagacccaggcctgaggcccggatgcccaagggcacccaggcggattatgcagaagtcaagttccaatgagggtctcttaggctttaggactgggacttcggctagggaggaaggtagagtaagaggttgaagataacagagtgcaaagtttccttctctccctctctctctctctttctctctctctctctctttctctctcttttaaaaaaacatctggccagggcacagtggctcacgcctgtaatcccagcactttgggaggttgaggtgggcagatcgcctgaggtcgggagttcgagaccagcctggccaacttggtgaaaccccatctctacaaaaaatacaaaacatagctgggcttggtggtgtgtgcctgtagtcccagctgtcagacatttaaaccagagcaactccatctggaataggagctgaataaaatgaggctgagacctactgggctgcattctcagacagtggaggcattctaagtcacaggatgagacaggaggtccgtacaagatacaggtcataaagactttgctgataaaacagattgcagtaaagaagccaaccaaatcccaccaaaaccaagttggccacgagagtgacctctggtcgtcctcactgctacactcctgacagcaccatgacagtttacaaatgccatggcaacatcaggaagttacccgatatgtcccaaaagggggaggaatgaataatccaccccttgtttagcaaataagcaagaaataaccataaaagtgggcaaccagcagctctaggcgctgctcttgtctatggagtagccattcttttgttcctttactttcttaataaacttgctttcaccttaaaaaaaaaaaaaaa

SEQ ID NO: 31001 - DNA, 3409 bp, Homo Sapiens
gggcccagatagaacaagaaggcagaagaaatgtgaattcctctttctctgctggagctgggatattcttcttctcctgcccttggacatcagagctgcaggctctctggcctttggacccgaggatttataccaagcaggtttctgggttctcaggcctttggccttggactgatagttacaccattggcatatctggttctgaggctcttggtcttggactgagccacactcctggcatcccagcgtctccagcttgcatggcctgtcacgtgattcctgtcagaatcaccatttttggtaaacaaaccaagcccagaacctgataattatggagcattctacactgacagttctttgagacaaatttcctcttggcatttacactgtggctttagctttcaaaccagaggttcctcttacccagcaaaaagtgagttatacgctttcttaatgttataacgttaccatggatgatcctgaacttgccgaggatagcagagacgggtgggcagaacaggaaagaatcagatcagagactgtaaaaagtaacttaaaaaaaaataattctggcagagacagaatttgaaggtacttgtgcacatcagaacactggacttgcttttttctgggagcaggaatgctgcttaattagatcagagaagaatgcaagtggtccatacatttagatctacaatgcgtggtttccagacctgcagcttgttttgctgcgcttcatcatggagtcatagaagggcagagctggaggaccgagtgagggacctggtgccatatccctacagacaggcaattggagactcccgtaggttaagggctgcagagcctggaccaatgcccagaatctctgagctttttatcttacaccatgaagtgacagatgctggcagatgttagacctttgtgcttaactgtttaaccacacagcacccgacttctgtatgcagcgaggttctagagtttccaaaacacgggtctcctctcccacctcagcctcctagcataaaactagacacatcctcatgcttttgaggtctaatcattggattttgttcctttcagatggctttcccgaagatgagattgatgtatatttgccttctggttctgggggctctttgtttgtattttagcatgtacagtctaaatcctttcaaagaacagtcctttgtttacaagaaagacgggaacttccttaagctcccagatacagactgcaggcagacacctcccttcctcgtcctgctggtgacctcatcccacaaacagttggctgagcgcatggccatccggcagacgtgggggaaagagaggatggtgaagggaaagcagctgaagacattcttcctcctggggaccaccagcagtgcagcggaaacgaaagaggtggaccaggagagccagcgacacggggacattatccagaaggatttcctagacgtctattacaatctgaccctgaagaccatgatgggcatagaatgggtccatcgcttttgtcctcaggcggcgtttgtgatgaaaacagactcagacatgttcatcaatgttgactatctgactgaactgcttctgaagaaaaacagaacaaccaggtttttcactggcttcttgaaactcaatgagtttcccatcaggcagccattcagcaagtggtttgtcagtaaatctgaatatccgtgggacaggtacccaccattctgctccggcaccggctacgtgttttctggcgacgtggcgagtcaggtgtacaatgtctccaagagcgtcccatacattaaactggaagacgtgtttgtggggctctgcctcgaaaggctgaacatcagattggaggagctccactcccagccgaccttttttccagggggcttacgcttctccgtatgcctcttcaggaggatcgtggcctgccacttcatcaagcctcggactctcttggactactggcaggctctagagaattcccggggggaagattgtccgcctgtctgaggggagcccagaggcacatccggacaagtttcagataacccgtggggatagtttttgctagattttggaagagggggcgggacagaggatgctgttcttcagtgctgaaatccacgccagaatgtcggtgttcatgaagtcactgattagttcccacttggtgccccaggcaataataggcccgtctcttgggcacgcacactcttcatactaagtgtttgacatacacctggatttttgcatttcaggggtcagtatcctatgacatgatgggtgttaccatcctaattttacaggcaaggacacagcagctgcgagaggtacagaaacttgtcccaaggctcacagccagtaggcataggagcgggaatgaaaatcgagcactgtcagaatctggtgggcagcccctgacttgaaccactcccacgtgctgcctcccttaggaggggacactgatgatgaggtctcggagccggcatccttccatccctgtcgagtcccctccacctcagctcccagtccttgtgctttttggagctaagcctgggatgaccaaattcaccccagctccttcattcacagggctggatgtagctgggattgagtccatgttatcggctcggtactcaacacaacccaagtttcatccgaggaaatgtccccgcagtggatgcagctcacatgctgaggaacacccagctctggacagagttcttataaatgtataaattaggctcagaaaccactgcattctgacctgctgtacagactgcccacactgctgacctgcctagcgagcaggacatcccttctgagccatctgctgctctctcatttcatcaccccaactgtcccttgtttttgatcaatggggaccagccactgccccaggagcactttagggctctcagttcaaactgaaggacagttgaactcagatggggttcatgtgggattctgggagctttctgggaattcagttggagtcaagtcaggatgctctcaaggacccctcgggctcagagccctaaagtgggccctggtgaagcagggtggtcctgcgtccacttcccaagcctgagccaagctcatcttcattgaatgtctcatttggccgaggaacaactgaactttgtggtttgctgtttagccttcagtttgctccgctgcctcctacccagaggtttgtgcgagcctgtgttgcagggttgtataaaaccaaggtacttcgttagttttgcccattcagccatggtcacgtgacatgcaaagtaatcttgctcctaattatagaaatgatttttcttttaattttttactttaccagactttactttgtactcagagaagaggcctcacatggctgtgtcacatataaatgttggactaaactctt

SEQ ID NO: 31002 - DNA, 3028 bp, Homo Sapiens; identical to SEQ ID NO: 25663

SEQ ID NO: 31003 - DNA, 2037 bp, Homo Sapiens
gcttttgtgttgggcagcgcgaatgtggcgagctcggtgcgtctccgctgctccttccccttatccctgggaggtccaagtggtcccgcggcagcttctgttgctctgggacctgcaggtcccggaaggtccttagggaggaccccagacaccggagactggaaatggattcagtgtcatttgaagatgtggctgtggcctttactcaggaggagtgggctttgctggatccttctcaaaagaatctctacagagatgtgatgcaagaaatcttcaggaacctggcttctgtaggaaacaaatcagaagaccagaatatccaagatgacttcaaaaatcctgggagaaatctaagcagtcatgtggtagagagactgtttgaaattaaagaaggcagtcaatatggagaaaccttcagccaggattcaaatttgaatctgaataagaaagtttctactggagtaaagccatgtgaatgcagtgtgtgtggaaaagtcttcatatgtcattcagcccttcataggcacatcctgtctcacattggaaacaaactatttgagtgtgaggaatgtccagagaagttatatcattgcaaacaatgtgggaaagcctttatctctctcaccagtgttgacagacacatggtaacacacactagtaatgggccttataagggtccagtgtatgagaagccttttgattttcctagtgtatttcaaatgcctcagagcacttacactggagagaaaacatataaatgtaaacattgtgataaagccttcaattattcaagttatcttcgtgaacatgaaagaactcatactggagagaaaccctatgcatgtaagaaatgtggtaaatcattcactttttccagttctcttcgccaacatgaaagatctcatactggagagaaaccctatgaatgtaaggaatgtggcaaagccttcagtcgttccacttacttgggaatacatgaaagaacgcatactggagaaaaaccctatgaatgtataaaatgtggcaaagcctttagatgttccagagtcctcagagtccatgaaaggactcacagtggagaaaagccctatgaatgtaaacaatgtggtaaagccttcaaatattctagtaacctatgtgagcatgaaagaactcacactggagtgaaaccttatggatgtaaggaatgtggtaagtcgtttacttcttccagtgcccttcgaagccatgaaaggactcatactggagaaaaaccctatgaatgtaagaaatgtggtaaagccttcagttgttccagttcccttcgaaagcatgaaagagcttatatgtggtaaaaaacaacaacaacaaaacacctctgtcaatgtaagaagtgtgttaaagctttcagttattctagtttcattagaacacgtgaaaaaattaaaaactcaaattagagagaaacccaacacatgtaaggaagattagaatgtatgcaattttcctagttcccttctaaaacttagaaggacccgtcctgggaaagaacgtcataaaatacgaaaaatgtgttagaacactttattttcccagccgctttcaaatatatttttatcagtggttcattgttaaagaaggtgtctatactttagattttcagttttttgcagggaatcatggagctgagaatttcacagatactttataagccatagtacatgagcttaataggctgtgttttgtttctcatcagttaacataatttttgtctattcatttaaaaatttgttggatccctagactaagttgaaatgtatttctaatagtaggcaattttaattttcatgtagttgtttaattgttctctaattaatggaccaatgaaaaatgagttcatgtgtgtgtgtgtgtgtgtgtgtgtgtgtgtgtgtgtgtgtattctacctttttatgggaaaactacttttttgttgtaaagattttcttctgttttctttgctaataaagaattgttattaatttgccaaaaaaaaaaaaaaaaaaaaaaaaaaaaaa

SEQ ID NO: 31004 - DNA, 1479 bp, Homo Sapiens
gtggagatgaatggcgggcgcggcgaccgggagccggacccctgggaggtcggagcttgtcgagggatgcggctggcgctgcccggagcatggcgaccgcgtggctgagctcttctgtcgccgctgccgccgctgcgtgtgcgcgctttgcccggtgctgggcgcgcaccgtggccaccctgtgggcctggcgctggaggcagcggtgcacgtgcagaaactcagccaagaatgtttaaagcagctggcaatcaagaagcagcagcacattgacaacataacccagatagaagatgccaccgagaagctcaaggctaatgcagagtcaagtaaaacctggctgaaggggaaattcactgaactcagattactacttgacgaagaggaagcgctggccaagaaattcattgataaaaacacgcagcttaccctccaggtgtacagggaacaagctgactcttgcagagagcaacttgacatcatgaatgatctctccaacagggtctggagtatcagccaggagcccgatcctgtccagaggcttcaggcatacacggccaccgagcaggagatgcagcagcagatgagcctcggggagctgtgccatcccgtgcccctctcttttgagcccgtcaagagcttctttaagggcctcgtggaagccgtggagagtacattacagacgccattggacattcgccttaaggaaagcataaactgccagctctcagacccttccagcaccaagccaggtaccttgttgaaaaccagcccctcaccagagcgatcgctattgctgaaatacgcgcgcacgcccacgctggatcctgacacgatgcacgcgcgcctgcgcctgtccgccgatcgcctgacggtgcgctgcggcctgctgggcagcctggggcccgtgcccgtgctgcggttcgacgcgctctggcaagtgctggctcgtgactgcttcgccaccggccgccactactgggaggttgacgtgcaggaggcgggcgccggctggtgggtgggcgcggcctacgcctcccttcggcgccgcggggcctcggccgccgcccgcctgggctgcaaccgccagtcctggtgcctcaagcgctacgaccttgagtactgggccttccacgacggccagcgcagccgcctgcggccccgcgacgacctcgaccggctcggcgtcttcctggactacgaggccggcgtcctcgccttctacgacgtgacgggcggcatgagccacctgcataccttccgcgccacgttccaggagccgctctacccggccctgcggctctgggagggggccatcagcatcccccggctgccctaggggccaggaccggcgtgacagcctccagacttgaatctgtagacatttctttattgatatggcaaattgcttgcagatatttttaaatgacagcaattttctaatatttggtttaataaaatgtgaataatgtccctttt

SEQ ID NO: 31005 - DNA, 3377 bp, Homo Sapiens
gggagccgcgcgggagcagcgcagctacggcggcggcagcggcggcgcggttgcgattccgagccgttgagacgcctctgcggcagctggtggcgcaggtggcttgcgtggacgcgggtagaggcgaccggccagcaaccgcagcgtcggcgcccgcggccccggcagcaggcgcgtcgggacgccccgaggcatcctcccccgcccgcgggcccggtagctgggcccgcgtccgccgcccgcatccccgcgccgccgcatctcctcgccgcctcccgggcttcggacccccggtctcgcccccggaaacatgactcgcgatttcaaacctggagacctcatcttcgccaagatgaaaggttatccccattggccagctcgagtagacgaagttcctgatggagctgtaaagccacccacaaacaaactacccattttcttttttggaactcatgagactgcttttttaggaccaaaggatatatttccttactcagaaaataaggaaaagtatggcaaaccaaataaaagaaaaggttttaatgaaggtttatgggagatagataacaatccaaaagtgaaattttcaagtcaacaggcagcaactaaacaatcaaatgcatcatctgatgttgaagttgaagaaaaggaaactagtgtttcaaaggaagataccgaccatgaagaaaaagccagcaatgaggatgtgactaaagcagttgacataactactccaaaagctgccagaagggggagaaagagaaaggcagaaaaacaagtagaaactgaggaggcaggagtagtgacaacagcaacagcatctgttaatctaaaagtgagtcctaaaagaggacgacctgcagctacagaagtcaagattccaaaaccaagaggcagacccaaaatggtaaaacagccctgtccttcagagagtgacatcattactgaagaggacaaaagtaagaaaaaggggcaagaggaaaaacaacctaaaaagcagcctaagaaggatgaagagggccagaaggaagaagataagccaagaaaagagccggataaaaaagaggggaagaaagaagttgaatcaaaaaggaaaaatttagctaaaacaggggttacttcaacctccgattctgaagaagaaggagatgatcaagaaggtgaaaagaagagaaaaggtgggaggaactttcagactgctcacagaaggaatatgctgaaaggccaacatgagaaagaagcagcagatcgaaaacgcaagcaagaggaacaaatggaaactgagcagcagaataaagatgaaggaaagaagccagaagttaagaaagtggagaagaagcgagaaacatcaatggattctcgacttcaaaggatacatgctgagattaaaaattcactcaaaattgataatcttgatgtgaacagatgcattgaggccttggatgaacttgcttcacttcaggtcacaatgcaacaagctcagaaacacacagagatgattactacactgaaaaaaatacggcgattcaaagttagtcaggtaatcatggaaaagtctacaatgttgtataacaagtttaagaacatgttcttggttggtgaaggagattccgtgatcacccaagtgctgaataaatctcttgctgaacaaagacagcatgaggaagcgaataaaaccaaagatcaagggaagaaagggccaaacaaaaagctagagaaggaacaaacagggtcaaagactctaaatggaggatctgatgctcaagatggtaatcagccacaacataacggggagagcaatgaagacagcaaagacaaccatgaagccagcacgaagaaaaagccatccagtgaagagagagagactgaaatatctctgaaggattctacactagataactaggttgacatacctggaatatagagaacacttgagaagtttgtaatggttttcatttgaaatagactgctggaagtttaaatttttataagcataggtttgatgttgaaaacttgttttgagggagaaaatccctttgttttaaagtaaagtaaacattatcgctaagtgtaacttgtgcagtattaacagctacattatacagtaaatgtgggataaaatccatttagaaaatgttaaactgcttttccagacatggttgtagcatattttcaattagtgtgtgtatgttaatgtgtaattgatagtagaacaaagttacatttttaaaactgctacttgtataaaccttgcctcttttcccaaatactgtgggttttgtgcatagtttttacaaaccttggatttaccagactgtcttttcactgtttgtgggttttgtagaagttacacatttttatggtagataaaatgttacttctatacaagtactcactccctttttatcaaaagttaattttaatctcacagtctacattgtgctacattatccagcttctttggaacaatgtgtgctctgtatggttttttttggtatgacaactaattaagcaactgacattgaactgagaattctacaaactataaaacattaatttttgaaggtaatttagttttgtggctgggcattcagtgaagtcttaggacttctttgcagacaactgactgggtatatataggaatgaatctggctttagggttaaatcatttaaggtccttttataggcaggcactagtaactaaaactgaaaactaagtaagtttatttttgaggaatgttgttaaaaatgtctttaggaagtcactaaaacttaattggaagaaaaaatcatgatgcttatacaataaatatgaataaatgttatataaggaaactcacctatttgaaatcatggctatattgtttttattttctagattccaaaaatacaaacactagttgttccagcattgtactttgataagtctgtacattgacgtgtatggactaaatccagggtaaaatcaatgttacaaaatttaagggtatgttaactaaaggatagcatttctaagatattttgaatattagggtcatttggcacttctcagcaagtaggatacttctcatgtttttgaaattatatgaatatggaaaaaaatggcttaagaccagcgtctctgtatgacattgtgtggttgaccctctgagataactgttttcatctacagaattgcatttttgcttttaaagaggtcttataatggaactaggaatcaccgttttgagagaacctgcatatataccagtcattatctgtttggtccttatacagttttaacttacttagatttattctagttaagccataagttcaacgtgtaaacttgttttcattaaagaatttttctatcaaaaaaaaaaaaaaaaaaaaaa

SEQ ID NO: 31006 - DNA, 4601 bp, Homo Sapiens
gctctccagaggcgggccctgagccggcacctcccctttcggacagctcaagggactcagccaactggctcacgcctccccttcagcttctcttcacgcactccaagatctaaaccgagaatcgaaactaagctggggtccatggagcctgcacccgcccgatctccgaggccccagcaggaccccgcccggccccaggagcccaccatgcctccccccgagaccccctctgaaggccgccagcccagccccagccccagccctacagagcgagcccccgcttcggaggaggagttccagtttctgcgctgccagcaatgccaggcggaagccaagtgcccgaagctgctgccttgtctgcacacgctgtgctcaggatgcctggaggcgtcgggcatgcagtgccccatctgccaggcgccctggcccctaggtgcagacacacccgccctggataacgtctttttcgagagtctgcagcggcgcctgtcggtgtaccggcagattgtggatgcgcaggctgtgtgcacccgctgcaaagagtcggccgacttctggtgctttgagtgcgagcagctcctctgcgccaagtgcttcgaggcacaccagtggttcctcaagcacgaggcccggcccctagcagagctgcgcaaccagtcggtgcgtgagttcctggacggcacccgcaagaccaacaacatcttctgctccaaccccaaccaccgcacccctacgctgaccagcatctactgccgaggatgttccaagccgctgtgctgctcgtgcgcgctccttgacagcagccacagtgagctcaagtgcgacatcagcgcagagatccagcagcgacaggaggagctggacgccatgacgcaggcgctgcaggagcaggatagtgcctttggcgcggttcacgcgcagatgcacgcggccgtcggccagctgggccgcgcgcgtgccgagaccgaggagctgatccgcgagcgcgtgcgccaggtggtagctcacgtgcgggctcaggagcgcgagctgctggaggctgtggacgcgcggtaccagcgcgactacgaggagatggccagtcggctgggccgcctggatgctgtgctgcagcgcatccgcacgggcagcgcgctggtgcagaggatgaagtgctacgcctcggaccaggaggtgctggacatgcacggtttcctgcgccaggcgctctgccgcctgcgccaggaggagccccagagcctgcaagctgccgtgcgcaccgatggcttcgacgagttcaaggtgcgcctgcaggacctcagctcttgcatcacccaggggaaagatgcagctgtatccaagaaagccagcccagaggctgccagcactcccagggaccctattgacgttgacctgcccgaggaggcagagagagtgaaggcccaggttcaggccctggggctggctgaagcccagcctatggctgtggtacagtcagtgcccggggcacaccccgtgccagtgtacgccttctccatcaaaggcccttcctatggagaggatgtctccaatacaacgacagcccagaagaggaagtgcagccagacccagtgccccaggaaggtcatcaagatggagtctgaggaggggaaggaggcaaggttggctcggagctccccggagcagcccaggcccagcacctccaaggcagtctcaccaccccacctggatggaccgcctagccccaggagccccgtcataggaagtgaggtcttcctgcccaacagcaaccacgtggccagtggcgccggggaggcagaggaacgcgttgtggtgatcagcagctcggaagactcagatgccgaaaactcgtcctcccgagagctggatgacagcagcagtgagtccagtgacctccagctggaaggccccagcaccctcagggtcctggacgagaaccttgctgacccccaagcagaagacagacctctggttttctttgacctcaagattgacaatgaaacccagaagattagccagctggctgcggtgaaccgggaaagcaagttccgcgtggtcatccagcctgaagccctcttcagcatctactccaaggccgtgtccctggaggtggggctgcagcacttcctcagctttctgagctccatgcgccgccctatcttggcctgctacaagctgtgggggcctggcctcccaaacttcttccgggccctggaggacattaacaggctgtgggaattccaggaggccatctcgggcttcctggctgccctgcctctcatccgggagcgtgtgcccggggccagcagcttcaaactcaagaacctggcccagacctacctggcgagaaacatgagcgagcgcagcgccatggctgccgtgctggccatgcgtgacctgtgccgcctcctcgaggtctccccgggcccccagctggcccagcatgtctaccccttcagtagcctgcagtgctttgcctccctgcagcccctggtgcaggcagctgtgctgccccgggctgaggcccgcctcctggccctacacaacgtgagcttcatggagctgctgagtgcacaccgccgtgaccggcaggggggcctgaagaagtacagccgctatctaagcctgcagaccaccacgttgccccctgcccagcctgctttcaacctgcaggctctgggcacctactttgaaggcctgttggagggtccggcgctggcacgggcagaaggagtctccaccccacttgctggccgtggcttggcagagagggcctcccagcagagctgagaggagggggtgaccagcttggagtctctggtgggcagagagggatggggtccctgagccaggccccacccatcacagcattcccaggtcctggtacccagccctcagttgtcatttggttcagaatcagttccctttctctgggaccaaatttcccttctctaaacatcctacagagaaggttccaaagctgagcacccatcaccctaggtgtgcaccagactcctattagcccctccttccaggagctagaaccagggaggtcctgagtgaggaaggcatgacctctgggctctctaggtggccctggtcttgccccatccatcccacctgccactaccttgggtgtccttacagctctgccctgaccccagcccctgcccctggacacctgctgacagctcccacacagaacagtctgaggtgatgctggctacagccctggcagcccatggcaactcaaagtgccttccaaaccaaactgcccctcatgaggttagggtcccccaccctccacctgcccagaggccaactctgttcccttctcctttcatcccagaggggcctcatcagcaaagacagaaactgatgttccatgcatgttcctgcttccaaagcctgaccttccaaagcttgcttccttcctcctggctgcacagacacctctgcttggccacagctttgctctttggtcctcaggccaccagacccctcacagcatggcccttggctcttcctgcactgccctcaccctcagccgtcccaaggagtgcccagcactactcagcatgtagtccaggacctgcggcatcagcatcccctgggagcttcttagaaatgcagacctgtgggctctaccacaggcctctggaatcagaatcttcagggtggggcccagcagtctgtgttttaacaggttctcccggtgatgctggtgcatgctcaagtttgagaaccgctgctctcatagactgctcctccaaggggaagcagtgtggaacagcagagaaagtcccgtccctatctctgactgtgcagtgagtgtggcctaggaacaggtcccttcctaagctctagtgtccccatctgtaaaatgggctgattggcctccacggtcagagcggccatctggctgtgccatcctgcatttttaggaatggaaagcaggcctctgaggcagtggacaggaagacttctcatccttgaattctagctcccattccaaactgttagtccccaaccttgtggtcacatcagaggtcaacagcagaacagaggcaggtcagggttgtccgctctgattagcagatcgacagccccttcctcctcctccctccttcccatccctactcattagctccctcgtcctgggatgcttcccaagcagcccaggcctctagcctccatggctgatgacctcagctttcacactggtgaagtctgtgtacccatactgcagccccatcccatggggcccctgaagacccactgaggaattccgtagggtcttgttcccacgaccggagtgctggctctcacagtgaattttgatgcatttaaaataagattctgatgccagactgttaaaacaggcgctggttctgaagcaccgatggaaacagattgatgcagatggaaggaggaagggagactgggcccactgatttccagccccaccatgtgtgctgttttcagatgtgattgaggggtgttctgccctgcctccactgtcacagcctttaataaagatgtgaatcttgaaaaaaaaaaaaaaaaaaaaaaaaaaaaaaaaaaaaaaaaaaaaaaaaaaa

SEQ ID NO: 31007 - DNA, 11262 bp, Homo Sapiens; identical to SEQ ID NO: 23619

SEQ ID NO: 31008 - DNA, 4968 bp, Homo Sapiens
cacggaacagccctcctggggtccccacgagccgcgtcctgctgtgccccggcgcctacgcagcagcggccgcggccgcggtgggcacgcacggttaccccgggcagctccggccgccagctgcagccccgtcgcctcggccgcgccagccggctgcgggcacctgggggcgggctgggggcgccggccgcggcaggaggcgctgtagcgagggctgcggcgccggtcctgcggcggccgcgggaggcagcggggcaggcgctgtgggccgggctcctcctccggctcctgcgcgaccgcctcccgccgggctctgccggcgcccgccgtccccgcagcgccgctctgcgcccgccgccccgagcgcccgcgcggggctggcgggagcctcggcgggcgcgcgggcgcgcggggccatggtcgtggccccctgacgggccgcggccgcctccatgaagcggaaaagcgagcggcggtcgagctgggccgccgcgcccccctgctcgcggcgctgctcgtcgacctcgccgggtgtgaagaagatccgcagctccacgcagcaagacccgcgccgccgggacccccaggacgacgtgtacctggacatcaccgatcgcctttgttttgccattctctacagcagaccaaagagtgcatcaaatgtacattatttcagcatagataatgaacttgaatatgagaacttctacgcagattttggaccactcaatctggcaatggtttacagatattgttgcaagatcaataagaaattaaagtccattacaatgttaaggaagaaaattgttcattttactggctctgatcagagaaaacaagcaaatgctgccttccttgttggatgctacatggttatatatttggggagaaccccagaagaagcatatagaatattaatctttggagagacatcctatattcctttcagagatgctgcctatggaagttgcaatttctacattacacttcttgactgttttcatgcagtaaagaaggcaatgcagtatggcttccttaatttcaactcatttaaccttgatgaatatgaacactatgaaaaagcagaaaatggagatttaaattggataataccagaccgatttattgccttctgtggacctcattcaagagccagacttgaaagtggttaccaccaacattctcctgagacttatattcaatattttaagaatcacaatgttactaccattattcgtctgaataaaaggatgtatgatgccaaacgctttacggatgctggcttcgatcaccatgatcttttctttgcggatggcagcacccctactgatgccattgtcaaagaattcctagatatctgtgaaaatgctgagggtgccattgcagtacattgcaaagctggccttggtcgcacgggcactctgatagcctgctacatcatgaagcattacaggatgacagcagccgagaccattgcgtgggtcaggatctgcagacctggctcggtgattgggcctcagcagcagtttttggtgatgaagcaaaccaacctctggctggaaggggactattttcgtcagaagttaaaggggcaggagaatggacaacacagagcagccttctccaaacttctctctggcgttgatgacatttccataaatggggtcgagaatcaagatcagcaagaacccgaaccgtacagtgatgatgacgaaatcaatggagtgacacaaggtgatagacttcgggccttgaaaagcagaagacaatccaaaacaaacgctattcctctcaccgatggttggctgtcccaggctgtcacctttctagaccggcttctgatctggctcgggatccacaaggactagacctgcggggaaggtctctcctggacacgcccgttgcccactgcaagttctctccaggtgcaattgaagcctctcagcagcggaggccgccatgtggagagagcaggcaggcccactgctgctgagaacagggcaggcacgggcagctcctgttctgcctttcccagcttcggagacgcaggctcagctgctccgaagcacctgccagcaccgcacagtacagtttcagaggacagcagtctccttcccgtgaagctcccatgtgctggaatggcatggacttgctgatcaacagaaggaaatggtctgaagtctgaccagcacaaggaaggaggctggctggctcagaggggcccaccttgcgtggaatgaaaacgccaaaggctcatgagcaacattaggctagaggggtcttgttcaaagcatccaactctgacttcggaggcattcccagccggcagcagtgtgtccagcctgcctcttcccaggctggtctgacatgcagcttaggctttcatcccaagttaggtactgacccctccctcttgggcagcacctccctttttaaaaaaatttttttttcttccaaagacagagtcttgctcttgttgtccaggctggagtgcagtggcgcgatctaggctcactgcaacctccttctcccaggttcaagcgactctcctgcctcagcctcctgagtagctgggattataggcgtctgccaccacgcccggctaatttctgtatttttagtagagacagggtttcaccatgttggccaggctggtctcgaactcctgacctcaagtgatctgcctgccttggcctcccaaagtgctgggattacaggtgtcagccaccgcacccagccaagcacccctatctctagaggatctggccccccagcccagttactgcagggcagctttccccacctggtgacaggctgtgcgcagcagccccaggacctcaccctgagctgagtcttcaggagccgccctggtggcacaactcagacacccctgaggcctagcagtcaactcctgattcagacatgatccagtccagcctgggcttggctataaccagctcaaacttgcttgacctccacttttcaggagacttggggacgacagccctcatcggcgtctttcatggggttaatctgcttgagtctaagtcgccagccagaaacgtggtgcccagggtgccctgcctcaggacatgtccacacccacgtcacaagcacctgaggagtccggccggggcactgtggtccaaaaggtcctgccgcctccgcatctgactgtcccaacggcatgctggtgacacccccctgcccttcgcttctgtcctccctggcttctctggggcacttggggctatgtacaacctggcacgatccagaaagggtgcaaacaaaatgcctacatccaggcacacgaccaagtcagcgagagctagccctggtaagcaaacatagcccattacaggttcagaacgtgcaccgggttccccaaaactgtcttcaaccacatgactcaacagctctatgggataggaactgtcagtgtttttgcaactgcaacattaaaccaagtgctgtgggcttttcaagtattattcacaacactaaaggaaagtttcttcaaagggctctctggctaatcttcaaagccgcagttaggcaaaatgacagtgtgacagcttcaaagccactgactcatgacacagccctgatgttgtaccggctaggttcagatttcagaaatcagggcacttgcatccattgccttttccaggaaagggaagaaaacactcagttgataaaccttagtactcagataataaataagagaccaaaagtaggctatcacccaaagcaaacatccttaactgaccctaacgtgtatggattcaactttgattattcaacaaaatcatgaccgactgctgtggcctggagtaaccaaaggactgttttctctacacaaagtcaggagcgaataccaacctttatttgcacttgggttccagttcaaagccaccttagacagtgtggcaaagtgggaaaaagcacagatcctgggaccaaggttcagattccatctcaagcgagcatatgaactgtgtgacaacaggcagacagtacctctgtgtctatgagaaagcggggagagcaacaccccagcttctagcagctctacagctgcctggacctgcaggccctcctaggcccacttcctccccagcacagtgtgtgttcccgggcgtgtgtggctctgggtccagctctgttcagggtgggactccaggtgaattactgaacctctgaggtgtacccccaaccccaaactttcaccaaaagcaataaagaggaactctagaactggagccaggactaagtgagaaaaactgcttataagtgcttaataaatactagttatttacaacttttgctcaagccgagggcagaggcctttgtacgcagctgccgaactctgactctagttctgcggaagaaaaggatgcggtatttgcttttgccatgatccctttccatttgattggcaggttaaataacatggtttttgaagtcacatacttaatattcttcctaaaaaccacccaaacactagatgtgtgtgtgcacacacacagaaaccacgaggtagtttaaatcaccattaaaaatcaacgctttctctgattctgtgtcacagagtggtggccagtggctacacaatagcgatttttaaatgattggttaagtgaaaaccagaactcaaaatattccaggagagaagataacatttacaagtaaacagtaagtgcaattgtattttaatttcttggtctccgaaaactcagctgtgactgctttccattaacagttccagctctatgtgtttcctctaacgctaaaggcacagcccccgggaatctactgcttcctaagagtctccatggagtctattttacaacctcctttccctccatgcttccgcggaggagtctatactatctctatatacacattttaaacattattcttcatttgaaattccttcaataaaaacacagtcaccattaaaaaaaa

SEQ ID NO: 31009 - DNA, 10257 bp, Homo Sapiens
caggcaccttttttgatccagtcaaggaagaggatttgttgttttcgaaatcagagtgaaggaagcaccgaagcgaaacttaaggaatcctgccttcccggagccgcgggcgatgcgactagggctgccgggcgccgccgccgcccgtccggcttcgtccttcccggcagtcgggaactagttctgaccctcgccccccgaccccggatcgaatccccgccctccgcaccctggatatgttttctcccagacctggatatttttttgatatcgtgaaactacgagggaaataatttgggggatttcttcttggctccctgctttccccacagacatgccttccgtttggagggccgcggcaccccgtccgaggcgaaggaacccccccagccgcgagggagagaaatgaagggaatttctgcagcggcatgaaagctctgcagctaggtcctctcatcagccatttgtcctttcaaactgtattgtgatacgggcaggatcagtccacgggagagaagacgagcctcccggctgtttctccgccggtctacttcccatatttcttttctttgccctcctgattcttggctggcccagggatgacttcctcgctgcagcggccctggcgggtgccctggctaccatggaccatcctgctggtcagcactgcggctgcttcgcagaatcaagaacggctatgtgcgtttaaagatccgtatcagcaagaccttgggataggtgagagtagaatctctcatgaaaatgggacaatattatgctcgaaaggtagcacctgctatggcctttgggagaaatcaaaaggggacataaatcttgtaaaacaaggatgttggtctcacattggagatccccaagagtgtcactatgaagaatgtgtagtaactaccactcctccctcaattcagaatggaacataccgtttctgctgttgtagcacagatttatgtaatgtcaactttactgagaattttccacctcctgacacaacaccactcagtccacctcattcatttaaccgagatgagacaataatcattgctttggcatcagtctctgtattagctgttttgatagttgccttatgctttggatacagaatgttgacaggagaccgtaaacaaggtcttcacagtatgaacatgatggaggcagcagcatccgaaccctctcttgatctagataatctgaaactgttggagctgattggccgaggtcgatatggagcagtatataaaggctccttggatgagcgtccagttgctgtaaaagtgttttcctttgcaaaccgtcagaattttatcaacgaaaagaacatttacagagtgcctttgatggaacatgacaacattgcccgctttatagttggagatgagagagtcactgcagatggacgcatggaatatttgcttgtgatggagtactatcccaatggatctttatgcaagtatttaagtctccacacaagtgactgggtaagctcttgccgtcttgctcattctgttactagaggactggcttatcttcacacagaattaccacgaggagatcattataaacctgcaatttcccatcgagatttaaacagcagaaatgtcctagtgaaaaatgatggaacctgtgttattagtgactttggactgtccatgaggctgactggaaatagactggtgcgcccaggggaggaagataatgcagccataagcgaggttggcactatcagatatatggcaccagaagtgctagaaggagctgtgaacttgagggactgtgaatcagctttgaaacaagtagacatgtatgctcttggactaatctattgggagatatttatgagatgtacagacctcttcccaggggaatccgtaccagagtaccagatggcttttcagacagaggttggaaaccatcccacttttgaggatatgcaggttctcgtgtctagggaaaaacagagacccaagttcccagaagcctggaaagaaaatagcctggcagtgaggtcactcaaggagacaatcgaagactgttgggaccaggatgcagaggctcggcttactgcacagtgtgctgaggaaaggatggctgaacttatgatgatttgggaaagaaacaaatctgtgagcccaacagtcaatccaatgtctactgctatgcagaatgaacgtaggtgagtcaacacaagatggcaaatcaggatcaggtgaaaagatcaagaaacgtgtgaaaactccctattctcttaagcggtggcgcccctccacctgggtcatctccactgaatcgctggactgtgaagtcaacaataatggcagtaacagggcagttcattccaaatccagcactgctgtttaccttgcagaaggaggcactgctacaaccatggtgtctaaagatataggaatgaactgtctgtgaaatgttttcaagcctatggagtgaaattattttttgcatcatttaaacatgcagaagatgtttaaaaataaaaaaaaaactgctttatcctcctgtcagcaccccctcccacccctgcaacaaagacttgctttaaatagatttcagctatgcagaaaaatttagcttatgcttccatatttttaaattttgttttttaagttttgcacttttgtttagtctcgctaaagttatatttgtctgttatgaccacagagttatatgtgtgtgtatcaaaagtggtctcaaaatatttttttaagaaaaaaagcaaaaacaatgtattgctgataatcagtttggaccagtttcttaaggtcattaaaacagaagcaaattaagacaggtttgactgcagtggtgtctggtatccatgttttatttctgggcacaagctagtttttatgttgatacgttcctgaacatattatcttgttggacatcttttctcttgtgttttgtttgaatgtgcaatagtttataggccacaaataagctttcttgtaagctctcttcctaacagggcacatattcttccataatataaacacttttctgccccatctcccatacttttgaaggtcagttctatgacagtgaattttgcacaggagaagcagctacctgatttcttactttctctctccttatcatggagaatacagaaacattgtctgaaagggctctaaagaaggaactaccaaaacctgacttgaaatgccatttcttttaaccttccaaatcctaaatgtttccttcaaggcatcttaataaacttatttgcttctggttttgggagttcataagagagaatagaacaaaatacaggacatcaaatattagccatttcccattttattttatttttctatgtaggttcatgttccatgttcatttatttaagaaatacatttttattggtaagcttatagagctacacttatggaatttttaagtaggtaaataaatggttaagacaaaatagtgttatagccttcattctctgaataggccatctttgactcataaaattacccttactgtttattataacttcagaagtaatttatagttctgaacctatagtatcttttaccctgttcccaagcaaagactggtgactttatctgaaaatgattcctcttcccatgacctaaaacactgtgaggaaaaatcattcaagtggcatgccaagtccctatgaaggaagggctgctatcaaacctaccttttttgagcaaactgagactaaacttctctcttttcaaaattgtgttatcttccttaatcctattttcataatttttccttttgccagtttttcacattatctttgatatgtgagcaacatttattatttacattagagtataccttttagtaataaaatgacttgaaatcatattatttttaaaagccctttgcttctttcattacttataatctcctctaaaacaacctctgcatgttttttttaaataaagcactttctgtcaaataatggacttttttctaaacagaaattattttctattaatttgcaaactgatgatttcacttttttttacttttttttcgattatcagagtacttagtaaatgttatatagtttagttctaagatagttccagggattaaaaggttaagaggaaaacacaaatcaccaaatttctgatttatgtttttatctcctgaacaatattttctcactcatattcctctatcttatcacttagctaaagacagcctaaatttcccaattttctgtccaaaatatttgtgatttacttgtatataagccttctcatttgccatgtgctgtgatcttacaagttagatgttactatacctaccatttattcagctggattgctgaacacagttctggattcatagaattaagaatatcttgttagtgcccaggatttccacgttttgtgttttattggcccttttctttattcagccccttaatctattttcagtcttctggcacgtaatttttttcacagttattattcttctattaacaaattatttttatctttcctagtacattttcacttagttctcttgcccttaaatatctttcacatgcattttaggatattcttttcaaatatttgtaggacaactttgaatcaaaataaattatgttccttctccaatttgaagcattgaggataaatgaccatttgaggtctaactgatcttttcctgccagaagagttatcttacgttctgctatatttgtatttgggccagttgattgtaggttgtccaacattttttaatattgggaaaattatgataaaatgctttaaaaattaatatgccagattaaaataactgaatagtttactatttcattcaagcatgtttaaaacaaataatttcctttcaccagtttttcttagtaaactcctgaaaaagtaggaaaggtggaaagtatatatcatttttataaattttaaattgtacatcagacttttaaaatctgtaatatacaagcaagcaaaattattttaaatgacttaattgtatgctaatactcatctgataataaatgcttcttaaagttgacatttaactgctatcacaaagttttatatgtagaaaagtggggtccttttgaataaaagatcattcaactaaaaatattaaaatttatttcactggatggtaatgtaaccttaaaagcatcataataggtaaagtctaatattagttcccttaacaaaatcctaactgtataccagaattaggtcactgaaagaacttgatttgaattacgtttagacaaaaatgatttaattgtaaattcttaaaactttctaaatgcataattggcaaaaaaaaaaacccactgttaccagtgtaggaagttacaagaaggcacatactgaatgctgaagtatacatatgctatttctcttaaacctcagagcaaccatatgagcattgtaattaatattcccattttacagatgaggaaactgaagctaagagaagctaagtaatatgcccaaggtccacatctagtaacagacaaagctgggatttcagtctatgtctgcctctctccacatctctttcatccataccacactgcctacatgccatatgacaggatgtgtaatgggctaacgtttatttaaaaagttcaggccaggtgcagtggcttatgcctataatccccgcactttgggaggccgagccgggtggatcatgaggtcagacgttcaacaccagcctggccaagatggtgaaaccccgtctctattaaaaatattttttaaaaattaactgagcgtggtggtgggcgcctgtagtcccagctactcaggaggctaaggcaggagaatctcttgaacccgagaggtggaggttgcagtgagctgagatcgcgccactgcactgcagcctaggcgacagagcaagactgcctcaaaaaaaaaacataaaaattcagtcactatactctggcacaattttcatttgtatatgagccaaaccacataccttaatgatttgggaagttaggcaaatatgagatatgtagacatatctatgctgattgttgcttgagaaataattactaattctagacaaaactcaatcctgtatcttccatcatgaatcttaaaatcatttcacttcactcctaacatttcttacattgcagaactaatggtaaagtaaattttacggaaaaagttaagatagctttgggaacagagacctttccctaaattgattccatagcagatttgggggaattaacaaagaatttcagtctcatcaatcctttgaatccatcttcaaaacttctgcttttaataactttagaaaatttactaatctatagaactaattgagtaggatataggaaggatacaaggatataatgtcctttttataaaagtttagtatagcttctttacatgtatccacttgttccagaaaatgtgcattggttctgaatgtgaaaatatttaaagagagaaaggaacactcaagtaagtgtgggcttcagtgggaattatcacaaaacattggcaagtatttttatttaaattattttcaaatttgacttctacagccaagtggaattggtaggctgtagctgttacactgaaatttctagtctttgtaagtgcctcctgaaagtcatttaaaatggaaaaatatttcaatgagcttttccttttttcatatttatggacatgaatattttattggagatcattaactcctagaatttgagattatatttccatacaacattttataaagttatgttgaacttactacctgttatgtgcaggttattatgtaactattcacagattgcttcatatattgctttatcttcccatctaacttcttaaagttaaaatccggacacacatgttgattatctagaccagtcattctggaaattgtaacactcccacataaaccccaggagactttttcagaatgcaatgtttctaaatgtactgttactggcagtttactctccagcatataaggttgcattttaacttttagattatgaactgtgcaaactttacccaaaactatcttgcatgattccctcctaaatatattccttgattaagtaaatctggcaaatcactgtttgagctagttacataaaatttgttatcaagagaaggcttttctacaagtttccagattaacataaagaaaagagggaatcacagggcatttaagtgcaccttcccattactttccttaaatcacctcatagttaggctgggcgcggtggctcacgcctgtaatcccagcactttgggaggccgagacggtggatcacgaggtcaggggactgagatcatcctggctaacacgatgaaacctcatctctactaaaaatacaaataattagccaggcatggtggcacgcgcctgtagtcccagctactcgggaggcagagacaggagaatcgtttgcacccgggaggcggaggttgttgcagtgagccgagatcgcgccaatgcactccagcctgggctacagagtgagactccatctcaaaaaaaaacaaaaaaaatcacctcatagtttatgtctgacttactccaaacctcagttatctgatttgtagtctgtgtcaggaaagttttcttcatatctattctgtctccctcctctttgattttaaatttttttcttttacccagtaggacaaaaaagagcagttggtcatcatccccaatattcttagtcttcagtatgcttcaggcctctcaatgaacacttaagtctcaattcttcagacaaaattgcttaagctcttctcctcagtcctattttaatgactttatatttaagaatatagaattatattttcttttatattcaaattcattactccagttaagtaatagtttgatagtttgatagaatcgagagttaagatgtttctatttgaaagtggattcaaccatcagaccaccagcaaatcggcacttaatttttgtgttatctaacattttctattgtggaattttatgattttatattctcattagttataactaaaaagccatgcacacagaattgtatatcattttgccattaaaattttttaacatattgcagcaagcttagttttatgattgagccacaaccttttacatattttttgtatgaaatattaaacactaaatgcaagattaactttcaaaagcaaaccctacattaatcaggtattatctatggacatttttgtagaccacttttgaaatacttattattttgcaacatagactggactatacaactttcatttaacttttaggtgactgatttaagttgagtgtgcatatagagaaaaacctagaaatttatctcatggcagatacatttgaaagtacttcagaagaatttatgctgtatattaaaactaggctcaaaataaatctatcgtatctttaaaagtccaattctgttattactgtgatgtttgtagtgttactattaaacattgtgaacatacacatttttaaaacaacttgaaacccattttaaaatctgggtaagagagaaggaatcttcagaacaaaatcacatcattagggtgtccagtttatgattgaatttttaagcaaattactgtatttgaaactacaacttgatttggttttcagttttaaaaggcaacatgtgggttttatccattttatttatacctttagatttcagaaacatcttcatgttttagatgcattctacagacatcatgttacttaaaaactcagggcccctttcatccctttgtacactgaaaaagttcaattgttagcaagtaagcaattagatccagttgaatatttaaagtgtttgttgcacagttcatttaatgtttcatcttatttgactttttcacatagatataatatcagatttcattaattataaaaagttgcccagttctgtaattactgaacagagggaatgactcaactaattggctacatgttgcaacaaatttaggcctttagagttgaagcactgacttaaaacgacttacatttctgttctttggtcaaatgaccatacatgatatgggacaaattgtttcattttgtttgttttttaataagggaacttggtaaagtagttcctgtcagataggattttctcaagagacaatttaacgttataaagccttctaaaagtgaactaaatattttataactttagtaatagcttggatggttttgagaaaataacctgtatttatcacattgtcaaacagaatttttctttgaatcagacaagttcaagctctaaattgatgtgctatatacttaaaatcctaggaagttatctgtaaccagtctcttgtctcaggctcttcaccttgttaccaatcctcgtaagtatgtaaaggaaacatatttttaaagaagcttaacagtaagaaaaaattactaaaagatgcaattcaaagataggtcccagtttaacactgaattgcttgacttctgtggcttttctttttctggccacatttatttatttaagcaatttttgtatgccttgttatttcatttccatagagattatattgtatcagtgtttatgtaagctggaatcatcctcagttttttgctgataatttttcaaataaagatacatggataattgtaaaatacactaactcttagggtgttgtagtagctgaaacatggagatgcgtagctgtcatgctttttctgaatggacaggagaaacataagctacggagtattcacttctgaggatgcttttccggaaaaagaaaggctagaaaatactcgcacttcctcagaaccctctttcttgttaacgggtatcttttgttggtgtgttttgctcttacattacagatagactatcatatatgactttatgaataatttcagttattttgcttttgtataagctgtctgaagccttgctatgctgtataagttgtgtttgatggatcagtgtgagtataaaataaagcaaatcacttttcttttgtattatctatggatgccactatgaaagctgacattaagccactaaagagttttctatgaataagtgtaagtaaatgctttgatatatataaacctaaataaaaagattgtattgatacagagacattggagaaggagattttaaggcagttctttaggtttaaaaaggcttgctgtaaaatggtgcgttattccgtttattaaagatcatattaatgacaataaaaaaaaaaaaaaaaa

SEQ ID NO: 31010 - DNA, 2668 bp, Homo Sapiens
cccttccgtccttcattagacgtttgctcttgtcttagatgctcagatggtagtggataggcctgtgacgaaggtgctaccatcgtgagagtaagattatattctcctgccttttaaaaagatggacttcagcagaaatctttatgatattggggaacaactggacagtgaagatctggcctccctcaagttcctgagcctggactacattccgcaaaggaagcaagaacccatcaaggatgccttgatgttattccagagactccaggaaaagagaatgttggaggaaagcaatctgtccttcctgaaggagctgctcttccgaattaatagactggatttgctgattacctacctaaacactagaaaggaggagatggaaagggaacttcagacaccaggcagggctcaaatttctgcctacagggtcatgctctatcagatttcagaagaagtgagcagatcagaattgaggtcttttaagtttcttttgcaagaggaaatctccaaatgcaaactggatgatgacatgaacctgctggatattttcatagagatggagaagagggtcatcctgggagaaggaaagttggacatcctgaaaagagtctgtgcccaaatcaacaagagcctgctgaagataatcaacgactatgaagaattcagcaaaggggaggagttgtgtggggtaatgacaatctcggactctccaagagaacaggatagtgaatcacagactttggacaaagtttaccaaatgaaaagcaaacctcggggatactgtctgatcatcaacaatcacaattttgcaaaagcacgggagaaagtgcccaaacttcacagcattagggacaggaatggaacacacttggatgcaggggctttgaccacgacctttgaagagcttcattttgagatcaagccccacgatgactgcacagtagagcaaatctatgagattttgaaaatctaccaactcatggaccacagtaacatggactgcttcatctgctgtatcctctcccatggagacaagggcatcatctatggcactgatggacaggaggcccccatctatgagctgacatctcagttcactggtttgaagtgcccttcccttgctggaaaacccaaagtgttttttattcaggcttgtcagggggataactaccagaaaggtatacctgttgagactgattcagaggagcaaccctatttagaaatggatttatcatcacctcaaacgagatatatcccggatgaggctgactttctgctggggatggccactgtgaataactgtgtttcctaccgaaaccctgcagagggaacctggtacatccagtcactttgccagagcctgagagagcgatgtcctcgaggcgatgatattctcaccatcctgactgaagtgaactatgaagtaagcaacaaggatgacaagaaaaacatggggaaacagatgcctcagcctactttcacactaagaaaaaaacttgtcttcccttctgattgatggtgctattttgtttgttttgttttgttttgtttttttgagacagaatctcgctctgtcgcccaggctggagtgcagtggcgtgatctcggctcaccgcaagctccgcctcccgggttcacgccattctcctgcctcagcctcccgagtagctgggactacaggggcccgccaccacacctggctaattttttaaaaatatttttagtagagacagggtttcactgtgttagccagggtggtcttgatctcctgacctcgtgatccacccacctcggcctcccaaagtgctgggattacaggcgtgagccaccgcgcctggccgatggtactatttagatataacactatgtttatttactaattttctagattttctactttattaattgttttgcacttttttataagagctaaagttaaataggatattaacaacaataacactgtctcctttctcttatgcttaaggctttgggaatgtttttagctggtggcaataaataccagacacgtacaaaatccagctatgaatatagagggcttatgattcagattgttatctatcaactataagcccactgttaatattctattaactttaattctctttcaaagctaaattccacactaccacattaaaaaaattagaaagtagccacgtatggtggctcatgtctataatcccagcactttgggaggttgaggtgggaggatttgcttgaacccaagaggtccaaggctgcagtgagccatgttcacaccgctgcactcaagcttgggtgacagagcaagaccccgtccccaaaaaaattttttttttaataaaacaaaatttgtttgaaatcttttaaaaattcaaatgatttttacaagttttaaataagctctccccaaacttgctttatgccttcttattgcttttatgatatatatatgcttggctaactatatttgctttttgctaacaatgctctggggtctttttatgcatttgcatttgctctttcatctctgcttggattattttaaatcattaggaattaagttatctttaaaatttaagtatcttttttccaaaacattttttaatagaataaaatataatttgatcttaaaaaaaaaaaaaaaaaaaaaaaaaaaaaaaaaaaa

SEQ ID NO: 31011 - DNA, 5411 bp, Homo Sapiens; identical to SEQ ID NO: 28212

SEQ ID NO: 31012 - DNA, 5947 bp, Homo Sapiens; identical to SEQ ID NO: 23755

SEQ ID NO: 31013 - DNA, 7507 bp, Homo Sapiens
tgctcacttctgacagccagacaagggctgtgctcaggggcagctcggctgggcacacagtaggtgctttagcggacagcactgaggcccccagcaagaagcccatgagctcctccccctcccgcagtgccgccgacatctacatccgggagtatttccacagccacgtcagcggcggccaccccgaggccactcctctccgtgtgatgtacacggaccggccgctgagccagacggacccagtcacgctgcagtactgttgcctgaccgacgaccgccaggctttccgcccgcccacacgggcagagctggcgcggcaccgcgtggtggtcaccaccacctcccaggcccgtgagctcagggtgccggtcggcttcttctcccacattctcatcgatgaggcggcccagatgctggagtgcgaggccctcaccccgctggcctacgcctcgcacggcacccgcctcgtgctggcgggcgaccacatgcaggtcacaccccggctgttcagtgtggccagggcccgggcggccgagcacacgctgctgcaccgcctcttcctgtgctaccagcaggagactcacgaggtggcgcggcagagccgcctggtcttccacgagaactaccgctgcacggacgccattgtcagcttcatctcgcggcacttctacgtggccaagggcaaccccatccacgccaggggcaaggttccgccccacccccggcactacccgctcatgttctgccacgtggcgggcaacccagaccgggacatgtccatggcgtcctggctgaatctggctgagattgcgcaggtcgtcgagaaggtgcaggaggcctacaacacctggcccagctgctggggcggccgcgagcagaggtgcatctgtgtcgtttcccacggtgcccaggtcagtgcactgaggcaggagctgaggaggcgggacctaggccaggtgtctgtcggcagttttgagatcctgccagggcggcagttccgggtcgtggtgctcagcactgtgcacacctgccagagcctgctcagccctggggcactggcccctgagttcttcaccgacgcccgcgtgctcaacaccgtcctgacccgcgcccagtcccagctggtggtagtgggggacgccgtggccctctgctccttcggggcctgcggcaagctctgggagagcttcatccgtgagtgcgtggagcggcacagtgtctgccccgagggcctgtccatggagcaggtcgagcagggtgtggcgcagagacggcgctggcctccccgaggcacacaggctggggcagcggggaactgggaggctgccccagagccagtaggggacctggccgaggagcaggcggctgtggtgacggccatggtgaaggcagagccgggagatgaggctctgagcccagcatcccgtgacatcacggcaaccacagcgcagacggaggctgcggcagcaccagcaggagacgcagtgaaggaagacgtggtgcccggggcctgtgcggcaggagcggctgctgcagcgggcgtggagtccacggaggctgaggatgcagaggctgacttctggccgtgggacggggagctcaacgctgacgacgccatcctacgggagcttctggacgagagccagaaggtgatggtgaccgtcggggaggacgggctgctggacactgtcgccaggcccgagtccctgcagcaggcccggctgtacgagaacctgcccccggctgcgctacggaagctgctgcacgcggagcccgagcggtaccgccactgctctttcgtgccagagaccttcgagcgggcgtcagccatcccgctggacgatgcctcctcgggccccatccaggtcaggggccgcctggactgtgggatggccttcgccggggatgaggtgctggtgcagctcctttcgggagacaaggcgcccgaggggcggcttcggggccgcgtgctgggcgtgctgaagaggaagaggcacgagctggcgtttgtgtgccgcatggacacgtgggacccgcgcatcatggtccccatcaatggctccgtgaccaagatcttcgtggccgagctgaaggacccatcgcaggtccccatctacagcctccggaagggccggctgcagcgtgtggggcttgagaggctcaccgccgaggcccggcacagccggctcttctgggtccaaattgtcctgtggcggcaaggcttctactacccgctgggcatcgtccgggaggtgctgcctgaggccagcacctgggagcagggcctccgcatcctcggcctggagtacagcttgagggtgcccccgtcggaccaggccaccatcaccaaggtgctgcagaaataccacacggagcttggccgggttgccggccgccgagaggactgccgcgccttcttgaccttcactgtggacccccagggcgcctgcaacctcgatgatgccctcagtgtccgagacctgggtcccaggtgcgaggtggctgtgcacatcactgatgtggccagcttcgtgcccagggacggggtgctggacgtggaggcgcgaaggcagggcgctgcgttctatgcccccggcagggagccagtgcccatgctgccggccagcctctgccaggacgtcctcagcctcctgcctggccgggaccgcctggccatctccctgttcctcaccatggagaaggccagtggccagctgaagagcctgcgctttgcaccctccgtggtccagtctgaccgccagctgtcctacgaggaggcggaggaggtgatcaggcagcacccgggtgccggccgtgagctgccggcccgcctggactccgtggacgcctgcgtcgtggccgcgtgctacttctctcggctgctgcgccggcaccgcctgcggtccgactgcttctatgagcagccggacgaggacggcaccctgggcttccgcgcggcccacatcatggtgaaggagtacatgattcagtttaataggctcgtggctgagttcctggtgggcagcgagtgcacgcggacggtcacgcctctgcggtggcagccagcaccccgcagccagcagctcaaggccctgtgtgagaagcatggggaccgggtgcccctgtcactgcacctcggccaccacctgcacggcggcgggggcagtccccccgacacgcggctgcacctcctggcctccctctggaagcaggtccagtttgctgcccgcacccaggactacgaacagatggtggacttggtcaccacggacgacatgcacccattcctggctcctgcaggccgcgacctccgcaaggccctggagcgctcggcgttcggccgctgcgcccggggccaccagcagcagggcggccactactcgctgcaggtggactggtacacgtgggccacctcgcccatccgcaggtacctggacgtggtgttgcagcggcagatcctgctggcgctgggccatgggggctctgcctactctgccagggacatcgatgggctctgccaggccttcagcctccagcacgcacttgcccagagctatcagcggcgggcgcgcagcctgcacctggccgtgcagctcaaggcccagcctctggacaagctgggcttcgtggtggacgtggaggcgggctcccgctgcttccggctgctcttccccagcaaccgggagacgctgcctgacccctgccccgtcccctacggctccctgcagctggccgagcacccccacgccctggcaggccggccgggcctgcggctcctgtggcggcgccgtgtctactcagcgcagggatccagcccgcccctgccactgcctggcactgtgccggacccacacaccctggccgtggagacggccctgtggaagcagctgctggagctggtggagctgcagcgctggccggaggcggctgctctcatccaggagaagggcgaggcgtcccagcggcgggagctggtgcaggtgcagcggagccactgtggccatttcctggaggtggcccgggagctgggcagtggggacaccctgcaggtgcagctcggcaccagcctgcagcacggcttcctggtaccgagccctcagctctggacggtggcaccgggcttcagcctctgcctggagcacgtggagcggcccggagactgcttctcaggccgtgtgtaccgggccccgagggaccggtaccgcgacgtggatgagtacgcctgcgtgtgggaaccattctgcgccctggagtcggccaccggcgcggttgccgagaatgactccgtcacacttcagcacctgagtgtctcctgggaggcgtcacggacgccgcaggggcagctgcagggcgccttccgcctggaggccgccttcctcgaggagaactgtgccgacatcaacttcagctgctgctacctctgcatccggctcgaggggctgccggctcccacggccagcccacgccctgggcccagcagcctcggccctggcctgaatgttgaccccggcacgtatacctgggtggcccacgggcagacgcaggactgggaccaggagcgccgggcagaccggcaggaggctcccagacgggtgcacctcttcgtccaccacatgggcatggagaaggttccggaagaggtgctgaggccgggcaccctgttcaccgttgagctgctgcccaagcagcttcctgatctccgcaaggaggaagccgtgcgtggactagaggaggcgtccccgctggtcaccagcatcgcactgggccggcctgtcccgcagcccctctgcagagtgatccccagcaggttcctggagcggcagacctacaacatccccggaggccgccacaagctgaaccccagccagaacgtggcggtcagggaggctctggagaagcctttcacggtcattcagggcccaccaggtacagggaagacgatcgtgggcctccacatcgtattctggtttcataaatcaaaccaggagcaggtgcagcccggaggccccccccgtggggagaagcggctggggggtccctgcatcttgtactgcggcccctccaacaagtcggtggatgtcctggcaggactgctcctgagaaggatggagctgaagcccctccgtgtgtacagtgagcaggctgaggccagcgagttcccagtgccgcgtgtgggcagcaggaagctgctcaggaagagcccccgggaggggaggccgaaccagagcctcaggagcatcaccctgcaccaccggatccggcaggcccccaacccttactcgtcggaaatcaaggcctttgacacccggctgcagagaggggagctcttctccagggaggacctggtctggtacaagaaggtcttgtgggaggctcggaagttcgagctggaccggcatgaggtcatcctctgcacctgctcctgtgcagcctctgccagcctcaaaatcctggacgtgaggcagatccttgttgacgaggcaggcatggccacggaacctgaaaccctcatccccctggtgcagttcccacaggccgagaaggtggttcttctcggagaccacaagcagctgcggcctgtggtcaagaatgagcggctgcaaaacctgggtctggaccggtctctgttcgagcggtaccacgaggacgcacatatgctggacactcagtaccgcatgcatgagggcatctgtgccttcccctctgtggcgttctacaagagcaagctgaagacgtggcagggcctgaggaggccgcccagtgtcctgggccacgctggcaaggagagctgccctgtcatctttggccacgtgcagggccacgagcggagcctgctggtgtccacggacgaagggaatgagaactccaaggccaacctggaggaggtggctgaggtggtccgtatcaccaagcagctgaccctggggaggaccgtagagccccaggacatcgccgtcctcacgccctacaacgcgcaggcctctgagatcagcaaggcccttcggcgagagggcatcgccggggtggccgtgtcctccatcaccaagagccaggggagcgagtggcgctatgtgctggtgagcaccgtccgcacctgtgccaagagcgacctggaccagcggcccaccaagagctggctcaagaagtttctgggcttcgttgtggaccccaaccaagtgaatgtggctgtcacgcgggcccaggaggggctctgcctgatcggagaccacctccttctgcgctgctgccccctctggcgtagcctcctggacttctgcgaggctcagcagaccctcgtgcctgccggccaggtgcgcgtctgcaggaggccaactatgccttcctgaagagccctctccacctgcaaggtgccaggactgggagggaaagtccagggcccccccaccctccccaccaccctccgccatcagcctgcctgggccagcctgcctcctggcctcaggatctccctggggcaggaagtgggtggacttggaggaggaacggcaagggccggtccccacactcttgctcctcctgggcatctggggacaggaacacctctcagggtggccaagaggggcttccttgggaccagtgcaaggaagttctgctgtccctgggaagtctcagaaccaggaaggaaaccctgtggaggctgccctttgacctttggacgccacctgtaatcactctggatggtgtctgtggagttcaggtttattttctatttaaatgaactaaaagccagcatcctgccgggcgtggtggctcacgcccataatccagcactttgggaagccgaggcgggcagatcacctgaggtcaggagttcgagaccatcctggccaacatggtgaaaccccgtctccactaaaaatacaaaattagctgggcgtggtggcgggcgcctgtaatcccagctacttgggaggctgaggcaggagaatcgcttgactccaggaggcgcaggctgcagtgagctctgatggtaccactgcactccagcctgggtgacagagcgagaccctgtcttaaaaaaaaaaacaaaacaaaaccagcatctgttactggaacagagacctcagcccaagctcaggacaaggaggcctccctgggagagggggcctttctcccaccatcaccgcctgtgtccttcaggggctgctggagggcagcccaaagccaggggcccaccccgccccaccccaccccaccccaccctctgaaatgtgaaaagcctgcactcttcctgtgggctgcgcagtgggctcgggggttggggggtgccggggcgatgcttccaccctggactgagtgttcggggcagcctgctcggctgtatgtttctcgcacgctcacccgcttcagtgcggctctgtccctgctgccgcctccagtcctgagggaggggcttgccccaccttctacattccaatttttatatctttgaattatgtgattagatattaatttaatgataaaaccactctgaaagctcttctca

SEQ ID NO: 31014 - DNA, 1654 bp, Homo Sapiens
gggccagacctgcaccgggccaggcaagatggcggccatggagaccgagacggcgccgctgaccctagagtcgctgcccaccgatcccctgctcctcatcttatcctttttggactatcgggatctaatcaactgttgttatgtcagtcgaagacttagccagctatcaagtcatgatccgctgtggagaagacattgcaaaaaatactggctgatatctgaggaagagaaaacacagaagaatcagtgttggaaatctctcttcatagatacttactctgatgtaggaagatacattgaccattatgctgctattaaaaaggcctgggatgatctcaagaaatatttggagcccaggtgtcctcggatggttttatctctgaaagagggtgctcgagaggaagacctcgatgctgtggaagcgcagattggctgcaagcttcctgacgattatcgatgttcataccgaattcacaatggacagaagttagtggttcctgggttattgggaagcatggcactgtctaatcactatcgttctgaagatttgttagacgtcgatacagctgccggaggattccagcagagacagggactgaaatactgtctccctttaactttttgcatacatactggtttgagtcagtacatagcagtggaagctgcagagggccgaaacaaaaatgaagttttctaccaatgtccagaccaaatggctcgaaatccagctgctattgacatgtttattataggtgctacttttactgactggtttacctcttatgtcaaaaatgttgtatcaggtggcttccccatcatcagagaccaaattttcagatatgttcacgatccagaatgtgtagcaacaactggggatattactgtgtcagtttccacatcgtttctgccagaacttagctctgtacatccaccccactatttcttcacataccgaatcaggattgaaatgtcaaaagatgcacttcctgagaaggcctgtcagttggacagtcgctattggagaataacaaatgctaagggtgacgtggaagaagttcaaggacctggagtagttggtgaatttccaatcatcagcccaggtcgggtatatgaatacacaagctgtaccacattctctacaacatcaggatacatggaaggatattataccttccattttctttactttaaagacaagatctttaatgttgccattccccgattccatatggcatgtccaacattcagggtgtctatagcccgattggtaagttaaattttcctctagtgctgatttacatgactttgtagggttaacactgcagataagccaggcaaatagttagtttataaatagtgttccagagaaccctagagattttgagaaagtatcttgggggtcatgtgaatttgttgagagaaatggacaagtaaatgaggctccatagtctctaaccagagaatttctgctgttttaaagattcaacttgtttttcactgttcagtggcctaaatgtagattatgagaaataccacattagaccagtagaatcagctttaagactgggaaaacaacttcttacagtgtttttgctcaaacttccaatttaatgtcaaataaacaaatattccataaagatcattataaagaaaa

SEQ ID NO: 31015 - DNA, 4980 bp, Homo Sapiens
agtgaaagtccagtttatgtatggagaggatccaagcaatgccatgccggtaatctttggtaaatctagctgttcagaattttcaaaggaagcctatacagccgtagtatatcataacaggtctcctgattttcatgaagaaatcaaggttaagcttcctgctactttaactgaccatcatcacttgctttttactttttatcatgttagttgtcaacaaaaacaaaatactcctcttgaaacaccagttggatatacatggataccaatgcttcagaatggacggttgaagactggccagttttgcttgccagtctcattggaaaaaccaccacaggcttattctgtactgtctcctgaggttcctctacctggcatgaaatgggtagataatcacaaaggtgtttttaatgttgaagttgttgctgtttcgtctatccatacacaagatccttatcttgacaaattttttgctctggtcaatgctctggatgaacgcctgttcccagtccgaattggggacatgcgaatcatggaaaataacttagaaaatgaattgaagagcagtatttcagcactgaattcatcccagctggaaccagtggtccgatttcttcatcttctgctagataaactgatacttttagttattagacctcctgtcattgctggccaaatagttaacctaggtcaagcatcttttgaagccatggcatcaattataaatcgacttcacaaaaacttggaaggaaatcatgaccagcatggcagaaacagccttcttgcatcatatattcattatgttttccgcctaccaaatacttaccctaattcatcatcaccaggtcctgggggtttgggaggatcagtgcattatgccacaatggctagatctgcggtgagacctgcaagccttaatttaaatcgttctcgaagccttagtaatagcaatccagatatatctgggactcccacgtcaccagatgatgaagttcgatcaatcatcgggagtaaggctatggatcgaagttgtaatcgtatgtcttcgcacacagagacgtcaagtttcttacaaacattaacgggacgcttaccaactaaaaagctttttcacgaggagctggctttgcagtgggttgtttgcagtggcagcgttcgggaatcagctttgcaacaagcctggttcttttttgaattaatggtaaagagcatggtgcaccatttatactttaatgataaacttgaggctccaaggaaaagtcgttttccagaacgtttcatggatgacattgcagctcttgtcagcacgattgctagtgatatagtttcacgatttcagaaggacacagaaatggttgagagactcaatacaagccttgcattctttctcaatgatctgttgtctgttatggacagaggatttgtttttagccttataaagtcctgctataaacaggtgtcttcaaagctttactcattaccgaatcccagtgttctggtgtccttgaggctggattttctacgaatcatctgcagtcatgagcactatgttacattaaacttaccctgcagcttacttactccacctgcatctccatcaccttctgtttcttctgcaacatctcagagttctggattttctacgaatgtacaagaccaaaagattgcaaatatgtttgaattatccgtgcctttccgccaacagcattatttggcaggacttgtgttaacagagctggctgtcattttagaccctgatgctgaaggactgtttggattgcataagaaagtcatcaatatggtacacaatttactctccagtcacgactcagacccgcggtactctgaccctcagataaaggctcgagtggccatgttgtatctacctctgattggtattatcatggaaactgtacctcagctgtatgattttacagaaactcacaatcaacgaggaagaccaatttgtatagccactgatgattatgaaagtgagagcggaagtatgataagccagaccgttgccatggcaatcgcagggacatcggtccctcaactaacaaggcctggcagtttcctcctcacgtcaacgagtggcaggcaacacactaccttttcagcagaatcaagtcgaagccttttgatctgtctactttgggttctcaaaaatgcagatgaaacagttctacagaagtggtttacagatctctcagtcttgcagctaaaccggctattagatctgctttatctctgtgtgtcttgctttgagtataaagggaaaaaagtgtttgaacgaatgaatagcttgacctttaagaaatcaaaagacatgagagcaaagcttgaagaagctattcttgggagcataggtgccaggcaagaaatggtacggcgaagccgaggacagctcggtacgtacacaatagcttctcctcctgagagaagcccatctggaagtgcctttggaagtcaaggaaatttgaggtggaggaaagatatgactcactggcgtcaaaacacagagaagcttgacaaatcaagagcagagattgaacacgaagcactgattgatggaaacctggctacagaagcaaacctaatcattttagatacattagagattgttgttcagaccgtttctgtaacggaatccaaagagagcattcttggtggagtgctaaaagtgctactacacagcatggcctgtaaccaaagtgtagtttatctacaacactgttttgctacacagagagccttggtttcaaagtttcctgaactcttatttgaagaagagacagagcagtgtgctgatttatgcctcaggcttctccgacactgtagcagtagcatcggtacaatacggtcacacgccagtgcctccctttacctactaatgaggcaaaactttgagattgggaataactttgccagggttaaaatgcaggtaacaatgtcactatcctccttggtgggcacatctcagaattttaatgaagaattcttaagacgttctctaaagactatattgacatatgctgaagaagatctggaattgagggaaacaacatttcttgatcaggtccaggatctggttttcaatctccatatgattctttctgatactgtgaaaatgaaggaacaccaggaggatcctgaaatgttgattgatctaatgtacagaattgccaagggttaccagacctctccagatctgcgattgacctggttgcagaacatggcaggcaagcactcagaacgaagcaatcatgctgaagctgcacagtgtctagtccactcagcagcacttgttgctgaatatttgagcatgctggaggaccggaaatatcttcctgtgggatgtgtaacatttcagaatatttcatctaatgttttagaagaatctgcggtctcagatgatgtggtatctccagatgaagaaggtatctgctctggaaaatactttactgagtcaggacttgtgggattactggaacaagcagctgcttccttctctatggctggcatgtatgaagcagttaatgaagtttacaaagtacttattcctattcatgaagctaatcgggatgcaaagaaactatccacaattcatggtaaacttcaagaagcattcagcaaaattgttcatcagagtactggctgggagcggatgtttggcacctattttcgtgttggtttttatggaaccaagttcggggatttggatgaacaagaatttgtttacaaggagcctgcaataaccaaacttgcagagatatctcacagattggagggattttacggagaaagatttggagaggatgtggttgaagtaatcaaagactctaatcctgtagacaagtgtaaattagatcctaacaaggcatatattcagattacctatgtggagccatactttgacacatatgagatgaaggacagaatcacctatttcgacaaaaattacaatcttcgtcgattcatgtactgtacaccctttactttagatggccgtgcccatggggaacttcatgaacaattcaaaaggaagaccattctgactacgtctcatgcctttccttatattaaaacaagggtcaatgtcactcataaagaagagatcatcttaacaccaattgaagttgctattgaggacatgcagaaaaagacacaggagttggcatttgcaacacatcaggatcccgcagaccccaaaatgcttcagatggtactccagggatctgtaggcaccacagtgaatcaggggcctttggaagttgcccaggtttttctgtctgaaatacctagtgacccaaagctcttcagacatcataataaactgcgactctgctttaaagattttactaaaaggtgtgaagatgccttaagaaaaaataagagcttaattgggccggatcaaaaggagtatcaaagggaactggagagaaactatcatcgccttaaagaggccctacagccactgatcaacagaaagatccctcagttatacaaggcagtattgcctgtcacctgccacagagattccttcagtcgaatgagccttcgcaaaatggatctctaaactgaatgcacttgttttattcatctgcaaagagccatgtattcaacatcgagtgtgaaaagatctattggaaaacaacatggaatggaattctggaaattattattcattgaagaatgcagtggccaagaaaatatcaaatgtagattgttaacgcttgagaatcatggctatggtttctaatgttctggtaacaagctgttatcttttaagacattttaatgactcaaaggtacactatacatttaccattatttataccatagctaaggttaaaaatttattcactttaagttcgtattttttaatttatattaccatttatagattcattttggaaccattttaaatgtagtaatgcttattttaaaggtactattaaatatgtgaatgtttacact

SEQ ID NO: 31016 - DNA, 2619 bp, Homo Sapiens
actagaaggaagaagtatggagttaaagactgcagcgtgaactgaggagtcccggacaggccgcttgctgcagaggatccagtccagatcccaggagagcccctctgccccttcggacctcgtctcccatctacaaaacgtgaagattggcccagttggcgtgtctctacaaaaaggtgcatataccactgccccgctgcaggctgatctgagaaagcctctggcccagggcagataccgccatggccttcctgatgcacctgctggtctgcgtcttcggaatgggctcctgggtgaccatcaatgggctctgggtagagctgcccctgctggtgatggagctgcccgagggctggtacctgccctcctacctcacggtggtcatccagctggccaacatcgggcccctcctggtcaccctgctccatcacttccggcccagctgcctttccgaagtgcccatcatcttcaccctgctgggcgtgggaaccgtcacctgcatcatctttgccttcctctggaatatgacctcctgggtgctggacggccaccacagcatcgctttcttggtcctcaccttcttcctggccctggtggactgcacctcttcagtgaccttcctgccgttcatgagccggctgcccacctactacctcaccaccttctttgtgggtgaaggactcagcggcctcttgcccgccctggtggctcttgcccagggctccggtctcactacctgcgtcaatgtcactgagatatcagacagcgtaccaagccctgtacccacgagggagactgacatcgcacagggagttcccagagctttggtgtccgccctccccggaatggaagcacccttgtcccacctggagagccgctaccttcccgcccacttctcacccctggtcttcttcctcctcctatccatcatgatggcctgctgcctcgtggcgttctttgtcctccagcgtcaacccaggtgctgggaggcttccgtggaagacctcctcaatgaccaggtcaccctccactccatccggctgcgggaagagaatgacttgggccctgcaggcatggtggacagcagccagggccaggggtatctagaggagaaagcagccccctgctgcccggcgcacctggccttcgtctataccctggtggccttcgtcaacgcgctcaccaacggcatgctgccctctgtgcagacctactcctgcctgtcctatgggccagttgcctaccacctggctgccaccctcagcattgtggccaaccctcttgcctcgttggtctccatgttcctgcctaacaggtctctgctgttcctgggggtcctctccgtgcttgggacctgctttgggggctacaacatggccatggcggtgatgagcccctgccccctcttgcagggccactggggtggggaagtcctcattgtggcctcgtgggtgcttttcagcggctgcctcagctacgtcaaggtgatgctgggcgtggtcctgcgcgacctcagccgcagcgccctcttgtggtgcggggcggcggtgcagctgggctcgctgctcggagcgctgctcatgttccctctggtcaacgtgctgcggctcttctcgtccgcggacttctgcaatctgcactgtccagcctaggcaggccgccgaccccgcccccatcgctcacggacggaactggggtccagagaggccaggtcacagagcaaggggcaggaacagagagacagagcctgagtaattgaatcatgaacgcaagtgcccactggggactgtggggaagatggcacctggaaatgcaaggtgcggctctatccccaactctgtgtcacactacctgtgacgaccagctcagatctcctttgctttgactctcaagagaggactgatttgcagcatctagctggaggcaggcccaagggtgttagaagggaaacagctgggacagccggctgtcccttcaggctgtgtgaccttgggaaagtcatttggcttctctgtgcctgtttcttcatgcatgcagtggggattccagtaagtaccaactacctcacaggcatggcacggaggcaaaaggaaaaagcagcccgcatcaagcaagccctcctgggccacctgctgatctgacagtccatcgtagtaacaagagtggcagtctgcacaacctagaagtggccagaagggttgagacacgcccctgccctctctcctttgcccctcagtctcacagaggggcttctacaagacaagcagataacgatagaatcttgggcatcttggctttcggattctcagtgtggagggacgtagtaccccacacaccccttcctgtcatccttcctggcccataaagcccactagttggagagtaagtaccctcctggaagcagggagagatgatttgctggtggggctggggaaggcccatccctgagcctctgaaagtgaactccccgaccaggttggggaccagacatgcagagcccctggaagtattctctcaaatggaggcaacagaggtgattgttattttgttttagtttctgtttttcatttttttaaataaaggcattccctgcttttaaaaaaaaaaaaaaaaaaaaaa

SEQ ID NO: 31017 - DNA, 2759 bp, Homo Sapiens; identical to SEQ ID NO: 25634

SEQ ID NO: 31018 - DNA, 1306 bp, Homo Sapiens
ctctcggtgcaaagcgttcctgcagaattgcttccacgtaaagggaccttcgggaaatttcgctggataccggctggcattgacaaacccagcgtccctgagccttgtgaggtttccaggcaggctgattgcgaggcaacatgtctgcttcggtgaaagaaagccttcagcttcagctactggagatggaaatgctgttttctatgtttcctaaccaaggagaagtaaaacttgaagatgtaaatgccctgacgaatataaagaggtatttggaaggcacaagggaggcgctgccaccaaaaatcgaatttgtaattacactccagattgaagagcccaaggtgaaaattgatttgcaagtgaccatgcctcacagctacccctatttagcattgcagctgtttggacggtcatctgaacttgacagacatcagcagctacttctcaacaaaggtctcacttcttacatagggacttttgatccaggtgagctctgtgtatgtgcagcaatccagtggctacaggacaacagtgcatcttatttcctgaacagaaagcttgtatatgaaccatctacacaagcaaagccagtcaagaacacattcctccgaatgtggatctacagtcaccatatatatcagcaggacctaaggaaaaagattttggatgttgggaaaaggttagatgtgactggattttgcatgacaggaaagcctggtataatctgtgtggagggtttcaaagagcactgtgaggagttctggcacacaattaggtaccccaattggaagcacatttcctgtaagcatgctgaaagcgtggagacagaaggaaatggtgaggacctgcgccttttccattcttttgaagagttactccttgaggctcatggtgactatggattaaggaatgactatcacatgaatctgggccaattcttagaatttctcaagaagcacaaaagtgagcatgtttttcagatactatttggtattgaaagcaaaagttcagactcataaaaagcgattaagaggcctatgcctgtaatttcactaagtcagtatttctgttaataagaccaaattaaaaaggctagtggctgtgtagcatcctcagtgcaaaacccagctccagaattttcacctggtaacgaatttcaactgacagtgaaatgaataggcctttaaactttataacattgcaattgtgatgttatctctaggtttttgtgtgaagtcattcaaaaactatttcattgtaaattaataaaaacaatccaaaaaaaaaaaaaaaaaaaaaaaaaaaa

SEQ ID NO: 31019 - DNA, 1730 bp, Homo Sapiens
gcgggccccggctcgctagccgtcctgcgggacgccggcgctgatgggaaatccagttatcaaaattgactcaagaagagagaacctaacagaacaataacaatggaagaaattgggaacattatcacaaagctatcatcctgccaaactccaggctcagatgtcacaggttaaaaaaagtccttcatgaaaaagaaagatcttaagcagcatgatggattcagaagctcatgaaaagaggccaccaatactaacatcttcaaaacaagatatatcacctcatattacaaatgttggtgagatgaagcattacttgtgtggctgctgtgcagccttcaacaatgtcgcaatcacatttcccattcagaaggtcctctttcgacaacagctgtatggcatcaaaacccgggatgcaatacttcagttgagaagggatggatttcgaaatttgtatcgtggaatccttcccccattgatgcagaagacaactacgcttgcacttatgtttggtctgtatgaggatttatcctgccttctccacaagcatgtcagtgctccagagtttgcaaccagtggcgtggcggcagtgcttgcagggacaacagaagcaattttcactccactggaaagagttcagacattgcttcaagaccacaagcatcatgacaaatttaccaacacttaccaggctttcaaggcactgaaatgtcatggaattggagagtattatcgaggcttggtgcccattcttttccggaatggactcagcaatgtcttgtttttcggccttcgaggtcccattaaggagcatctgcctaccgcaacgactcacagtgctcatctggtcaatgattttatctgtggaggtctattgggtgccatgttgggattcttgttttttccaattaatgttgtaaaaactcgcatacagtctcagattggtggggaatttcagtctttccccaaggttttccaaaaaatctggctggaacgggacagaaaactgataaatcttttcagaggtgcccatctgaattaccatcggtccctcatctcttggggcataatcaatgcaacttatgagttcttgttaaaggttatatgaaaaaaccatcagttaagtgccatttatcaactgaatagaccttctaagaagaatgcagtttggcctcttttttttttttttttaaaggaaatcccaatcttattatggaaagccatcaactgggtgtggggagtaggtcagagggttagtgaaagtccaggggatttctcctccaagtcctaccacacaaaggaaagtctcaagcctctattcaccccttctcaatcctcacaaaatagggggttgttcaatattgtcttcaatgataaaaactttgtggttaaaagtttctccttaggactagtgacaaagttaggcttatacttttttttttttttgaggcagagtcttgctctgttgcccaggctggagtgcagtggcgcgatcttggctcactgcaacctccgcctccagggttcgggcaattctcctgccttagcctcctgtagtcctagctgctcgggaggctgaggcaggagaatctctttcttaattggccaaatataagttggtgtcgtaactccaggccacagtgagttatgggcaaagcttttttccttaagcatcaacaaaataggataaaaggttccaataggaaaaaaaaaaaaaaaaaaaaaaaaaaaaa

SEQ ID NO: 31020 - DNA, 2319 bp, Homo Sapiens
gcaaaacatttccctgctgggggcggcgaccaccgtgagcgtcccggaaggggcggcaaagacgcctccgtcgcgcacgaggtggcctcgttggctttaccttggttcgcggtcgtccttggttatcgtgagcgtccgcgagtctctgggaggccaagcctaggggcgccacagcgcctgcgcgcgtacggcggccggaaggggctagaggcggctccctgggtgacaaccgcgcgccccacctttccccacgtggccgcgaagaccggctcaggagcatctatcggctgcacgccaacatcaacacaggcgaagatggtctccaagcgcattgcccaggagacctttgatgcagctgtgcgcgagaacatcgaggagtttgcgatggggccagaggaggcagtgaaagaggccgtggagcagtttgaatcgcaaggggttgatctgagcaacattgtaaagacggcacctaaagtctctgcagacggatcccaggagcccacacatgacatcctgcagatgctcagtgacctccaggagtctgtggccagctctcgcccccaggaggtgtcagcatacctcacccgcttctgcgaccagtgcaaacaggacaaggcctgccgcttcctcgcggcccagaagggggcctaccccatcatcttcactgcctggaagctggccactgcaggtgaccagggccttctgctccagtccctcaatgccctgtcggtgctgactgatggacagccagacctcctggatgcccagggcctgcagctcctagtggccacgctgacccagaatgctgatgaggctgacctgacctgctctgggatccgctgtgtgcgtcacgcttgcctgaaacatgaacagaatcggcaagacctggtgaaagctggcgtgctgcctctgctgactggtgccatcacccatcatggccaccacactgacgtggtcagggaagcctgctgggccctgcgtgtcatgaccttcgatgacgacatccgtgtgccctttggccatgcccacaaccatgccaagatgattgtgcaggagaacaaaggcttgaaggtgctcatcgaagccaccaaagcgttcctggataaccctggcatcctgagcgagctctgtggaaccctgtcccgcctggccattcgcaacgagttctgccaggaggtcgtcgacctcgggggcctgagcattctggtgtccctgctagccgactgcaatgaccaccagatgagggaccagagcggcgttcaggagctcgtgaagcaagtgctgagcaccctgcgagccatcgcaggcaacgacgacgtgaaagatgctattgtccgtgctggtgggacggagtccatcgtggctgctatgacccagcatctgaccagcccccaggtgtgtgagcagagctgcgcggccctgtgcttcctggccctgcgtaagcccgacaacagccgcatcatcgtggagggtggcggggctgtggcagcactgcaggccatgaaggcacacccgcagaaggccggcgtgcagaaacaggcttgcatgctgatccgaaacctggtggcccacggccaggccttctcgaagcccatcctggacctgggggctgaggcactcatcatgcaggcccgatctgcccaccgtgactgtgaggacgtggccaaggccgccctgcgggacctgggttgtcatgtcgagctccgagagctgtggacaggccagaggggcaacctggcgccatgaccccaggcccagtctgggccgtgactctgggtgagtcgtgtgactcaggaatgggggtagatccatgtcctccactgtcccccattagttctgtccccttcacaatgagaagtgttttctggcaggccctaggtaaagggtcgggggaggggggagccttgtagggaggcctctacacagaagaaagcagcccccatgtcccagccacttctgggtcccagccagcagcacggatgttactgtcctgctccttcccccagccccacgccctaccagagggggcaaagggcacgtcccatcactcactgccctgtctgaaatgtggcagccactgtgggccaggctcagggcagggcaggcgattccagtggggttgggccccctggcgcctgctgcttactgcagtttcatgcaggcctctgctccttgtctttcttacctgtaaaatgggtctcagatgctccgccctgcttggccccagcttgtctgtctctgggtcctgggccagccaggatacctgataataaaagatcattgggtgaaaaaaaaaaaaaaaaaaaaaaaaaaaaaaaa

SEQ ID NO: 31021 - DNA, 1445 bp, Homo Sapiens
gtccggaggaggcgttgtgaggtgagctttttcagaagcgcgatcccaggacacgtcgggaagcaagcatccccagagctgcttggaaagaggaccaaagacgtctaaaaagtcatttggaaatatctctaaatatttgttaccatgtataagctgctaaagagaaattgggcccaacaaaactaattgaataattgaggcagatttgtgtgtatcatcaaattctatccagaagttgaagaatctgaatttaaagattgtgtgcatttaataagaggatgacctttcagtttaatttcactatagaagaccatctggaaaatgaattaacacccattagagatggagctttgaccctggattcctcaaaagagctgtcagtctcagaaagtcaaaaaggagaagagagggacagaaaatgttctgcagaacaatttgacttgcctcaggatcacttgtgggaacataagtcaatggaaaatgcagctccctctcaagacacagacagtccactcagtgcagccagcagttcaaggaacttggagccacatggaaaacagccctccttgagagctgccaaagagcatgctatgcctaaagatttaaagaagatgttagaaaataaagtcatagaaacattaccaggtttccagcatgttaagttatcagtagtgaaaaccatcttgttgaaagagaacttccctggagaaaacatagtttcaaaaagcttttcttctcactctgatctgattacaggtgtttatgagggaggcttaaaaatctgggaatgtacctttgacctcctggcttatttcacaaaggccaaagtgaaatttgctgggaaaaaagtcttggatcttggttgtggatcaggtttactaggtataactgcattcaagggagggtccaaagaaattcactttcaagattataacagtatggtgattgatgaagtaaccttacctaatgtagtagctaactccactttggaagatgaagaaaatgatgtaaatgagccagatgtgaaaagatgcaggaaaccaaaagtaacacaactatataaatgccgatttttttctggtgagtggtctgagttttgtaagcttgtactaagtagtgaaaaactttttgtaaaatatgatctcattctcacctcagaaaccatttacaacccagattattatagtaatttgcaccagactttccttagactgttaagtaaaaatggacgtgtacttttggccagcaaagcacattattttggtgtaggtggaggtgttcatctctttcagaagtttgtagaagaaagagatgtttttaagaccagaatactcaaaataattgatgaaggattgaagaggttcataattgaaataacttttaagtttcctggttaattaacattcactgagtatccaaaatgaaataaacagaaggaccaaaaa

SEQ ID NO: 31022 - DNA, 1047 bp, Homo Sapiens
ggagtcaacaccaacagctctgacctgggcagccttcctgagaaaatgcagccattcctcctcctgttggcctttcttctgacccctggggctgggacagaggagatcatcgggggccatgaggccaagccccactcccgcccctacatggcctttgttcagtttctgcaagagaagagtcggaagaggtgtggcggcatcctagtgagaaaggactttgtgctgacagctgctcactgccagggaagctccataaatgtcaccttgggggcccacaatatcaaggaacaggagcggacccagcagtttatccctgtgaaaagacccatcccccatccagcctataatcctaagaacttctccaacgacatcatgctactgcagctggagagaaaggccaagtggaccacagctgtgcggcctctcaggctacctagcagcaaggcccaggtgaagccagggcagctgtgcagtgtggctggctggggttatgtctcaatgagcactttagcaaccacactgcaggaagtgttgctgacagtgcagaaggactgccagtgtgaacgtctcttccatggcaattacagcagagccactgagatttgtgtgggggatccaaagaagacacagaccggtttcaagggggactccggggggcccctcgtgtgtaaggacgtagcccaaggtattctctcctatggaaacaaaaaagggacacctccaggagtctacatcaaggtctcacacttcctgccctggataaagagaacaatgaagcgcctctaacagcaggcatgagactaaccttcctctgggcctgaccatctctgggacagaggcaagaatccccaaggggtgggcagtcagggttgcaggactgtaataaatggatctctggtgtagaaaaaaaaaaaaaaaaaaaaaaaaaaaaaaaaaaaaaaaaaaaaaaaaaaaaaaaaaaaaaaaaaaaaaaaaaaaaaaaaaaaaaaaaaaaaaaaaaaaaaaaaaaaaaaaaaaaaaaaaaaaaaaaaaaaaaaaaaaaaaaaa

SEQ ID NO: 31023 - DNA, 3914 bp, Homo Sapiens
gggggctgagggtggagagaggaagggaaggaagaaaaggggagccttcctggccagggtaaccggcactaagaggcctcactccaagcccccgaggagcctgtggtggggctggagacccggctcaggcccctccaccacccttaaagtcctcagaaggtgggaactgaactggcacaggctgggaaccggctgtgcgctggccacttgattttgccagctgccctgtaattcagctggtgaggaaactgaggcacagactgaggtagaatgattcgccagtcactcagcaagtcagcagacggggaggactgaatcccagcctgagagcaccgaagcttgtatccctgcaataccgagccccaagcctgcgagccccggtgcccatctctgagttgggccgtcttggaagggttcccttcctcctacaagatggtgtgtgaggagccttcaatacgacccggggtgtaaagtgtccaactctagtaggggcctgatggcatccccgccgagtcccaggagagagagagaagaccccttcctggagtccagggctcccgggaagaaacactggcatttgtccctttgcttcggcttctggaggcagagactctgagcccagggagagccttctgcagccccatttcctcaaaaatccaacctgcccaggtggcgggtcatgagctgtgctcaggaagctggaatctgaccctggtggcgtcgggcccagtctccatggcagccgagcatttattacccgggcctccacccagcttggcagactttagacttgaggctggaggaaagggaactgaacgcggttctgggagcagcaagcccacgggtagcagccgaggccccagaatgtggatgatctcttcagggaagcagatatcgaacccaatggcaaagtgaagtatgatgaatttatccacaagatcacccttcctggacgggactattgaaggaggagaatgggagagcctcccctgggcctgaaaacttggagcaattaattttttttaaaaagtgttcttttcacttgggagagatggcaaacacagtggcaagacaacattacccaactatagaagagaggctaactagcaacaataatagatgatttcagccatggtatgagtagatctttaataaaagatttgtattgattttattaactaccgtgagtccggccctttcaagcatggaaggagcctgcgatttggagtctggcctgggttccagtcctggctctgctgcttcccactgtgactttgggcaaatcatttcactcctcaaagcccccccacacaagctggattcccacttcttacctcatggagcctgttgaggaaggattgagctgatgacttaagggcaatctaccaagagacttattctgtatttgggggctagaaccatcttccatatttccaagattttccaagatgaagccagtgctagctgagaagcagcaatgaacagaaagctgtaacacttatgacaacaattcttgcagtgccagaggcccatttacaaattctcatttccatctcaacagatatagtgacatagctcaggctattcattcataaacacagagtgtagagtgaaaacactagagtgaaaacacatgctacaatgaggcagcatcagctgagagcaggaagagcgatctactttacaccccacaccaaaggaaaccagatgtgagctgctaaattgactggccttgcagagctcaagaagggggcttccaatgctgtgagaattccgagctgttccctgggctctgttaacaggcagagaggttccgggatggtctgctcaagtggcccacactggtcattgccttaagccacctccccaggacttacggagagaaataaggggatgtaaccagcaatggccagggtacaacagccctggaaaacagtagtaggagcactaggctttctgggagtccatccagctggagtggctttgagtgagttacacagctagaaggtgccaggttggtgctgccagagattcagaggtgccatacacttgtcaaatctggatcattcgtagtgccagcacagtcctaaaagggctggagtaccacaccaacacaggtaggggtgcagggcttcaagtacaaagatttgcatccatgtatgtatcaaaagtgggttctctgggctgtggctttgtctagtagtaccacagtggctaaagtagaagaaaaccaaatcaaatgggatgtgtcttttgggaggatgtacaagacacaaatctttcactaggcaccgggcacagggaaaactgcagggaacaagagttgtagtgttagtgcaactgtctcaacgatgctgtgtggcttcagacccaaacaaggccctgaggaaggagactctcatttccccaagcataactgcaaggagaggaggaattcctaggagccaaagagttttgtggggtgagggtaaataaatggcccaaatgccaactaggtgaagttgtgaccatctggctgggaagcccaggtccacacagtgtaggagcagatgttttgtggggtctgaggtttacgagatttggctgccttaagaatacaaaaacagaaatgcagaatttctggggctgctcctaggaccagaacaagtgaagggtcctggtgcttaaacttcattaccttcatggtaaatccaccagagggccggttagatgctggccccgccgagagaactgctgtcactttcaggcaaagctcaaaggtcctaggcccacagttcttttgagctccagtcatggacattaggaagtaaatcctgcacagccaacctggaataccaaagattagatgagagatagataccaatgatttagatggcacaggaagagcaagttctggatataataaatgagggtactttccgtcaaagcttttctatgtctatatttatcactgaatagtcccagtatggttttaaagcaagttttatgaatctcatttgcctaacaggaatctgaaatataacttgccaaaaacacacagttggtgtggaatggtcattagaacctggggctcctcttcacggactccctgctcattaagggattcagtggtccagagtctaagatcctattaagtgtttgattcaaacctctacccgaggaagggctgttaccttactcctggtcctggtttcaagctcattcctgaaattccagctggtttctctagcacctagtgttgtttacaagaaggccacggtgctcttagcattcaaactgcagatactaaacagatgctgtgatttattaaagagttagccatatttcaacaagaaagggaaatgatggctatattcattacttacctcaaagcatgctgcaagaaaattagttagttacttgtcatgctttgaaatctctggatgaaaggtgctttggaagcacaaaccattatcacttgtctcatagggattgtccccttgaacatccagcagtgttattttacagaagacaaattaactgaaggcttttcttttattacatctaaagagctctacataaacaggtaacattcaataggtaaacaatttttttccaatgcatgtaataaatattttcacttggtacttttatacaaactgacattgtctactatacatttttaaaagccattttactggtttggcatgcggtatggaaattctaagagagaaagttttaaggcaatgaatcacagatttaagttcatggaatttatggtaactttatctgtttatgtacattttcccctttgttaaacaattaacagcagcacactctgggaccaccagctattttccctctctttctgaaatctaagctttgtatttaattaaaaaacagaattcaacattaaaaaaaaaaaaaaaaaaaca

SEQ ID NO: 31024 - DNA, 1139 bp, Homo Sapiens
actaggagcctcctaatgcagtcttctgcacagtcctggggactgactgactgaatcacacctctggggctgggggctgctgacatgtgtgcctttccttggctgcttcttctcctgctgctccaggagggcagccaaaggagactctggagatggtgtggatccgaggaagtggttgcggtccttcaggagtccatcagcctccccctggaaataccaccagatgaagaggttgagaacatcatctggtcctctcacaaaagtcttgccactgtggtgccagggaaagagggacatccagctaccatcatggtgaccaatccacactaccagggccaagtgagcttcctggaccccagctattccctgcatatcagcaatctgagctgggaggattcagggctttaccaagctcaagtcaacctgagaacatcccagatctctaccatgcagcagtacaatctatgtgtctaccgatggctgtcagagccccagatcactgtgaactttgagagttctggggaaggtgcctgcagtatgtccctggtgtgctctgtggagaaggcaggcatggatatgacctacagctggctctcccggggggatagcacttatacattccatgaaggccctgtcctcagcacatcctggaggccgggggacagtgccctctcctacacctgcagagccaacaaccccatcagcaacgtcagttcttgccccatccctgatgggcccttctatgcagatcctaactatgcttctgagaagccttcaacagccttctgcctcctggccaagggattgctcatcttcttgctcttggtaattctggccatgggactctgggtcatccgagtccagaaaagacacaaaatgccaaggatgaagaaactcatgagaaacagaatgaaattgaggaaggaggcaaagcctggctccagccctgcctgactgctccttgggaaccccagtcctgagcttggtttcttcccagcacccagagaatccttcctcagctctcttctttccaggggaaggaggtgctcaggggtgggtatccagagagccatacttctgagggaagactggctggcaataaagtcaaattaagtgaccaccaaaaaaaaaaaaaaaaa

SEQ ID NO: 31025 - DNA, 4333 bp, Homo Sapiens
ggcttcctccagttccggagtccagtggctgaccgccttgctggagcggagatgcagccgccgccccgaaaagtgaagccggcccaggaggtgaagcttcgcttcctggaacagctgagcatccttcagacctggcagcagagggaggcggatctgctggaggacatcagatcctacagcaagcagagggcagccattgaacgggagtatgggcaggcactccagaaactggctggcccattcctgaagagggaagggcaccggagcggtgagatggacagcaggggcaggacagtgttcggtgcctggcgctgcctgctggatgccaccgtggctgggggccaaacccgactccaggcgtctgaccgataccgtgacctagcagggggtacagggcggagcgccaaggagcaggtgcttaggaagggaacagagaacctccagagggcgcaggctgaggtgctgcagtctgtccgggagctgagccgaagtcggaagctgtatgggcagcgggaacgtgtgtgggccttggcacaggagaaggcggctgatgtccaggccaggctaaaccgaagtgaccatgggatcttccactctcggaccagtctccagaaactgagcaccaagctgtccgcccagtcagcccagtactcccagcagctgcaagcagcccgcaatgagtacctgcttaacttggtggctaccaatgcccacctcgaccattactaccaggaggaactgccagctctgctcaaggccctggtcagtgagctgtcagagcacttgagggaccccctgacctccctgagccacactgagctggaagccgcagaggtcatcctggagcatgcccaccgcggggagcagacaacctcccaggtaagctgggagcaagacctgaagctgtttcttcaggagcctggtgtattttcccccaccccacctcagcagtttcagccagcagggactgatcaggtgtgtgtcctggagtggggagcagaaggcgtggctggcaagagtggcctggagaaagaggttcagcgcttgaccagccgagctgcccgtgactacaagatccagaaccatgggcatcgggtactgcaacgactggagcagaggcggcagcaggcttcagagcgggaggctccaagcatagaacagaggttacaggaagtgcgagagagcatccgccgggcacaggtgagccaggtgaagggggctgcccggctggccctgctgcagggggctggcttagatgtggagcgctggctgaagccagccatgacccaggcccaggatgaggtggagcaggagcggcggctcagtgaggctcggctgtcccagagggacctctctccaaccgctgaggatgctgagctttctgactttgaggaatgtgaggagacgggagagctctttgaggagcctgccccccaagccctggccacgagggccctcccctgccctgcacacgtggtatttcgctatcaggcagggcgtgaggatgagctgacaatcacggagggtgagtggctggaggtcatagaggagggagatgctgacgaatgggtcaaggctcggaaccagcacggcgaggtaggctttgtccctgagcgatatctcaacttcccggacctctccctcccagagagcagccaagacagtgacaatccctgcggggcagagcccacagcattcctggcacaggccctgtacagctacaccggacagagtgcagaggagctgagcttccctgagggggcactcatccgtctgctgccccgggcccaagatggagtagatgacggcttctggaggggagaatttgggggccgtgttggggtcttcccctccctgctggtggaagagctgcttggccccccagggccacctgaactctctgaccctgaacagatgctgccgtccccttctcctcccagcttctccccacctgcacctacctctgtgttggatgggccccctgcacctgtcctgcctggggacaaagccctggacttccctgggttcctggacatgatggcacctcgactcaggccgatgcgtccaccacctcccccgccggctaaagccccggatcctggccacccagatcccctcacctgaaggccagggaagccttgacccccagtgatgctgctgtccctatcttcaagctgtcagaccacaccatcaatgatccagagcaacacagccaaaagctggaatcgcccttatttccaccctcacctccaagggtggaaacttgccccttcccatttctagagctggaacccactcctttttttcccattgttctatcatctctaggaccggaactaccttctcttctgtcatgaccctatctagggtggtgaaatgcctgaaatctctggggctggaaaccatccatcaaggtctctagtagttctggcccacctctttccccaccctggctccatgacccaccccactctggatgccagggtcactggggttgggctggggagaggaacaggccttgggaatcaggagctggagccaggatgcgaagcagctgtaatggtctgagcggatttattgacaatgaataaagggcacgaaggccaggccagggcctgggcctcttgtgctaagagggcagggggcctacggtgctattgctttaggggcccaccacgggcaggggcctgctcccagctgccacgctctatcatatggagcgaggtgttggggaaggcggggcaggcagcctgttgcaggcaggggaaggagaagagactgaggggctgtgacctctcctgaggcccccagcctgagactgtgcaactccaggtggaagtagagctggtccctcagctggggggcagtgctgtccagtggaggggagggctttcacgcccacccaccccctggccctgccagctggtagtccatcagcacaatgaaggagacttggagaagaggaagaataacactgttgcttcctgttcaagctgtgtccagcttttcccctggggctccaggaccttccctacctccaccaccaaaccaagggatttatagcaaaggctaagcctgcagtttactcggggggttcagggagccgaaaggcttaaatagtttaagtaggtgatgggaagatgagattacctcatttagggctcaggcagactcacctcacatactccctgctccctgtggtagagacacctgagagaaaggggaggggtcaacaatgagagaccaggagtaggtcctatcagtgccccccagagtagagagcaataagagcccagcccagtgcagtcccggctgtgttttcctacctggtgatcagaagtgtctggtttgcttggctgcccatttgcctcttgagtgggcagccctgggcttgggcccctccctccggccctcagtgttggctctgcagaagctctggggttcccttcaagtgcacgaggggttaggctgctgtccctgagtcctccattctgtactggggggctggctaggacctggggctgtggcctctcagggggcagcctctccatggcaggcatccctgccttgggctgccctcccccagacccctgaccaccccctgggtcctgtcccccaccagagccccagctcctgtctgtgggggagccatcacggtgttcgtgcagtccatagcgcttctcaatgtgtgtcacccggaacctgggaggggagggaacactggggtttaggaccacaactcagaggctgcttggccctcccctctgaccagggacatcctgagtttggtggctacttccctctggcctaaggtaggggaggccttctcagattgtggggcacattgtgtagcctgacttctgccggagctcccagtccaggaggaaagagccaaggcccacttttgggatcaggtgcctgatcactgggccccctacctcagccccgctttccctggagcacctgccccacctgcccacagagaacacagtggtctcccctgtccgggggcggctttttccttccttggagcgtccctgacggacaagtggaggcctcttgctgcggctgcaatggaggcaaggtgctgcagagcccaggtgcactgtgtgatgatgggagggggctccgtcctgcaggctggaggtggcatccacactggacagcagggaggaggggagtgagggtaacatttccatttcccttcatgttttgtttcttacgttctttcagcatgctccttaaaaccccagaagccccaatttccccaagccccattttttcttgtctttatctaataaactcaatattaagatgttaaaaaaaaaaaaaa

SEQ ID NO: 31026 - DNA, 5118 bp, Homo Sapiens
ttctaatgatcccatcaccaaagtagcaaacgtagtacccaggattttttttttcctagttagtcttcatgttaagtacaatcttacctcaaaattgttaatgtctgtggtttaaaaaaaaacatgaatcagaaatggtgtgggtagtttagaaaatgagttaggttcaggtggccggttagctcagttggtcagaaaatgagttaggttcatctgggaagacttcctgggagaaaagaccctgggttctgaggtaaagtggagtagggataagatgtgcaaggcaggaagggagttgattccttaggtaagtgaattattggaggtgaggggtatgtctggctcctgagtcagccacgatgtgcctccttgtcttcccccttgtccccaggagtccagattacatcctaccctgcagtcctggatggcgcctccgacttgcagcttccttcctgctttccgtcttcccgctgctagaccttcttccagttgctttgccaccaggggcaggcccaggacccatagggctagaggtgttggcagggtgcgtggcagctgtggcctggatcagccacagcctggccctgtgggtgttggcacattcccctcatggccactcccggggtcccttggccttggccctggtagccttgctgccagctccagccctagtgctgaccgtgttgtggcattgccagcgaggcacacttctgcccccacttctcccagggcccatggcccgcctatgcttgctcatcctgcagctggctgcactcttggcctatgcactgggatgggcagctcctgggggaccacgagaaccctgggctcaggagcccctcctgcccgaggatcaagaacctgaggtggctgaagatggggagagttggctgtcacgcttttcctatgcctggctggcacccttgctggcccgtggggcctgtggagagctccggcagcctcaggacatttgccgcctcccccacagactgcagccaacctacctggctcgtgtcttccaggcacactggcaggagggggcacggctgtggagggccttgtatggggcctttggacggtgctatctggcacttggactgctgaagctggtggggaccatgttgggattctcagggcccctgttgctctccctactggtgggcttcctggaagaggggcaggagccactaagccacggcctgctctatgctctggggctagccggtggggctgtgctgggtgctgtgctgcagaatcagtatgggtatgaggtatataaggtaacacttcaggcacggggggctgtgctgaacatcctgtactgcaaggctttacagctggggcccagccgccctcctactggggaggccctgaacctactaggcactgactctgaacggctgcttaactttgctgggagcttccatgaagcctggggcctgcccctgcaactggccatcaccctctacctgctgtaccagcaggtaggcgtggccttcgtgggtggtctcatcttggcactgctgctggtacccgtcaacaaagtgattgccacccgcatcatggccagcaaccaggaaatgctacagcacaaggatgcgcgggttaagcttgtgacagagctgctgagtggcattcgggtcatcaagttctgcgggtgggagcaggcactgggagcccgagtagaggcctgccgggctcgagagctggggcgactccgggtcatcaaatacctggatgcggcctgtgtatacctgtgggctgccctaccggttgtcatctccatcgttatcttcatcacctatgtcctcatggggcaccagctcactgccaccaaggtgttcacggccctggcactggtgcgaatgctcattcttcctctcaacaacttcccttgggtgatcaatggtctcctggaggccaaagtgtccttggaccggatccagcttttcctcgaccttccaaaccacaacccccaggcctactacagcccagattgtggtagattaggagcccaaatcaagtggcttctctgttcagatccccctgcagagccatctacagtattggagctgcatggagccttgttctcctgggacccagttggaaccagcctggagaccttcatcagtcatctcgaagtgaaaaagggtatgctggtgggcatcgtggggaaggtcggctgtgggaagagctccctgctggctgccatcgctggagagctccacaggctgcgtgggcatgtggcagtgcgggggctgtccaagggctttggcctggccacccaggaaccctggatccagtttgccaccatccgagacaacatcctctttgggaagacatttgatgcacagctgtacaaggaggtgctagaagcctgcgccctcaatgatgacctcagtatcctgcctgctggagaccagacagaggtgggggagaagggtgtcacccttagcggaggacagcgtgcccggattgcccttgctcgtgctgtctaccaggaaaaggagctctatctcctcgatgaccctctggccgctgtggatgcagatgtggccaaccacctgctgcacaggtgcatcctgggcatgctgagctacaccacacggctgctctgcacccaccgcactgagtacctggagagggctgacgcggtgctgctgatggaggccgggcgcctcatccgggctggacctccctctgagattctgccactggtacaagctgtccccaaagcctgggctgagaatggacaagagtctgactcagccacagcccagtcagtacagaacccagagaaaacaaaggaggggctggaggaggagcagagcacatctggtcgcctgctgcaggaagaaagcaagaaggagggcgccgtggccttgcacgtgtaccaagcttactggaaggccgtgggccagggcttggccttagccatcctcttctctctgcttctcatgcaagccacgcggaacgctgctgactggtggctctcccactggatctctcagctgaaggctgagaatagctcccaggaggcgcaaccctccaccagcccagcttctatggggctcttctctccgcagctgctcctcttttcccctggaaacctctacatcccagtgttcccactgcccaaagctgcccccaatggctcctcagacatccgtttctacctcaccgtgtatgcgaccattgctggtgtaaattccctctgcacccttctccgggcagtgctctttgcagcaggcacccttcaagcagctgccactctgcatcgccgcctgctgcatcgagtccttatggcaccagtgactttcttcaatgccacacccacgggccggatcctaaaccgcttctcctctgatgtggcctgtgcggatgacagcctgcccttcatcctcaacatcctcctggccaacgcggcaggcctgctggggctcctggccgtgctgggctctggcctgccctggctgctgctcctgctgccgcctttgagcatcatgtactatcacgtgcagcgccactacagggcctcctcacgggagctgcggcgcctgggcagcctcaccctgtctccactgtatagccatctggccgataccttggctggcctctctgtgctccgggccacaggggccacctacaggtttgaggaggagaacctgcgactccttgagctaaaccagaggtgccagtttgccaccagtgccacaatgcagtggctggacattcggctacagctcatgggggcggcagtggtcagcgctatcgcaggcatcgctctggtgcagcaccagcagggcctcgctaacccagggctggtgggcttgtcgctgtcttatgccctgtccctgacgggcctgctctcgggcctggtgagcagcttcacacagacagaggccatgctggtgagcgtcgagcggctggaagagtacacctgtgacctgccccaggaaccccagggccagccactgcagctgggcaccggctggctgacccaggggggcgtggagttccaggacgtggtgttggcgtaccggccagggctgccgaatgccctggatggagtgaccttctgcgtgcagcctggagagaagttgggcatcgtgggccgcacaggctccggcaagtcttccctgttgttggtgctcttccggctgctagagcccagttcagggcgagtgctgctggacggcgtggacaccagccagctggagctggcccagctcagatcccagttggctatcatcccccaggagccctttttgttcagtgggactgttcgggaaaacctggacccccagggcctacataaggacagggccttgtggcaggccctgaagcagtgccacctgagtgaggtgattacatccatgggtggtctggatggtgagctgggtgaggggggccggagcttatctcttgggcagaggcagctgttgtgtttggccagggctctcctcacagatgccaagatcctgtgtatcgatgaggccacagcaagtgtggaccagaagacagaccagctgctccagcagaccatctgcaaacgctttgccaacaagacagtgctgaccattgcccataggctcaacacgatcctgaactcagaccgggtgctggtgctacaagcggggagagtggtagagctggactccccggccaccctgcgcaaccagccccactccctgttccagcagctgctgcagagcagccagcagggagtccctgcctcactcggaggtccctgagcccaatcccacaccctgcagagttctcccctctctctgatccaggccgggcctatacagaggtgctggctgcttgtttacattctcctctggggctctacctctccacacttccccagaagggaaaagggcaccctggattactctttggaaatcactccttggtgggcagcatcctgaggcttccccagaaccaggcctctgctctggccctcttgcatctggaacgccaggtgggtttttctggcataggagcccacttgcattttcatagttttatttgataaaattccatcttacattctgtgtattaaaaaaataatatttctggtgtaaaaaaaaaaaaaaaaaaaaaaaaaaaaaa

SEQ ID NO: 31027 - DNA, 3815 bp, Homo Sapiens
aaaacatctatcttgctgtgtttggacaggccagcccctgaaacatcttgggcaatggagggttaacttctcaaagtttaataggcaagaccagcaaccatgcaacaaggacttcaactaaccaactaaagaactgttccccagagcattgttcctgagaaggaaaagagtccaaacacctacccacacctgctttgtgccaagaatccacagttggattgcaaggacagtgcgttcaagacccagctgttgagagtagaaaagcagaagaaaggacccgaggtcagcaagtgccctccccacaatggggcagatctgccagcgagaatcggctacagcagctgaaaaaccaaaacttcatctacttgctgaaagtgagattgacaagtatctctatgccatgcggctctccgatgaaactctcatagatatcatgactcgcttcaggaaggagatgaagaatggcctctcccgggattttaatccaacagccacagtcaagatgttgccaacattcgtaaggtccattcctgatggctctgaaaagggagatttcattgccctggatcttggtgggtcttcctttcgaattctgcgggtgcaagtgaatcatgagaaaaaccagaatgttcacatggagtccgaggtttatgacaccccagagaacatcgtgcacggcagtggaagccagctttttgatcatgttgctgagtgcctgggagatttcatggagaaaaggaagatcaaggacaagaagttacctgtgggattcacgttttcttttccttgccaacaatccaaaatagatgaggccatcctgatcacctggacaaagcgatttaaagcgagcggagtggaaggagcagatgtggtcaaactgcttaacaaagccatcaaaaagcgaggggactatgatgccaacatcgtagctgtggtgaatgacacagtgggcaccatgatgacctgtggctatgacgaccagcactgtgaagtcggcctgatcatcggcactggcaccaatgcttgctacatggaggaactgaggcacattgatctggtggaaggagacgaggggaggatgtgtatcaatacagaatggggagcctttggagacgatggatcattagaagacatccggacagagtttgacagggagatagaccggggatccctcaaccctggaaaacagctgtttgagaagatggtcagtggcatgtacttgggagagctggttcgactgatcctagtcaagatggccaaggagggcctcttatttgaagggcggatcaccccggagctgctcacccgagggaagtttaacaccagtgatgtgtcagccatcgaaaagaataaggaaggcctccacaatgccaaagaaatcctgacccgcctgggagtggagccgtccgatgatgactgtgtctcagtccagcacgtttgcaccattgtctcatttcgctcagccaacttggtggctgccacactgggcgccatcttgaaccgcctgcgtgataacaagggcacacccaggctgcggaccacggttggtgtcgacggatctctttacaagacgcacccacagtattcccggcgtttccacaagactctaaggcgcttggtgccagactccgatgtgcgcttcctcctctcggagagtggcagcggcaagggggctgccatggtgacggcggtggcctaccgcttggccgagcagcaccggcagatagaggagaccctggctcatttccacctcaccaaagacatgctgctggaggtgaagaagaggatgcgggccgagatggagctggggctgaggaagcagacgcacaacaatgccgtggttaagatgctgccctccttcgtccggagaactcccgacgggaccgagaatggtgacttcttggccctggatcttggaggaaccaatttccgtgtgctgctggtgaaaatccgtagtgggaaaaagagaacggtggaaatgcacaacaagatctacgccattcctattgaaatcatgcagggcactggggaagagctgtttgatcacattgtctcctgcatctctgacttcttggactacatggggatcaaaggccccaggatgcctctgggcttcacgttctcatttccctgccagcagacgagtctggacgcgggaatcttgatcacgtggacaaagggttttaaggcaacagactgcgtgggccacgatgtagtcaccttactaagggatgcgataaaaaggagagaggaatttgacctggacgtggtggctgtggtcaacgacacagtgggcaccatgatgacctgtgcttatgaggagcccacctgtgaggttggactcattgttgggaccggcagcaatgcctgctacatggaggagatgaagaacgtggagatggtggagggggaccaggggcagatgtgcatcaacatggagtggggggcctttggggacaacgggtgtctggatgatatcaggacacactacgacagactggtggacgaatattccctaaatgctgggaaacaaaggtatgagaagatgatcagtggtatgtacctgggtgaaatcgtccgcaacatcttaatcgacttcaccaagaagggattcctcttccgagggcagatctctgagacgctgaagacccggggcatctttgagaccaagtttctctctcagatcgagagtgaccgattagcactgctccaggtccgggctatcctccagcagctaggtctgaatagcacctgcgatgacagtatcctcgtcaagacagtgtgcggggtggtgtccaggagggccgcacagctgtgtggcgcaggcatggctgcggttgtggataagatccgcgagaacagaggactggaccgtctgaatgtgactgtgggagtggacgggacactctacaagcttcatccacacttctccagaatcatgcaccagacggtgaaggaactgtcaccaaaatgtaacgtgtccttcctcctgtctgaggatggcagcggcaagggggccgccctcatcacggccgtgggcgtgcggttacgcacagaggcaagcagctaagagtccgggatccccagcctactgcctctccagcacttctctcttcaagcggcgaccccctaccctcccagcgagttgcgctgggagacgctggcgccagggcctgccggcgcggggaggaaagcaaaatccaactaatggtatatattgtagggtacagaatagagcgtgtgctgttgataatatctctcacccggatccctcctcacttgccctgccactttgcatggtttgattttgacctggtcccccacgtgtgaagtgtagtggcatccatttctaatgtatgcattcatccaacagagttatttattggctggagatggaaaatcacaccacctgacaggccttctgggcctccaaagcccatccttggggttccccctccctgtgtgaaatgtattatcaccagcagacactgccgggcctccctcccgggggcactgcctgaaggcgagtgtgggcatagcattagctgcttcctcccctcctggcacccactgtggcctggcatcgcatcgtggtgtgtcaatgccacaaaatcgtgtgtccgtggaaccagtcctagccgcgtgtgacagtcttgcattctgtttgtctcgtggggggaggtggacagtcctgcggaaatgtgtcttgtcttccatttggataaaaggaaccaaccaacaaacaatgccatcactggaatttcccaccgctttgtgagccgtgtcgtatgacctagtaaactttgtaccaattc

SEQ ID NO: 31028 - DNA, 4545 bp, Homo Sapiens
attttcccaggtaccctgcatgcatatagctgctgattctactcctgctattgctcacaaccctcagagtcaaactttgtgaccggcctaggagagatggagccatctcagtgtgtggaggagctggaggatgatgtgttccaaccagaggatggggagccggtgacccaacccgggagcttgctctctgctgacctgtttgcccagagcctactggactgccccctcagccgacttcagctcttccctctcacccactgctgtggccctggccttcgacccaccagccaggaagacaaagctacccagactctcagcccagcctcccccagccaaggtgtcatgctgccttgtggggtgactgaggaaccccagcgactcttttatggcaatgctggctatcggcttcctctccctgccagtttcccagcagtcttgcccattggggagcagccccccgaagggcagtggcaacatcaagcagaggtacagattgcccgaaagcttcagtgcattgcagaccagttccaccggcttcatgtgcagcaacaccagcagaaccaaaatcgtgtgtggtggcagatcctcctcttcctgcacaaccttgctttgaatggagaagagaacaggaacggggcaggccctaggtgagggtgggctgccctcttcacatggggcaccaggaacaccgtctggaacaggaaggacatcgggcaggactgacactgtgtcttgtgaaattgtttttttgttgttattttgtgttttaattttttttaatttctctctgagtgtacatacaacatactcaagcgggaccttctttctctgtcaggcccttgacctggaatgggggcctttgtcaaacactgttgaaggagaggctgatgtgtctgtgatggtgagaattcccaagggctctgacaagtagattcttcgactgaggaatctaccagttgtcgaagatgatccgttagtgatgttctctgggaagtggactgtggtttttccagaggaactcagttaagaaatcgagagtggattagactcccagttccaccaaacctatgagccttccactgtggatgggggccgtgatcctgatggtcacattgctttaacccagcagggcttcggccaggggctttccacttgaggatagcagcttcactaggctggccggccagctccacatctgactgggttcttacttctcagccagtacctgccccatgggctcaaggattcctggccagctcctgccacctccagcagacctcagggagggttgggtttctctaaggacccctcaaacatgtcgcaaaatgaaccaaacttctggctaggcctcaaaactgacttggtcccacttggaggccccaggattggtcctgaggtacagagccactgccaccactggcggcctgggaccagctgggtgtcagccacggatgagccgaatagccagtcagcatgttgctgctggcagcctgtgcctttgtcagctcttctttcaaaagaccccaccgacagaccgcattccacccccaacatcggcactgagggacatcgggggcaagtttgcagtggggccggaaaatatggtggccaccctaccatgagagtcagccgtaggggaccccagaccccttggtttccttggaaacaacatacctcttcccccttatccccagtcctttttcatacctagtgggatacagaagaagccaggacagtggctttgccagctaagtgacttttagagtaacagataacgattagagtggggaaccgtcaaagctgggtacacatttcctatcttcctccagcttccagctaggccagaagggcatgctctggaacccagcaggatcacagctgcctgtgcacgtcttcccttctctccctgctgcggcacttatggagaggatctaaagcagccggtgtggcagctccgatagcaggcacagggaatctgttaaccagacgctagaaactaaattataacttttgcatatgtgagaaaagacaacattggtgctaacagtgaagtaaggcccaaaggaaagacggcttccctggacaaagaagacctcagggctacccaaggaaataggaggagtctagagtagactcacaaatctgaacaagcccaagtcttccagttctgaggagaggaggtcttcagtactattgaaggagacattgatcttctggatgtacagttgtgcaggttgttcactgcacaagggcacctgcagctaatggaggctggaattcagcttgtgttctgctcactaagctgtgtgcgtgccctggtgtggggctacttctcccaagaagaaggggtgcctttcctaatttgcaaaggtgccatatgggctcacagcaccctggaggagaagggcctcaaactgtgcatgtaagcctttgttttgttctgctcagatattctggatattacctcttcttggtcagaattctattctcagggtgtgtaccatgatttgtctgctaagaagacgggttcctgctttgcagagaaggagccggggaccagcttgaagactggctctgggacacactgaccattgtgaaattcagccttccctgtgggtctccataccattttatgatgtgtatgggacatacgttgttctcccctctctggatcaaggtggtgacaggcagcctgctgccgtatgcttcagtggcacacaccaaaaaaccgggattatttacagcagccactattcaccccttttggcagactctccacctgagttcagtgagagagaaaatgatttagatcttggtgctggggcaaggccatcagcttcagagaccttgccaggcccaggctgggtgccctgtggcctgagaactgagcccagactttgacaaacccacctcaacatcaagcctggggcaggtggaaggtggtctgactgcactgtctccatcttatgcaaagccaggaactcactcactgtcttaagtgagccagggcaaaatttacacccctcacgtttccctctcccttcttccccaccaacaaaacccaggaggtagctggcagagtagctgtcaggaaggagaaaggttctttctggctggttgtttttaattggcttagtgatctaaactggccccttcctcctctgcctggtgagttggcctaaacattcctcaagtctagcctcaggagacctgcccctcccccccgacctccaccccctcagactccatcccccacccccaggagcctggctgtctctagcgaggggtggagaatcagatttagagggagggagagtctgacctggatcctgacctgtaaccagctgaagacggtggaggctttgtggcttgctgagggtgggggttgggagagggactggaaaccttcctcctcgggaaagaaatgcctgggaggaagggaagcctgatattcagggtcaaaacagcccttctaattcacaaccccaaagcaggggtttctagaagttggtcaacagatctggtgagggaagtccccaggccagacgctggactcctgcaatgagggtggaggactcagcctggcctctgcctggcctgtttcaaagtctgggccactggcagccttctcttgctcaatccgaggtggaaaaagatcacctcccagtgacctccctcagcccccaggggagtaggtctgtgtccgaagctatgtggcaggcttgtttgaaggacccagaggggcccagctgacctgtctcactgctcctggcagcccagccccatcggcaggtggcccctgcctgggggttattcgggacggttcagccagggcctcccaggaagagtgctgtggagccacggtgactgtcctggacagcaaggagcatgctaccccagtgagcacttctttttgagggacttgatggggaggtggggtaggcagaagggacgtggcagaagcgggaagactttggtcaccatggctctgcaggccttctgcaaatcagtgctggcctgggctggaaacagctctgtgtgtgaaggtgaggactcttggaagcaggccatcctggccagacaccctagcaggaaggggctcacctgtcacccttaggcagcctgagggctggtggggacttttgagtcttgaggggatagcggaaaaagctgagctcataggtgcccagccagcctcccagctaaaggtgctcagagccccactgccccctctctctgtgcaggtggccagtgcccctccctgctctgggagcattgctagccttctaccccatccctggatccacaggggctatcgaggagacccagtgagaatgtagcattttgttcatccccagggtagctgccctggggtctgggcactctgcctctgggagagaggaagaagaaaggggccccattttttaaaaatctgtacagagcctttggctttatgtgtttatgttcttcacatgcatatgtgtgtatgtgtgtatatctttccccccatcaattggtacaatttttaataaaatcatttaaagc

SEQ ID NO: 31029 - DNA, 8091 bp, Homo Sapiens
ctcctaccttctcgggcagcccagtctttgccatccttgcccagccggtgtggtgcttgtgtgtcacagccttgtagccgggagtcgctgccgagtgggcgctcagttttcgggtcgtcatggctggctacgaatacgtgagcccggagcagctggctggctttgataagtacaagtacagtgctgtggataccaatccactttctctgtatgtcatgcatccattctggaacactatagtaaaggtatttcctacttggctggcgcccaatctgataactttttctggctttctgctggtcgtattcaattttctgctaatggcatactttgatcctgacttttatgcctcagcaccaggtcacaagcacgtgcctgactgggtttggattgtagtgggcatcctcaacttcgtagcctacactctagatggtgtggacggaaagcaagctcgcagaaccaattctagcactcccttaggggagctttttgatcatggcctggatagttggtcatgtgtttactttgttgtgactgtttattccatctttggaagaggatcaactggtgtcagtgtttttgttctttatctcctgctatgggtagttttgttttctttcatcctgtcccactgggaaaagtataacacagggattcttttcctgccatggggatatgacattagccaggtgactatttcttttgtctacatagtgactgcagttgtgggagttgaggcctggtatgaacctttcctgtttaatttcttatatagagacctattcactgcaatgattattggttgtgcattatgtgtgactcttccaatgagtttattaaactttttcagaagctataaaaataacaccttgaaactcaattcagtctatgaagctatggttcccttattttctccatgcttgctgttcattttgtctacagcgtggatcctttggtcaccttcagatattttagagctacatcctagagtattctactttatggttggaacagcctttgccaacagtacatgtcagctgattgtttgccaaatgagtagtacccggtgtccaactttgaattggttgctggttcctctcttcttggttgtcttagtggtaaacctaggagtagcctcttacgttgagagcattctcctgtatacattaacaactgcttttactctggcccacatccattatggagtacgagtggtaaagcagctgagcagccattttcagatttaccccttctcattgaggaaaccaaactcagattgactaggaatggaagaaaagaatattggcctgtaataatctttctttgggcacaaagaagtactgtaaataaatgcttgtaaatatttcctccatcaccattgaactagactgatctgcttgacagacgtgggatctcagtatggtacttggacagcaggaatgatacatataatctgaacttgggaaattttggacctactaactctaagcctattttattttttataaaactatgtgacattttggttgagcagaatgtacgttagaccagcaaaatgttcctaatggttctaacttcgtgagtttacaatgttgtgattcatgcagggttaaagatgctttgtttttattttttaagtaccaaaattggtttcagaacactgataacactcagaaaaccacagtgtgttttcatatttggaactttgtaatagcgggagtagcagtagtccaaacctagtatagggaaaggataaaaataagtcaccttcaccaagagatgccaatgattaccaaacaacagacagttgccaaatactggtttctctttcccctgaaaatggcttttgttctcaaatgataagagagctaatacatttagctaatattctagctctctttattatggaacagatcttgatagatggtttaattttctcctaaagagaaataatcagttgagaatttgagaatgggttgtaattatcgctcacccattgggatggttcattgtttaaatatggcattttccccccttcagctgcaggttcctgagatttggtgcctgtgagctctgattgtaggaatgcatgtgacagtcccagtcctatggtaatgacttaggaggaatgcagataaaagtaccttgtaagataaatataaattggagttaggaatttcatgaacctcactatgaccaaaattaattttttgattcagtttgtctgtctgtctgtccttcccctctcttcttttttcagggtgaggtgctgtgtttcttatttcatacgagataaaacagagagaagttctctcttctccagcttgtccatttccccacttgaagaaaacttttgatatatatgccttactgagtacatgccccctttaatgttaatatgacttggagtaatttctgaggtttactgacaaacataaaaatccctttaattgtagtgtagttgttctataaaccatattttttcatgatgtggatattttcttctatttctttgtcttcatttaatttggtggtggtgaactttacttgctgattttcttttatttttcactgaatgaagtttgtgcttgaatgaagagtgtatcttaaaccccctttttttggacaggctgcacttggataaaataggcaccactgtgttgatatgtaattaaattcataactatttatgaatgtgaccattgttaaatttaattatagtgtatttctttcttgaatttcagtctgctgctttgtaaaaaataactgtaattgatatttcatttttaaaatttataaattccaatcattgtcattcaagttattagaaatgagtcacggcactaactcatggttctatactcattttaagaaattgtaaaggttgaggtgtatttggtgactttctctgagacacagatgaacgttggaaatagatgagaaatggatgcagaataatgcagatagtgatcccatgtttgttaattgccatcatggaagtcagagaattaaccaattaagtgacggtaactattttttgtataccttgttctttgtgatctataaaattaaactggataaaatgttaattgggggtagggaaaaagctttgttttaagatttctaagctaattattttaccgttttgttgaccttgtacacaagaatgagattaatctgtattatataagaaaagaactgataaatatttataaaatgacaaacttggaccacaggctttcttgaccttgtacagtatagtaaaaataccctttacttctgacattaaggtcacgtcctatagtttgggggcccttttacttcaaaggtgtgtttctgccctcttttggttgtatcaaatttatttgaaaattgttttgtgctgtactttatgacttgtttccctatggtggtaaagaatgatgccatagtcagttttattgacattgttagatgaaagaaaagtagctgtcaacaaggggaaagtgaaattgagcaattcactgtttcaggatacttgaggatctttagtgtactgctgactctttttcttgttttgtctgccattcttgaaagtgcatcttgagagcccccatttgttgtgtagagatatagcagctgaagcaggacttcattccagatagctgtgtgcatttatgtcatgccaattactataacatttccaaagtatgaaaggtctttcaggcttatgcatgatattgtgggtgacttcatgccccagcctttctccccagcatacagtgagctgccttttggggagcaatgccatgataaggagcatacgtgcatgttttccgtactttcagaatagagtgccttagctaggccagaggctcgtattgtgtttctgctgaccaaagttgcatacacctgtaagaagtgtctttttaggttatggtattaaaaaagtcgtttcaggcttatcagataataattctcctatatttgaggggggcatgggataaaaagatttaataatacctggatagagaatgctaatgctgccttttgtgatcctttaatattatccatgcttttataaagtgcagtacacattttgacattgccacagtttacagtgtcattcttccacgaataggtaattgatagagtttatgggtcttagtcttaagggtaacagagtgaataccttccaaataaaaagctaaatattcctccttgtcattttaatgtcattattgaaatacttttaattctaattttcaaaagaaagctaaatgctgattgtggtttaggatgttacagtactaataccatcatgttatttattctaatatagaggcattgagaggaggggagtgtatgtctagagttaccccaattctaaataggtaccaaaagagtattgattatgacctggagcctgagctttgggagaatatacaaaggaaaaagcaggcatagtttccactttaaagggaagaagggactttaacatcctatgaatttgaaacatcctatgaatttgaaagtttcctaagtgttgttttcaaagaactggtttattttatagtcagtcaaaatgcatttggaatgtaccttgcttccataacagactttgactctatgacctatgaagaataaaaagataatctgaaggtgtttgagtcagaggctacttttcccctttatattttatatagaagcctatttgtaattcttcctcttcgttcttcacctgggtttcctcttatctacccaccacctaggacagaggctgcccactcaggtcttgccttgttgcccctagatgttgccacattcacatctccttgatggccttagatctcttgactagtcaaggactgggaacgtgccagggggaacaaagtaagcttgatgggctggaacttttgactttgggtccccaaacagccaaaaacagatacagaaatctttggttgtgtggatgcctgtgttcagagtggccttatcttgacctcagttctggatttaagtactctatagaaaatttgtgaagtcagaccagaattttctttgtcccatgaggtgtctttgtaagtcagcatgctcttgcttgaacaccctgtgggtgaataactttagtaagttagctgccagcattagaaccttccaggaagaattttaactagtatgctacatttgaagcactctgacatgtacatttaaagtgacagttttaaaagtaaaatggtgttaaatctctgaaacttgaacgtatgatgctctggacattttaggaagcttaagtaaatttctgattttcctttattgattatgtaacccacgtgatttgcatattttagtttttatgtttgacagtggtacaaatgactgacattggcaggcagttattgtagggtatatggttaatcacgattgtctaacttttccagagaaagtggtgatatgcttcttccttgcatggagctgtgggaattggatttgttggctcttcatttccagtgtttctacagtgcagaataaatgtaactttttaagcctgcatgctagtaatatgctttgctctttagtaaacaaatatgcaatagatagtaatctatctactttttttaaagcagggatctgctccctatctagacagatcttttaatgcattaatatttagagtagcaaaagaagttttgccatttgtagctctctcacaggtagcttaagcgagggggttgtgttgcatgtgcttagaaaggccaggatcccagaattggaaggtgccacatatacttttagaatattttaacaaaggcttgtctctaggaaaatccacttggactgcagcaggattgttctggtcttccacagaccattcacatggtctttctctccagagaatcattcttagaaagccaggctaaatcagagtagtgctgtttttaaagcaagtatattggatgatggctatagggtaccttaatgctgtgttgaaattggaagcagactgctcttcagcagcacatatactgcaactgaagttagagacagtactgaagacgagggagtagctaaatgctgtggatatttcatgtctgtttggctaatgtcttctcttgaggagtttctatgggtagcaattaaaattagaatttattttaaggtttttattaaaatatatacaatttgccataaattctagattctgatattcttgacaagcactttttgaatatctcaagagtaagttcttgacctggaacatatatagttagtacttgatgtcactaaccaagttgtagaaggagcctgttataattctgcaagatctgtgaatagcattataaatctggggcaggtgcctgtaatcccagcactttgggaagccaaggcaggtggattgcttgagcccaggagttcgacaccaacctgagcaacatggcgaaaccccgtctgtaataaaaatacaaaaaaattagctgggcatggtggcatgtgcctgtaatcccagttactggggaggctgaggcaggagaatcacttgaacctgggagatggagattgcagtgagcagagattgtgccactgcactccagccagagtgacagagcaagactccatctcaaaaaataataataaaaataaacaaatctgtttaaattactgttgcctttcagcattagactttgagtttaataactacaaattgagactgctcacaatattaactttttttgtaggttattttgttgtttagataacttgcctccctagaggagcattcaggagataaagacctagctacatgtaatgatatgatcatttcaaaaatgtgccaagaaagcaaaattcattattgaactctaaatttctgggtgtttttttttttaaagtagcattttctctgggtaaagggaaaggcaatgaatgattgccaacatgtaaactccctgctgcccgccttcccccagtcccctccatctaacataatacagtaaatttgtagccagttgtagaaaaagaaattgatatctttctgagtaaggtttcatgccctgtgactaagaataggtggaggaatcatggccaaatcaaatatgaattgtttagcttggtcctgttgcagttggctttctgtagtgttctgaaacaagaggacgattccattccttctcaggaacctagaaacaacaccgcttgagcaactggaatatgtttgctgcaagcagaatattttggggagaggaagagtagtttaattcaagtagtttaattgaacatattagtcattggtctgtctgggacgtgcagtgttcatagtagcaatgtatgtaccatttattttatctggttgtgtgtgatgtgtgtgtatgcctatttaatatgtacacatatattcactacatatgtatgtatgatatattcatatatacatgcagtctgcttgattatcagcaaaatggtcagcctttatcagatagtttcttcatgtggagttcatctgcatgtggcccttactctgaagcctcttcctgatctggagccacagtctgtctgtcttccagttcatctcagtcctcgagaaaggccctttaaatatgtcactttcccattttcctttaaccatgggttgtgtgagccagaaagagctttgagaaagatggctgcttccaccagggtggaggcttctaggtctgcatgatgatggggcccgtttctggccagagggtggctctgggagcagttgtgctgcgggcttgctgggggagaactctaactgttgcagaaacagagcttcatggcttgcttaaattacttagctggaatattttaaagtgtcagataatgtgatgtacaaagagagtatgccgatgcatttcattgtttttgcattatctgtatcagtgtttcccattgctagcccgaataatcaagaccagactgtttcttgtcactggattctggaagccttgccctttcaactggatttatgtttgtttctgctgctgtgaaaccccaaagtaatgcagtaggttttaattgaaaattgtttaattctattattgataattatttattgtaataaaagtaaaagagtaatttttaaatcctttt

SEQ ID NO: 31030 - DNA, 4478 bp, Homo Sapiens
gacgtcggcggttgccgtggagagacccgctcggtcccgaccgagagctggcgtcaggagccgcagggtcacagcgtgtctttgaagctgcctccgccgccaccatgagcggccgaagtcggggtcgaaagtcctcccgcgccaaaaaccggggcaaaggccgcgccaaagcccgagtccgccctgctccggacgacgccccgcgcgacccggacccttcacagtaccagagtctcggggaagacacccaggcggcacaggtgcaggctggcgcggggtggggtggcctggaagccgctgcgtccgcgcagctcctccggctcggggaggaggccgcctgccggctccccctggactgtggcctcgcgctgcgggcccgagctgcgggggaccacgggcaggccgcggccaggcccggcccggggaaggccgcatctctctcggagcgcctggccgcagacactgtcttcgtgggaacagcgggaaccgtgggaaggccgaaaaatgccccccgcgttggaaaccggcgtggccctgccgggaagaaggccccagaaacctgtagcaccgcggggagggggcctcaggtcatagctggtgggaggcagaagaaaggggcggcaggggagaatacctcggtgtcagctggggaggaaaagaaggaagagagggatgcagggtcggggcccccagcgacggaaggcagcatggatacgctggagaacgtgcagctgaagctggagaacatgaacgcccaggcggacagggcctaccttcggctctccaggaagtttgggcagttgcgactgcagcacttggagcgcaggaaccacctcatccaaaatatcccgggcttctgggggcaagcatttcagaaccatccccagctagcatcctttctgaatagccaagagaaagaggtactgagctacttaaacagcttggaagtggaagagctcggccttgccagattgggctacaaaatcaagttctacttcgatcgcaacccgtatttccaaaataaggtgctcatcaaggaatatgggtgtggtccttctggccaggtggtgtctcgttctactccaatccagtggctcccagggcatgatctccagtccctaagccagggaaacccagaaaacaaccgtagtttctttgggtggttttcaaaccacagctccattgagtctgacaagattgtggagataatcaacgaagaattgtggcccaatcccttgcagttctaccttttgagtgaaggggctcgtgtagagaaaggaaaggaaaaagaaggcaggcaaggtccaggaaagcagccaatggagactactcagcctggggtgagccaatccaactgatcctgcacaagtctccctgctacctcctgctgggctgctcctggttgactacatatttggctctctgccttctcttcatgttggcctctgtgtactatagaccctttggactttagttacaagaatatggcatttatgatcatgttcttttgcctcccatagcctcttgcttttctacgttagtgtcacatgttatgtgatcgcacccggactgttcatatgttaagcacacatactttagatgtgtgctccctgttatctacattgcctggaccttgttcttggctctggcctttcctacttgtctttaacatggacactcatgagtcatcctccaggacgaccagtgcatcctcaagctctgctccttcagggccagtgacttgctgggcttcgtgttcatgctggccatgcatgtcatctatgcaagcgtttccattgccactgcagaatgaagccagtgcacatggtattagtcatcagccagaacttcctgttctgtgggtctggggtcaccagctgagatgtcacctgctttatttctggctttggcctgtggtctgtgatacccatcctgcttgatgttctgcagaatggcacttgactgctgggcatgcatgaagttaagggcaagaaacagtatgccatgtgttctgtaccatcatgtgtctcttcttgcttctgggcccttctactggtgaactttcatcaagatctgcgccatgccgtgtcactatcaagccattaagttttgtctgggttgctgtcagccccagttggcttcctggtcaacaaggacctcaagaactgcctgtggaccgaggccccctaccagtgcatgagacacacacctaccctccccagctttccaggaaccctactggctgccagactgatgggcgggctggtatgtgtggacatgtgttcactgtcattatgctgtggctccaggtgagggtgaggactgggcctatatagaatccagataccattgtcaacttcccttattcccgtctaagatgtgagcagagtgccatagtaggggttctgggaagaggtatttctgatttgtgggcctctgcttgcttgacttcaggtcacttatacttcttattttgcttgcctgccttcatccctcatttcctccctctcattcttctttcctccctccctttcctggtagcctcctttcctccccttctgccttccccttccttctttccttattcttttttattttgtttaaatagtaccacagagaaaacaactgaaaaaccacatttttctacatacagctggggaggtagctgagaacttggcactgcgcacacatactaggttgaaagagagttgaggaaaccagaaggccaagtggatctgctggcaaaccctgaacctgtctcctgcgcttgctctacagttctgaagttgaaaatccttttcatgcctagcatctgcttgagttataaaccccaaggcagccatgtcatagactagtgtttactcttgttttgactttgttttaatgcttcctaagacccaagtgcctcctgctgtttcctcctttgtggtagcctctggccatctggacctcaatccccagctttcccactttcagcagtcctttgctctctttgcttctacctcaaatagccccaggagtgggctttagtctccaatatggagcatctcaagcttctcctgggggatggggattgggatgggcagaatctgttttggatctccgggttatttccagtgggtgtaaaagcagagctgggcctttccctctcttatccctgagggtgggtaagaaggactgtatctacacctgttcttccctaccttctcttttgttagggaggcctcattctaagttcctcaagagagtccttggcttaaagctgtagcaagggtgtgctaggtgggggatttggagcaaaaccgtcgagtaggcatgatactggtatggagtgggcctgcaaaatcagacagaaatggcttgagaagccgcagggggagcatgcctgtctctcagtgatagagtatgggagggacctccctagcttggaaaatgagaattgaaggggttatgaacaaataggatgcctagttgaggatgttcccaaagttttgtccaatcttatcattagtagattttataagccacagagacaaaccagaaacggaataatgttactttggatgctttatttttttgttctaggtgtggctttgtacatgcagaagaatgctatatgctgcacattttgcctttaaagtcttacgactttccccattttagtctaatgggaagatacagatgtgcaagtctgcttttttgttttttgttattatttttttttttttgctctgtgttatggacattttcagacatgcacagaagtggagaggatggtccttggaccccatgtgtccatcacctagctgcatcacttatcagctatggtcaacctggtttcatctgtatctctctcttttcacctgtattgtttattgaaaatccaagacactatgccaatgcaaccgtgactactttgggagattggtagtctcttttgatggtgatagtgatggggtgcactatcataatcacatcaggtctgctttttgcttttaatgttaactaatgaagttccagagatgggccttagaaatgtgttttaagaattaacaaggagtctcaaaaagaaatgagagggatgcttcctttcccttgcatctacaaaacaagagagagactgttctgttgtaaaactctttcaaaaattctgatatggtaaggtacttgagacccttcaccagaatgtcaatctttttttctgtgtaacatggaaacttgtgtgaccattagcattgttatcagcttgtactggtctcataactctggttttggaagaataatttggaaattgttgctgtgttctgtgaaaataacctccccaaaataattagtaactggttgttctacttggtaatttgacaccctgttaataacgcaattatttctgtgttcttaaacagtataaatagttgtaagtttgcatgcatgatggaaaaataaaaacctgtatctctgttataaaaaaaaaaaaaaaa

SEQ ID NO: 31031 - DNA, 3384 bp, Homo Sapiens
ggggccacaagagcccttcctgcagggaacctcaggcttcagagagccgaaaagttgggaggcgtaaccacttacaggccggaagtgtccggggtggacgcattcgggtagccgaagaagtcccaggattgccgaagaagtcccaggatttccgaagcgagccgaagcatcgcgacagttttcagagacagctgatcggttggagctgttgcgccgagcagtcatggcggcggccagagctactacgccggccgatggcgaggagcccgccccggaggctgaggctctggccgcagcccgggagcggagcagccgcttcttgagcggcctggagctggtgaagcagggtgccgaggcgcgcgtgttccgtggccgcttccagggccgcgcggcggtgatcaagcaccgcttccccaagggctaccggcacccggcgctggaggcgcggcttggcagacggcggacggtgcaggaggcccgggcgctcctccgctgtcgccgcgctggaatatctgccccagttgtcttttttgtggactatgcttccaactgcttatatatggaagaaattgaaggctcagtgactgttcgagattatattcagtccactatggagactgaaaaaactccccagggtctctccaacttagccaagacaattgggcaggttttggctcgaatgcacgatgaagacctcattcatggtgatctcaccacctccaacatgctcctgaaaccccccctggaacagctgaacattgtgctcatagactttgggctgagtttcatttcagcacttccagaggataagggagtagacctctatgtcctggagaaggccttcctcagtacccatcccaacactgaaactgtgtttgaagcctttctgaagagctactccacctcctccaaaaaggccaggccagtgctaaaaaaattagatgaagtgcgcctgagaggaagaaagaggtccatggttgggtagaagaatgtgtatgacaaccacacacagtgaagctcttttttcaaagtaaatttgaagaaatgctacaagtatgagatgagatctaagtaaaggtgttaagatatttttaagtggtatgtgatcgtgtcattatcatctgcacttcactcaagagcttactatgtgtctaagtcatgttctaggcagaattgggtatttaaagtaaattgaggacaggcttctcccagattgtgacatgtatatctcagatacatgggtgtggcattgaaccacataatgagaacattattctctttttagtccttgtgagacaaggatgaagtctcagttgctgatactcgctgagcttactggccctctaacccagtgtttttttttgttgttgttgtgtacatgttatatttattttgaaaccagtttaatgggatacaaccagcattttaaaaaatgaaatagaatacagcatggaaaatatcagtgtattgttttatgaaactttcacgtgtatatatagaccaaggatatgtgctgagttttgatgtcaaatatatttctctttcagggtcatgatcaaaaaatgaaaagtctgcttaactccaatttctcttttaaaaaagcagacttacagctttcaggcaactgaaattcatgttaacatgtttttatttttattgctttgtatttttgtggttaccttctaagacaagtgattgatctaaagttccttttaagtttataccgctaaacaaactgagttgatttctatcacaggcagtaagtaggtagagcaaaaatggtgaagtgacttgtgaagactgaagtttgatgaagtctggtttaaggcacaggtaaactgagtgtggatgcaaaagtaccaggagctagcttttaaccttgcccagcctcagtttcttttcttagaagaagctatgtttgggtgggaagggaagagagggataagaaaatacctttcttccttgtaaactccaatcaacaaacatattttgagtgccttttgtgttccttggcaccctgttgggtattgggtacttggcaccctgttgggtattgggtacaatggtgagccagacagacacagcgcctgtccttttgtaagaatatttatttttataaaaaagtataaagtatacagtgggatgttttgatatacattatgaaatgattgctacagctgagctaattaacacccatcacctcacatagttactgtcttgtttcttaatatggacatttgcagctatgaatttccctctgcacactgttgtcatcacacactctcagttttggtattttgtgtttttgttttcattcatctcaaagtattttctaatttcccttgtgatttcttctttgaccccttgattgtttagaaatctgttaatttccacacatttgtaaatgttccaatttttcttttgttattgccagcttcattccattgtgttcagagatgatacagtcagtgcctgttcttatgaagcaaacattctataatagtaggaccagtaccctgtctgtttcattcaccacagtcagcatgccccaagtgcccagcatggggcggatggccaggaatgagtgaaaacttcccttcctgggtagttgtgactagtagagaggaaaaataatataattgcctgcttactgcatgccaggcattgggctgggaatttttatattggatctaaaataactcttaagttaggcattatccccattttatagatggagaaactggccccaaaaggtgggaacttgtccaagacgtcacaggtagcaagaggtacttttacctggctccaaatctgtgttctttccactgacaaatgagatatgggatatggtgcatctttacagtactataataagtattggcgtataacattattttcaaggaactccaagggccacaggagctgacaggtttttcaattaatattcccaacatgaatgagatgcctcattcctcagtttcctcacgtgtactataaggctagtacctgctttgttggggtatggttggctcgtgtgcattaagtcaacaaatccctagttgatagggtttggctgtgtccccatccaaatctcatcttgaattgttcccgtaatccccacgtgacatgggagggacccagtgggaggtaatttaatcctcggggcggctacctccgtgctgttctcgtgatagcgagtgagttctcacgagatctgatggttttataaggggcttttccctcttgttcggcacttcctgctgccacgtggagaagggtgtgtttgtttccccatctgccatgattataagttttctgaggcatccccagccatgctgaactgtgagttattaaacttttcctttataaattaaaaaaaaaaaa

SEQ ID NO: 31032 - DNA, 4004 bp, Homo Sapiens; identical to SEQ ID NO: 25628

SEQ ID NO: 31033 - DNA, 6146 bp, Homo Sapiens
taagagagggcggggggaaggaagaggaggcgggatccgggcgctgcgttggctgcggcctggcaccaaaggggcggccccggcggagagcggacccagtggcctcggcgattatggacccggccgaggcggtgctgcaagagaaggcactcaagtttatgtgctctatgcccaggtctctgtggctgggctgctccagcctggcggacagcatgccttcgctgcgatgcctgtataacccagggactggcgcactcacagctttccagaattcctcagagagagaagactgtaataatggcgaaccccctaggaagataataccagagaagaattcacttagacagacatacaacagctgtgccagactctgcttaaaccaagaaacagtatgtttagcaagcactgctatgaagactgagaattgtgtggccaaaacaaaacttgccaatggcacttccagtatgattgtgcccaagcaacggaaactctcagcaagctatgaaaaggaaaaggaactgtgtgtcaaatactttgagcagtggtcagagtcagatcaagtggaatttgtggaacatcttatatcccaaatgtgtcattaccaacatgggcacataaactcgtatcttaaacctatgttgcagagagatttcataactgctctgccagctcggggattggatcatattgctgagaacattctgtcatacctggatgccaaatcactatgtgctgctgaacttgtgtgcaaggaatggtaccgagtgacctctgatggcatgctgtggaagaagcttatcgagagaatggtcaggacagattctctgtggagaggcctggcagaacgaagaggatggggacagtatttattcaaaaacaaacctcctgacgggaatgctcctcccaactctttttatagagcactttatcctaaaattatacaagacattgagacaatagaatctaattggagatgtggaagacatagtttacagagaattcactgccgaagtgaaacaagcaaaggagtttactgtttacagtatgatgatcagaaaatagtaagcggccttcgagacaacacaatcaagatctgggataaaaacacattggaatgcaagcgaattctcacaggccatacaggttcagtcctctgtctccagtatgatgagagagtgatcataacaggatcatcggattccacggtcagagtgtgggatgtaaatacaggtgaaatgctaaacacgttgattcaccattgtgaagcagttctgcacttgcgtttcaataatggcatgatggtgacctgctccaaagatcgttccattgctgtatgggatatggcctccccaactgacattaccctccggagggtgctggtcggacaccgagctgctgtcaatgttgtagactttgatgacaagtacattgtttctgcatctggggatagaactataaaggtatggaacacaagtacttgtgaatttgtaaggaccttaaatggacacaaacgaggcattgcctgtttgcagtacagggacaggctggtagtgagtggctcatctgacaacactatcagattatgggacatagaatgtggtgcatgtttacgagtgttagaaggccatgaggaattggtgcgttgtattcgatttgataacaagaggatagtcagtggggcctatgatggaaaaattaaagtgtgggatcttgtggctgctttggacccccgtgctcctgcagggacactctgtctacggacccttgtggagcattccggaagagtttttcgactacagtttgatgaattccagattgtcagtagttcacatgatgacacaatcctcatctgggacttcctaaatgatccagctgcccaagctgaacccccccgttccccttctcgaacatacacctacatctccagataaataaccatacactgacctcatacttgcccaggacccattaaagttgcggtatttaacgtatctgccaataccaggatgagcaacaacagtaacaatcaaactactgcccagtttccctggactagccgaggagcagggctttgagactcctgttgggacacagttggtctgcagtcggcccaggacggtctactcagcacaactgactgcttcagtgctgctatcagaagatgtcttctatcttttgtgaatgattggaacttttaaacctcccctcctctcctcctttcacctctgcacctagttttttcccattggttccagacaaaggtgacttataaatatatttagtgttttgccagaatctctcttgctttgccattaagcagaagaactagtttccctgtatagcctgctgggagagacccacttctagggtatgggggatgcagcttcaagcccagtgcccagtgtctccctgttaactgcaggaatgccaagcacctggccagagcagcccagccccaatatgcttaggaggagacagagttccctctgtatagcctctgggacaagaaaaagaaaacacaagaatgtatacactggaagatttgggcctcctgcctgccttctctttgtttctgttcctcttcccatctactcccctacgccccttcaaccttttttctctgtctgcttcacctgagaagaaagtgtacgaagagagtgtcctcctctcacatgagccagatcagccagaaaatgcaacacttggaagagttaaatgctgttcagtgaagatttcagccccaggcctttgctgcaagtgaccctgtggcaacagtggattctcagacatgatactctcatcatatttgcaactcttctctctctttcttccccacacccaagaggaggattggtggtagggggcaggcagagggggtggggagaagtttcctgggctccatcaatggctgcatcttttctggactcagcagtctccttgattccatgtagagtgtggaaaggagttgctgattgcatttcctctcattaacaattgggtgtgtaataaaaagcattgtacttcatcttaaatcactggtaaggctcagcctacagaaagatttgaaatggccagagccaatcgcttggtgcattctgcgtaatggtttccatctccgatttcctcatcagggcctgtgaatacccaggtgcctgtatctttgccaagaccgtgatcaaggtagcttaagagagatggtcaggagaaaacactgtttttgttttttttgttgttttgttttgttttggccagttaaatatcatctctcaaatattgatctcaccgtgtcaaccttgcactgcacaaccttccttctgcttctcccacacccagtatttgcagaagggcaaagctgcttaagagagaggatcagggtgaagtttggcacacagggtttattaatggggcaaaaactgccttttcttcctcctcctgaccttattttgctcttcactctccccagccaataaagcgtctgtggcgattggtgaacagcataaacagctggacctcagcaagggtcaggcaaacccagtcactcggaaggcagctgtgtgagctgccaagctagtgggcttcaggtgcaagggtacctgtgccacaccaacctgggagcacacagaatactattaatgtgcacccagctggtctccccaggcaagaaggtatcctcttcccaaggtgtacccactgaatgttgttactacatattgagagtcattttatgcatatgcattctacctttcctgctttatgagtatttttaagcttttagttcaaggttatattcagaaaatatttcccagtataatgatacatcgtagcctaagaaatattttctcaatgtaattcccttcccagctacccaaatgctacagagaaatgttttctacttggccactatcagggttcgtcatctattgtgttgactattaatggctttttgattgggtaaggattttgctatagatgaaggtagagggctgtcagccctgaaaaacacacaggtcagacatttaaaaggcatgggtttcgagctgtctcaaaatattgcccaatagccataattttaccagcctttctgtcatatgctgctattacaaagtggaagctgttgaatgtttattggtgcccagggttttgctctccaatctaggttcagttgaaggaatattgtttctaagactgttttgagacatgtccagtacatcacaaaggagatcggggcgacccctgcagatgtggagccattagcccagttgaggatattctccaagttgtcctctctcctgctgatggaaatgggaatgaagttaagtggtctgaaaaacttgaatcgttcacatttctcagctctgggggtcatttaccagtttgttgtagaagaaataatcaggtaagttaaaagttcatttccagagaaggtaaaccccacttaccatctctgcatgatttcagtgggaattgattatcactaatccccaactgggctagaataaatgtaaagtttgacctttttaaaacgaaaagagagacaaagtctcagcacattccaaggagtggtagaaacagagctgaaggtgtccccattgtagattagtctcttctcactaaaatttactttccaacgtagggcctaaaggaaacctttcttaaagacaggctgaaaccccttcaaaggcagatgaggaggtacagacacgtgaccttttggtgcacactggagctacttggacaagaccagcatgccttgctgcacgtgtgtgtatttcactgctgagaacatcctttaacttggtgtgcaatttgaaaggatgtgaatcatggatggaaggccatttgtacatgtcccttggcaaaattctttctggtgtctcctaacttcagagacagggactctttttggatctctattgacaagtaataaaagtctggccctcataacttgtttccgaactagaaaagtctgtgagacccctacatcattctggtttttttgcttgagtaagaacaatccttttttatttttcttctgtacagtctaaagctacagagaaaaaaaaatgcactcttcccttgccggctcctggtaccattggtctgaacagctgtagttggtctactccttacttagcacttgattgtgtggggaaacaaaggtgggaggggtggggaatactggaaataatcagggcaatttttttctttcccataattggactagataccttggtactgttgaccttctcagcatctcccttttgccttagatggcaacaccctccagtctgtagcagagcagtccaacccagattagtgcagcccggaggcttagggtgcagcctccctggtcttcctccacacagttgttcaccaacagaccagacctcctttaaccacagtgtcaacatagtatcggaaagagagccatttcttaggggaataaaacagtttcgcttctttagctcatctgtggtgtcagaatccttggagctgaagagagaaatcaaaagagcatgatgatggctgcctggtttcaggtggaacttaatgcattgatctttagaagctccttctgttggaagttgagtacctgtgatctaaaatgtcctggaggcagatgacatctaaaatatgtgctttccaaccagcacagctggcgctcttagctcctgattggttgtgtgttttattaaggatcagtgcagttaagtcgtattttaaagtgttacctcccctcctaacccttccccttcttggacactgaaggaaaaggccaactagggtgttagccctctgggcaccaaggaaactaacagctttctcaaagcggtgaccactcaggccagcccagacaaatctgagggatggccagtgcactccaatgatgggacaggcctaacaacacatgtaagcttccccgagagctttcagctggttcacctctttgttctctagactcttaagtactgactgctttgacttttgtgattatgttatggtgatgtgtagtcagtgtaccaatatgttcacaacctaggatcatgataatggagtgtgttttgggttttttttaactgttcagaaaaaaagtaaattacaaatataagattaaagtgaaaaaaaaaaaaaaaaaaaaaaaaaaa

SEQ ID NO: 31034 - DNA, 6146 bp, Homo Sapiens; identical to SEQ ID NO: 31033

SEQ ID NO: 31035 - DNA, 6146 bp, Homo Sapiens; identical to SEQ ID NO: 31033

SEQ ID NO: 31036 - DNA, 3152 bp, Homo Sapiens
ggcacgaggtaataaaaagcattgtacttcatcttaaatcactggtaaggctcagcctacagaaagatttgaaatggccagagccaatcgcttggtgcattctgcgtaatggtttccatctccgatttcctcatcagggcctgtgaatacccaggtgcctgtatctttgccaagaccgtgatcaaggtagcttaagagagatggtcaggagaaaacactgtttttgttttttttgttgttttgttttgttttggccagttaaatatcatctctcaaatattgatctcaccgtgtcaaccttgcactgcacaaccttccttctgcttctcccacacccagtatttgcagaagggcaaagctgcttaagagagaggatcagggtgaagtttggcacacagggtttattaatggggcaaaaactgccttttcttcctcctcctgaccttattttgctcttcactctccccagccaataaagcgtctgtggcgattggtgaacagcataaacagctggacctcagcaagggtcaggcaaacccagtcactcggaaggcagctgtgtgagctgccaagctagtgggcttcaggtgcaagggtacctgtgccacaccaacctgggagcacacagaatactattaatgtgcacccagctggtctccccaggcaagaaggtatcctcttcccaaggtgtacccactgaatgttgttactacatattgagagtcattttatgcatatgcattctacctttcctgctttatgagtatttttaagcttttagttcaaggttatattcagaaaatatttcccagtataatgatacatcgtagcctaagaaatattttctcaatgtaattcccttcccagctacccaaatgctacagagaaatgttttctacttggccactatcagggttcgtcatctattgtgttgactattaatggctttttgattgggtaaggattttgctatagatgaaggtagagggctgtcagccctgaaaaacacacaggtcagacatttaaaaggcatgggtttcgagctgtctcaaaatattgcccaatagccataattttaccagcctttctgtcatatgctgctattacaaagtggaagctgttgaatgtttattggtgcccagggttttgctctccaatctaggttcagttgaaggaatattgtttctaagactgttttgagacatgtccagtacatcacaaaggagatcggggcgacccctgcagatgtggagccattagcccagttgaggatattctccaagttgtcctctctcctgctgatggaaatgggaatgaagttaagtggtctgaaaaacttgaatcgttcacatttctcagctctgggggtcatttaccagtttgttgtagaagaaataatcaggtaagttaaaagttcatttccagagaaggtaaaccccacttaccatctctgcatgatttcagtgggaattgattatcactaatccccaactgggctagaataaatgtaaagtttgacctttttaaaacgaaaagagagacaaagtctcagcacattccaaggagtggtagaaacagagctgaaggtgtccccattgtagattagtctcttctcactaaaatttactttccaacgtagggcctaaaggaaacctttcttaaagacaggctgaaaccccttcaaaggcagatgaggaggtacagacacgtgaccttttggtgcacactggagctacttggacaagaccagcatgccttgctgcacgtgtgtgtatttcactgctgagaacatcctttaacttggtgtgcaatttgaaaggatgtgaatcatggatggaaggccatttgtacatgtcctttggcaaaattctttctggtgtctcctaacttcagagacagggactctttttggatctctattgacaagtaataaaagtctggccctcataacttgtttccgaactagaaaagtctgtgagacccctacatcattctggtttttttgcttgagtaagaacaatccttttttatttttcttctgtacagtctaaagctacagagaaaaaaaaatgcactcttcccttgccggctcctggtaccattggtctgaacagctgtagttggtctactccttacttagcacttgattgtgtggggaaacaaaggtgggaggggtggggaatactggaaataatcagggcaatttttttctttcccataattggactagataccttggtactgttgaccttctcagcatctcccttttgccttagatggcaacaccctccagtctgtagcagagcagtccaacccagattagtgcagcccggaggcttagggtgcagcctccctggtcttcctccacacagttgttcaccaacagaccagacctcctttaaccacagtgtcaacatagtatcggaaagagagccatttcttaggggaataaaacagtttcgcttctttagctcatctgtggtgtcagaatccttggagctgaagagagaaatcaaaagagcatgatgatggctgcctggtttcaggtggaacttaatgcattgatctttagaagctccttctgttggaagttgagtacctgtgatctaaaatgtcctggaggcagatgacatctaaaatatgtgctttccaaccagcacagctggcgctcttagctcctgattggttgtgtgttttattaaggatcagtgcagttaagtcgtattttaaagtgttacctcccctcctaacccttccccttcttggacactgaaggaaaaggccaactagggtgttagccctctgggcaccaaggaaactaacagctttctcaaagcggtgaccactcaggccagcccagacaaatctgagggatggccagtgcactccaatgatgggacaggcctaacaacacatgtaagcttccccgagagctttcagctggttcacctctttgttctctagactcttaagtactgactgctttgacttttgtgattatgttatggtgatgtgtagtcagtgtaccaatatgttcacaacctaggatcatgataatggagtgtgttttgggttttttttaactgttcagaaaaaaagtaaattacaaatataagattaaagtgaaaaaaaaaaaaaaaaaaaaaaaaaaa

SEQ ID NO: 31037 - DNA, 4536 bp, Homo Sapiens
gtagtcgtggcgctctcgaggccctgccatgagcaagctcttaactcttcaggtctgcacgtcctacgcccaccgtccagtgctactctcagctcggagttcagcttcgggctgccaagagccagcaacctggtgtcagaggctcggtcccacaacgctctgcgggccgcggcgcctgctgggaggtgtagtccccgatctgcgtactgcgttcgccgagggggagggcggagctgccggcggcccgggcgggctggcagctagagtgggtgcgatagccgcctccgcctctgccgcctccgccgtcgcctcctccgcccgggccgttcgctgctgcgcggggagagcgaggcggggccgccggggccgccatggagcccgactcggtgattgaggacaagaccatcgagctcatgaacacttcagttatggaagatcaaaatgaagatgagtccccaaagaaaaatactctttggcagataagtaatggaacatcatctgtgatcgtctccagaaagaggccatcagaaggaaactatcaaaaagaaaaagacttgtgtattaaatattttgaccagtggtctgaatcagatcaagtggaatttgtggaacatcttatttcacgaatgtgtcattatcagcatggacatattaactcttacctgaagcccatgttgcagcgggactttattaccgctttaccagagcaaggcttagatcacatagcagaaaacattctttcgtacctggatgccaggtctctgtgtgcagcagagctggtatgtaaagaatggcagcgagtgatctcagaaggaatgctttggaagaagctgattgaacgaatggtacgcactgatcccctatggaaaggactttcagaaagaagagggtgggatcagtacctgtttaaaaacagacccacagatggccctccaaattcattttataggtcattatacccaaagattatccaggatatagagactatagaatctaactggcggtgtggacgacacaacttgcagaggattcagtgccgctctgaaaatagtaaaggtgtctactgtttacagtacgatgatgaaaaaattatcagtggcctacgagataattctattaagatatgggataaaaccagcctggaatgtttgaaagtgttaacaggacacacaggctctgtcctctgtctgcagtatgatgagcgtgtcattgtaactggctcttcagattctacggtgagagtgtgggatgtgaacacgggtgaagttcttaacacattgatccaccacaatgaggctgtattgcacttacgcttcagcaatggactgatggtgacctgttccaaggaccgctccattgctgtgtgggacatggcttctgcgaccgacatcactttacgccgtgtcctggttggccaccgggctgccgtcaatgtagtagactttgacgacaagtacatcgtgtctgcctctggtgacaggaccatcaaagtctggagcacgagcacctgtgaatttgttcgtactctcaatgggcacaagcggggcattgcctgtctccagtacagggatcgcctggttgttagtggatcatcagataataccattaggctctgggatattgaatgtggtgcctgtttaagagtcctagagggacatgaagaattggtccgatgcatccggtttgataacaagaggattgtcagtggggcctatgatgggaaaattaaagtttgggacttgcaagctgctcttgaccctcgagccccagcaagcacattgtgtttgcgcacattggtggaacattctggacgtgtgtttcggctccagtttgatgagtttcagatcatcagcagctcccatgatgacactattttgatttgggatttcttaaatgtgcctcccagtgcccagaatgagacccgttctccctccagaacatacacttacatctctagataacagtctgcactttcacccgtttcagggttttctagtcttgaactactggctacgtggctaccaaatgcctaagggagttcgttcacagctgagttatgaagctggaattggttctagacgctgggtagatgcaaagcagcctaactcttcaagtaccgacatttctcacctctgattccggctctcctttgagaaggagaccttagcttccccggcttcaagtagaacagaagcccgtttccttccctcatcagtgaaaaaatctaatgtttcaaatgtaaattgttcatagaaaaggaacatagaatctgttttacagaagtaaatcgaccgtcaagagaagacttggcctctaatttatattgctttgcactttggtttgatattaagaaacagcattcttcttcagtgaaattttgggtgccaaacacctacccagaatgtccagggctttcattttcaaaagttagcattctccttttgaccgtccaagtcattatgaattctgacttgttgtattaggaacatgttggacagtggaaaattttctctggattgttttagtaatatttttgggattatacttcctttctgtaccaatttcttttaatttaaagaactataagtcagttatattatctaccaacaggtaatatagctctttcttttattaactgttctctgtcccccaaccatctcctgatatttggtagagtaacacctttatacgtgtgcttgcctcctaatttaaaatactgtattcgcatgtagatataatgtacataacagtttaacctcaaagttgctggagtcagggccccctgtgcttgagacactaatacagagtgtgttcgcacttagccatgggctgggctcaagaacctgatacctgggttgatgtggattacctagaacccttcctgcagtattcatacagtgtttttattttgttgttgtcattgcgtgtgtgtggtttgtgtgtgtttttaatgagaatcttgttttaaaatgtaatttctaaggtttaacaccaaaatgttttatttgttgtggagtatatattatacaatagagaggtaccttaaacattttttgttcttattctttttctcataagtactcctgagtacaagtggtcacctcccatagtattcatttggcttcgctgtcaaaaatcattattctgtgcagtcgtggccctgggaaggggaaataagaaggccctgttgacgggctgtcttggctctggaattcatgcatcctggccttgccaaggttctggcagggcctgctggtgtgttggagcctgcagggcaggtcaggctggttcagaggcccatgctgaggggtgggtgctctgaagtggagtgaagcctcaagcccatgaatgccaccccagtcatctctggtgtcagctgctgctgtggccccagcaggttctcaaagctcccaagtcctccctacgacacagcccaaatgtgtaaatggcactgttgccctgacagtgcatggaaaggacgttggcatccaattggcactccttctcccttattcaatattaggtttgatttgcccttcgccattgtttccaaagatcaaggaatgtcaataacattttaaaggaccaataaacagcctcctataaagtaaacctcttcccgtggaagcacactctactactaaagggaaggccctgggctctgatttgtcctttgcattgagaacggtgtggggatcagtgtgtgtgtatgtgatttgtttattgagttggctttgcttttttagtttttcttttaaaaataaaatccttccttcccatgttactaaattaatttatgtttttgagaggttgagtctcaaagtgtaaacaataaacctccattcataaggtggatgttgtaagcttgatggtggttgtgaaagtgatttagctttgaccacttttcatcctacagcttcaatatcaaactggttaggaaagcccagggggaagggagggggcaggggaggaggcaattctgaatgaatgaatggattttttgttgtttttgcatgtttaatatagaagttcccctcgttccttgggagatgatggcctttgaatatgcagacaacctttgaattgtgcctactaaattatagcaggggactttggcacccaaggagttctgactttctgggattataatagtaattcccagccatactctggactttattttgctaaccataactgagcaaatgtaaattactgctatattaatgttttaaagcactgggatagtctaattctaacttgtaattaattatgtttgccaattatctgtttgaaataaatttgtgtctgaacagctattgaaactgttaaattgtacagatattattcatgacagctttgtactgtggaatgtgcttaataaaaaacaaaaaagtttgacttttgtccagtaaattgctaagtaatgtcaataaatcgagtatgggtattatgcagtgcacctaatctggcttcatgcaattgttacttcagctactgattcaaagccaatactcttaataaagtgttgcaatactc

SEQ ID NO: 31038 - DNA, 2636 bp, Homo Sapiens
ttccggcaggcgctgcgctgctggggggcgcgggcgaggatggcggcggagaacgaggccagccaggagagcgccctgggcgcctactcgccagtggactacatgagcatcaccagcttcccgcggctgcccgaggacgagccggcgcccgcggccccgctgaggggccgcaaggacgaggacgcctttctgggagaccccgacaccgacccggactccttcctgaagtctgcacggctgcagcggctgccatcgtcgtcgtcggagatgggcagccaagacgggtcgccgctacgcgagacgcgcaaagacccgttctccgccgcagcggccgagtgctcctgccgccaggatgggctcacggtcatcgtcacggcctgtctcaccttcgctaccggtgtcaccgtggcgctggtcatgcagatctacttcggggacccccagatcttccagcagggtgccgtggtgaccgatgctgcccgctgcacttcactgggcatcgaggtgctcagtaaacagggatcttctgtggacgcagcggtggcagcagccttgtgtttgggtatcgtggctccacacagttctggcctgggcggtgggggcgtgatgctggtacatgacatccgacgaaatgagagccacctaattgatttccgggagtccgcaccaggggccctcagggaagagaccctgcaaagatcctgggagaccaagcctgggctcttggtgggggttcccggaatggtgaaggggctacatgaagctcaccagctctatggcaggctgccatggtcccaagtcctggcctttgcagcagctgtggcccaagatggcttcaacgtgactcatgatctagcccgtgccctggctgaacagctgccacccaacatgtccgagcgcttccgggagacgttcctgccatcgggccgcccgccactacctggctcgttgctgcatcggcccgacctggctgaggtgctggatgtacttggcacctccggcccggctgccttctacgcaggtggcaacctcacactggagatggtggccgaggctcagcacgcagggggtgtcataaccgaagaggacttcagcaattacagcgcccttgtggagaagcctgtgtgtggcgtgtacagaggccacctggttcttagtcccccacctccgcacacgggccctgccctcatcagtgctctcaacatcctggagggcttcaatctcaccagcctggtatcccgagaacaggctcttcactgggtggcagagaccctgaagattgcattagccctggccagcagactgggagatcccgtctatgattctaccatcactgagagcatggatgacatgctcagcaaggtggaggccgcctacctccggggccatatcaatgactcccaggcagcccctgccccactcctgcctgtctatgaactagacggagctcccacggctgcccaggtgctgatcatgggacctgatgacttcattgtggccatggttagctccctgaaccagccctttggcagcggccttatcaccccctcggggatcctgctcaacagccagatgctggacttctcctggcccaaccggacagctaaccactctgcacccagcctggagaattcagtgcagccagggaagcggccactctctttcctgctgcccacagtggtccgacccgcggaggggctctgtggaacctacctcgctctgggggccaatggagctgcgcggggcctcagcggcctgacacaggttctgctgaatgtcctgaccttgaaccggaacctgagtgacagcctggcccgcggccgcctacacccggacctgcagtccaacctcctgcaggtggacagtgagttcacagaggaagagattgagttcctggaagccaggggtcaccacgtggagaaagtagatgtcttatcctgggtccatggcagccgaaggaccaacaacttcatcatcgctgttaaggaccctcggagcccagatgcagctggagccaccatcctgtagagcagcggggtggggcggggtctctgctcccccactttgcatgttcccagagtccctccttctcccaggtttggtctcagggggaccccagggatgccccagatcaggggccagaggggatgcttagcaaacccaatcccagagtaactggaaaattctccatcaggaggcctgtggtggtggtggtggtggtggtggtggtggtggtggtggtgagtgtcagcatctacagtacagccaggcaggcaggaccttgaggaatcagactatctgtctgtgtgtcacctctcctccttcagccatgctggccccgagcttagggatgtgcttgcaaacccttctcaagggtctcacaaccccaacatcttcagactggcctgacctgggccttgtcttccagttcctttctcccattcccagcctcatttcttaaatgactaggaattttttaatggaccatcatagggagggggtgctcctcttttcccaccaggttgaggtgggggccttgcatcgggggtccccagggtatggggtaggggtgggggtgggcaccagctcaggggcttccatttgcaaagggaaattaaagaaagaatgttgcttaa

SEQ ID NO: 31039 - DNA, 20435 bp, Homo Sapiens
tgcctaccagcagcccacactccggccgctgcccagagcccccatagagagaggtccccgccgccaccgtcatggatcagccacagttcagcggggcgccccgctttctcacccggcccaaggccttcgtggtgtcggtgggcaaggacgccaccctcagctgccagatcgtgggtaatcccacgccacaggtgagctgggagaaggaccagcagccggtgacggccggcgcgcgcttccgtctggcccaggacggcgacctctaccgcctcactatcctggacctggcgctgggcgacagtgggcaatacgtgtgccgcgcgcgcaatgccataggcgaggccttcgctgccgtgggcctgcaggtggacgcggaggccgcgtgcgccgagcaggcgccgcacttcctgctgcggcccacgtccatccgcgtgcgcgagggctcagaggccaccttccgctgccgcgtgggtggctccccgaggccggcagtgagctggtccaaggacgggcggcgcctgggtgagcccgacggcccccgcgtgcgcgtggaggagctcggcgaggcaagtgcgctgcgcattcgggcggcgcggccgcgcgacggcggcacttacgaggtccgcgccgagaacccgctgggcgctgccagcgccgccgcggcgctagtggtggactcggacgccgcggacacggccagccggcccgggacctccacggccgcgctcctggcgcacctgcagcggcggcgcgaggctatgcgcgccgagggcgcccccgcctcaccgcccagcaccggcacgcgcacctgcacggtgactgaaggcaagcacgcgcgcctcagctgctacgtgaccggcgagcccaagcccgagacggtgtggaagaaggacggccagctggtgaccgagggccggcgccacgtggtgtacgaggacgcgcaggagaacttcgtgctcaagatcctcttctgcaagcagtcggaccgcggcctctacacctgcacggcgtccaacctcgtgggccagacctacagctctgtgctggtcgtagtgcgcgagcccgcggttcccttcaaaaagcggctgcaagatctggaggtgcgggagaaggagtcggctacgttcctatgtgaggtgccccagccgtccactgaggccgcgtggttcaaggaggagacgcggttgtgggcgagcgccaagtacggcatcgaggaggagggcaccgagcgccgcctgaccgtgcgcaatgtctcggccgacgacgacgcggtgtacatctgcgagacgccagagggcagccgcacggtggcggagctcgcagtccaaggaaacctcctccgaaagctccctcggaagacggcggtgcgcgtgggcgacacggctatgttttgcgtggagctggcggtcccggtgggccccgtccactggctgcggaaccaggaggaagtggtggcggggggccgcgtggccatctccgcggagggcacgcgccacacactgaccatctcccagtgctgcctggaggatgtgggccaggtggcctttatggctggcgactgccagacgtccacccggttctgcgtgtcggcccccaggaagcctcccctgcaaccccctgtggatcctgtggtaaaggccaggatggagagttccgtgattctcagctggtccccaccaccccatggggaacgccctgtcactatcgacggctacctggtagagaagaagaagcttggcacctacacctggatcaggtgccacgaggctgaatgggtggctacacctgagctgaccgtggctgatgtggcggaggaggggaacttccagttccgagtgtccgctctcaacagctttggtcagagtccctacctcgagttcccggggactgtccacctggcccccaagctggccgtgaggacaccgctgaaggcggtgcaggcggtagagggtggcgaggtcactttctccgtggacctcacggtggcctcagcgggtgagtggttcctggatgggcaggccctgaaggccagcagtgtgtatgagatccactgtgatcgcacccggcacacgctcaccatccgggaggtgcccgccagcctgcacggggcgcagctgaagttcgtggccaacggcattgagagcagcatccggatggaggtccgggcggccccagggctgactgccaacaagccgccagccgcagctgcccgggaggtgctggctcggctgcacgaggaggcgcagctgctggctgagctgtcagatcaggctgcggctgtgacgtggctgaaggatggtcgcacactgtccccaggccccaagtatgaggtgcaggcatcggccgggcggcgggtgctccttgtgcgagatgtggcccgggacgatgcaggcctctacgagtgcgtcagccgcgggggccgcatcgcctaccagctctccgtgcaaggcctcgcgcgctttctgcacaaggacatggcgggcagctgtgtggatgccgtggctgggggcccggcgcagtttgagtgtgagacctccgaagcccacgtccacgtgcactggtacaaggatggcatggagctgggccactccggtgagcgcttcttgcaggaggatgtggggacgcggcaccggctggtggcagccacagtcaccaggcaggatgaaggcacctactcctgccgcgtgggcgaggactctgtggacttccggctccgcgtctctgagcccaaggtggtgtttgctaaggagcagctggcacgcaggaagctgcaggcagaggcaggagccagtgccacactgagctgcgaggtggcccaggcccagacggaggtgacgtggtacaaggatgggaagaagctgagctccagctcgaaagtgtgcatggaggccacaggctgcacgcgcaggctggttgtgcagcaggcaggccaggcggatgccggggagtatagctgcgaggctgggggccagcggctctccttccatctggatgtcaaagagcccaaggtggtgtttgccaaggaccaggtggcacacagtgaggtgcaggctgaggcaggggccaatgccacgctgagctgcgaggtggcccaggcccaggcggaggtgatgtggtacaaagatgggaagaagctgagctccagcttgaaagtgcatgtagaggccaaaggctgcagacggaggctggtggtgcagcaggcaggcaagacggatgccggggactacagctgcgaggccaggggccagagggtctccttccgcctgcacatcacagagcccaagatgatgtttgcaaaggagcagtcagtgcataatgaggtgcaggctgaggcgggggccagtgccatgctgagctgtgaggtggcccaggcccagacggaggtgacgtggtacaaggatgggaagaagctgagctccagctcaaaagtgggcatggaggtcaaagggtgcacacggaggctggtgctgccacaggcgggcaaagcagatgctggggagtacagctgtgaggctgggggccagagagtctccttccacctgcacatcacagagcccaagggggtgtttgcgaaggagcagtcagtgcataatgaggtgcaggctgaggcggggaccactgccatgctgagctgtgaggtggcccagccccagacggaggtgacgtggtacaaggacgggaagaagctgagctccagctcaaaagtacgcatggaggtcaagggctgcacacgaaggctggtagtgcagcaggtgggcaaagcagatgctggggagtacagctgcgaggctgggggccagagagtctcctttcaactgcacatcacagagcccaaggcagtgtttgccaaggagcagttggtgcataatgaggtgcggactgaggcaggggccagtgccacactgagctgtgaggtggcccaggcccagacagaggtgacgtggtacaaggatgggaagaagctgagctccagttcgaaagtgcgcatagaggctgcgggctgcatgcggcagctggtggtgcagcaggcaggccaggcagatgctggggagtacacctgtgaggctgggggccagcggctctccttccacctggatgtttcagagcccaaggcggtgtttgcaaaggagcagctggcacacaggaaggtgcaggccgaggcgggggccattgccacgctgagctgcgaggtggcccaggcccagacagaggtgacgtggtacaaggacgggaagaagctgagctccagctcgaaagttcgaatggaggctgtgggctgcacacggaggctggtggtgcagcaggcatgccaggcggacaccggggagtatagctgcgaggccgggggccagcggctctccttcagcctggacgtggcagagcccaaggtggtgtttgccaaggagcagccagtgcacagggaggtgcaggcccaggcgggggccagcaccacactcagctgcgaggtggctcaggcccagacggaggtgatgtggtacaaggacgggaagaagctgagcttcagctcgaaagtgcgcatggaggctgtgggctgcacacggaggctggtggtgcagcaggcgggccaggcggacgccggggagtacagctgcgaggcggggagccagcggctctccttccacctgcacgtggcagagcccaaggcggtgtttgccaaggagcagccagcgagcagggaggtgcaggctgaggcggggaccagtgccacgctgagctgcgaggtggcccaggcccagacagaggtgacgtggtacaaggacgggaagaaactgagctccagctcgaaagtgcgaatggaggccgtgggctgcacacggaggctggtggtgcaggaggcaggccaggcggacgccggggagtacagctgcaaggccggggatcagcggctgtccttccacctgcacgtggcagagcccaaggtggtgtttgccaaggagcagccagcacacagggaggtgcaggctgaggcgggggccagtgccacgctgagctgcgaggtggcccaggcccagacagaggtgacgtggtacaaggatgggaagaagctgagttccagctcgaaagtgcgcgtggaggccgtgggctgcacacggaggctggtggtgcagcaggcgggccaggcggatgctggggagtacagctgtgaggcggggggccaacggctgtccttccgcctgcacgtggcagagctggagccccaaatttcagagagaccctgccgcagggagcctctggtggtcaaggagcatgaagacatcatcctgaccgccacactggccacaccctctgcggccacggtgacctggctcaaggatggtgtggagattcgccgcagcaagcggcatgagacagccagccagggggacacccacaccctgaccgtgcatggcgcccaggttctggacagcgccatctacagctgccgtgtgggcgcagaggggcaggacttcccagtgcaggtggaagaggtggccgccaagttctgccggctgctggagcctgtgtgcggcgagctgggtggcacggtgacactggcctgcgagctaagcccagcgtgtgcagaggtggtgtggcgctgcggcaacacgcagcctcgggtgggcaagcgcttccagatggtggccgaggggcccgtgcgctcactcactgtgttggggctgcgcgcagaggacgcaggggagtacgtgtgtgagagccgtgatgaccacaccagtgcgcagctcaccgtcagtgtgccccgagtggtgaagtttatgtctgggctgagcaccgtggtcgcagaggagggcggcgaggccaccttccagtgcgtggtgtcccccagtgatgtggcagtcgtgtggttccgggacggtgccctgcttcagcccagcgagaagtttgccatatcacagagtggcgccagccacagcctgaccatctcagacctggtgctggaggacgcgggccagatcaccgtggaggctgagggcgcctcatcctctgctgccctgagggtccgagaggcgcctgtgctgttcaaaaagaagctggagccgcagacggtggaggagcggagctcggtgaccctggaggtggagctgacgcggccgtggccggagctgaggtggacacggaacgcgacggccctggcgccgggaaagaacgtggagatccacgccgagggcgcccgccaccgcctggttctgcacaacgtaggttttgccgaccgtggcttctttggctgcgagacgccggatgacaagacacaggccaaactcaccgtggagatgcgccaggtacggctcgtacggggcctgcaggcagtggaggcacgggagcagggcacggctaccatggaggtgcagctgtcgcatgcggacgtggatggcagctggactcgtgacggtctgcggttccagcaggggcccacgtgccacctggctgtgcggggccccatgcacaccctcacactctcggggctgcggccagaggatagtggccttatggtcttcaaggccgaaggagtgcacacgtcggcgcggctcgtggtcaccgagcttcccgtgagcttcagccgcccgctgcaggacgtggtgaccactgagaaggagaaggttaccctggagtgcgagctgtcgcgtcctaatgtggatgtgcgctggctgaaggacggtgtggagctgcgggcaggcaagacgatggccatcgcagcccagggcgcctgcaggagcctcaccatttaccggtgcgagttcgcggatcagggagtgtatgtgtgtgatgcccatgatgcccagagctctgcctccgtgaaggtacaaggaaggacatacactctcatctaccggagagtcctggcggaagatgcaggagagatccaatttgtagccgaaaatgcagaatcgcgagcccagctccgagtgaaggagctgccagtgaccctcgtgcgcccgctgcgggacaagattgccatggagaagcaccgcggtgtgctggagtgtcaggtgtcccgggccagcgcccaggtgcggtggttcaagggcagtcaggagctgcagcccgggcccaagtacgagctggtcagtgatggcctctaccgcaagctgatcatcagtgatgtccacgcagaggacgaggacacctacacctgtgacgccggtgatgtcaagaccagtgcacagttcttcgtggaagagcaatccatcaccattgtgcggggtctgcaggacgtgacagtgatggagcccgctcctgcctggtttgagtgtgagacctccatcccctcagtgcggccacctaagtggctcctggggaagacggtgttgcaggctggggggaacgtgggcctggagcaggagggcacggtgcaccggctgatgctgcggcggacctgctccaccatgaccgggcccgtgcacttcaccgttggcaagtcgcgctcctctgcccgcctggtggtctcagacatccccgtagtcctcacacggccgttggagcccaagacagggcgtgagctgcagtcagtggtcctgtcctgcgacttccggccagcccccaaggctgtgcagtggtacaaggatgacacgcccctgtctccctctgagaagtttaagatgagcctggagggtcagatggctgagctgcgcatcctccggctcatgcctgctgatgctggtgtctaccggtgccaggcgggcagtgcccacagcagcactgaggtcactgtggaagcgcgggaggtgacagtgacagggccgctacaggatgcagaggccacggaggagggctgggccagcttctcctgtgagctgtcccacgaggatgaggaggtcgagtggtcgctcaacgggatgcccctgtacaacgacagcttccatgagatctcacacaagggccggcgccacacgctggtactgaagagcatccagcgggctgatgcgggcatagtacgcgcctcctccctgaaggtgtcgacctctgcccgcctggaggtccgagtgaagccggtggtgttcctgaaggcgctggatgacctgtccgcagaggagcgcggcaccctggccctgcagtgtgaagtctctgaccccgaggcccatgtggtgtggcgcaaagatggcgtgcagctgggccccagtgacaagtatgacttcctgcacacggcgggcacgcgggggctcgtggtgcatgacgtgagccctgaagacgccggcctgtacacctgccacgtgggctccgaggagacccgggcccgggtccgcgtgcacgatctgcacgtgggcatcaccaagaggctgaagacaatggaggtgctggaaggggaaagctgcagctttgagtgcgtcctgtcccacgagagtgccagcgacccggccatgtggacagtcggtgggaagacagtgggcagctccagccgcttccaggccacacgtcagggccgaaaatacatcctggtggtccgggaggctgcaccaagtgatgccggggaggtggtcttctctgtgcggggcctcacctccaaggcctcactcattgtcagagagaggccggccgccatcatcaagcccctggaagaccagtgggtggcgccaggggaggacgtggagctgcgctgtgagctgtcacgggcgggaacgcccgtgcactggctgaaggacaggaaggccatccgcaagagccagaagtatgatgtggtctgcgagggcacgatggccatgctggtcatccgcggggcctcgctcaaggacgcgggcgagtacacgtgtgaggtggaggcttccaagagcacagccagcctccatgtggaagaaaaagcaaactgcttcacagaggagctgaccaatctgcaggtggaggagaaaggcacagctgtgttcacgtgcaagacggagcaccccgcggccacagtgacctggcgcaagggcctcttggagctacgggcctcagggaagcaccagcccagccaggagggcctgaccctgcggctcaccatcagtgccctggagaaggcagacagcgacacctatacctgcgacattggccaggcccagtcccgggcccagctcctagtgcaaggccggagagtgcacatcatcgaggacctggaggatgtggatgtgcaggagggctcctcggccaccttccgttgccggatctccccggccaactacgagcctgtgcactggttcctggacaagacacccctgcatgccaacgagctcaatgagatcgatgcccagcccgggggctaccacgtgctgaccctgcggcagctggcgctcaaggactcgggcaccatctactttgaggcgggtgaccagcgggcctcggccgccctgcgggtcactgagaagccaagcgtcttctcccgggagctcacagatgccaccatcacagagggtgaggacttgaccctggtgtgcgagaccagcacctgcgacattcctatgtgctggaccaaggatgggaagaccctgcgggggtctgcccggtgccagctgagccatgagggccaccgggcccagctgctcatcactggggccaccctgcaggacagtggacgctacaagtgtgaggctgggggcgcctgcagcagctccattgtcagggtgcatgcgcggccagtgcggttccaggaggccctgaaggacctggaggtgctggagggtggtgctgccacactgcgctgtgtgctgtcatctgtggctgcgcccgtgaagtggtgctatggaaacaacgtcctgaggccaggtgacaaatacagcctacgccaggagggtgccatgctggagctggtggtccggaacctccggccgcaggacagcgggcggtactcatgctccttcggggaccagactacttctgccaccctcacagtgactgccctgcctgcccagttcatcgggaaactgagaaacaaggaggccacagaaggggccacggccacgctgcggtgtgagctgagcaagacagcccctgtggagtggagaaaggggtccgagaccctcagagatggggacagatactgtctgaggcaggacggggccatgtgtgagctgcagatccgtggcctggccatggtggatgccgcggagtactcgtgtgtgtgtggagaggagaggacctcagcctcactcaccatcaggcccatgcctgcccacttcataggaagactgagacaccaagagagcatagaaggggccacagccacgctgcggtgtgagctgagcaaggcggcccccgtggagtggaggaaggggcgtgagagcctcagagatggggacagacatagcctgaggcaggacggggctgtgtgcgagctgcagatctgtggcctggctgtggcagatgctggggagtactcctgtgtgtgtggggaggagaggacctctgccactctcaccgtgaaggccctgccagccaagttcacagagggtctgaggaatgaagaggccgtggaaggggccacagccatgttgtggtgtgaactgagcaaggtggcccctgtggagtggaggaaggggcccgagaacctcagagatggggacagatacatcctgaggcaggaggggaccaggtgtgagctgcagatctgtggcctggccatggcggacgccggggagtacttgtgtgtgtgcgggcaggagaggacctcagccacgctcaccatcagggctctgcctgccaggttcatagaagatgtgaaaaaccaggaggccagagaaggggccacggctgtgctgcagtgtgagctgaacagtgcagcccctgtggagtggagaaaggggtctgagaccctcagagatggggacagatacagcctgaggcaggacgggactaaatgtgagctgcagattcgtggcctggccatggcagacactggggagtactcgtgcgtgtgcgggcaggagaggacctcggctatgctcaccgtcagggctctacccatcaagttcacagagggtctgaggaacgaagaggccacagaaggggcaacagccgtgctgcggtgtgagctgagcaagatggcccccgtggagtggtggaaggggcatgagaccctcagagatggagacagacacagcctgaggcaggacggggccaggtgtgagctgcagatccgcggcctcgtggcagaggacgctggggagtacctgtgcatgtgcgggaaggagaggacctcagccatgctcaccgtcagggccatgccttccaagttcatagagggtctgaggaatgaagaggccacagaaggggacacggccacgctgtggtgtgagctgagcaaggcggcaccggtggagtggaggaaggggcatgagaccctcagagatggggacagacacagcctgaggcaggacgggtccaggtgtgagctgcagatccgtggcctggctgtggtggatgccggggagtactcgtgtgtgtgcgggcaggagaggacctcagccacactcactgtcagggccctgcctgccagattcatagaagatgtgaaaaaccaggaggccagagaaggggccacggccgtgctgcaatgtgagctgagcaaggcggcccccgtggagtggaggaaggggtctgagaccctcagaggtggggacagatacagcctgaggcaggatgggaccagatgtgagctgcagattcatggcctgtctgtggcagacactggggagtactcgtgtgtgtgcgggcaggagaggacctcggccacactcaccgtcagggccccacagccagtgttccgggagccgctgcagagtctgcaggcggaggagggctccacggccaccctgcagtgtgagctgtctgagcccactgctacagtggtctggagcaagggtggcctgcagctgcaggccaatgggcgccgggagccacggcttcagggctgcaccgcggagctggtgttacaggacctacaacgtgaagacactggcgaatacacttgcacctgtggctcccaggccaccagtgccaccctcactgtcacagctgcgcctgtgcggttcctccgagagctgcagcaccaggaggtggatgagggaggcaccgcacacttatgctgcgagctgagccgggcgggtgcgagcgtggagtggcgcaagggctccctacagctcttcccttgtgccaagtaccagatggtgcaggatggtgcagctgcagagctgctggtacgcggagtggagcaggaggatgcgggtgactacacgtgtgacacgggccacacgcagagcatggccagcctctctgtccgtgtccccaggcccaagttcaagacccggcttcagagtctggagcaggagacaggtgacatagcccggctgtgctgtcagctgagtgatgcagagtcgggggccgtggtgcaatggctcaaggagggcgtggagctgcatgcgggccccaagtacgagatgcggagccagggggccacgcgggagctgctgatccaccaactggaggccaaggacacgggcgagtatgcctgtgtgacaggcggccagaaaaccgctgcctccctcagggtcacagagcctgaggtgaccattgtacgggggctggttgatgcggaggtgacggccgatgaggatgttgagttcagctgtgaggtgtccagggctggagccacaggcgtgcagtggtgcctacagggcctgccactgcaaagcaatgaggtgacagaggtggctgtgcgggatggccgcatccacaccctgcggctgaagggcgtgacgcccgaggacgctggcactgtctccttccatttgggaaaccatgcttcctctgcccagctcaccgtcagagctcctgaggtgaccatcctggagcccctgcaggacgtgcagctcagtgagggccaggatgccagcttccagtgccggctatccagagcttcaggccaggaggcccgctgggctttaggaggggtgcccctgcaggccaacgagatgaatgacatcactgtggagcagggcacactccacctgctcaccctgcacaaggtgacccttgaggatgctggaactgtcagtttccacgtgggcacgtgtagctctgaggcccagctgaaagtcacagccaagaacacggtggtgcgggggctggagaatgtggaggcgctggagggcggcgaggcgctgttcgagtgccagctgtcccagcccgaggtggccgcccacacctggctgctggacgacgaacccgtgcgcacctcggagaacgccgaggtggtcttcttcgagaacggcctgcgccacctgctgctgctcaaaaacttgcggccacaagacagctgccgggtgaccttcctggctggggatatggtgacgtccgcattcctcacggtccgaggctggcgcctggagatcctggagcctctgaaaaacgcggcggtccgggccggcgcacaggcacgcttcacctgcacgctcagcgaggcggtgcccgtgggagaggcgtcctggtacatcaatggcgcggcagtgcagccggatgacagcgactggactgtcaccgccgacggcagtcaccaagccctactgctgcgcagcgcccagccccaccacgccggggaggtcaccttcgcttgccgcgacgccgtggcctctgcacggctcaccgtgctgggcctccctgatcccccagaggatgctgaggtggtggctcacagcagccacactgtgacactgtcttgggcagctcccatgagtgatggaggcggtggtctctgtggctaccgcgtggaggtgaaggagggggccacaggccagtggcggctgtgccacgagctggtgcctggacccgagtgtgtggtggatggcctggcccccggggagacctaccgcttccgtgtggcagctgtgggccctgtgggtgctggggaaccggttcacctgccccagacagtgcggcttgcagagccaccgaagcctgtgcctccccagccctcagcccctgagagccggcaggtggcagctggtgaagatgtctctctggagcttgaggtggtggctgaggctggtgaggtcatctggcacaagggaatggagcgcatccagcccggtgggcggttcgaggtggtctcccagggtcggcaacagatgctggtgatcaagggcttcacggcagaagaccagggcgagtaccactgtggcctggctcagggctccatctgccctgcggctgccaccttccaggtggcactgagcccagcctctgtggatgaggcccctcagcccagcttgccccccgaggcagcccaggagggtgacctgcacctactgtgggaggccctggctcggaaacgtcgcatgagccgtgagcccacgctggactccattagcgagctgccagaggaggacggccgctcgcagcgcctgccacaggaggcagaggaggtggcacctgatctctctgaaggctactccacggccgatgagctggcccgcactggagatgctgacctctcacacaccagctctgatgatgagtcccgggcaggcaccccttccctggtcacctacctcaagaaggctgggaggccaggcacctcaccactggccagcaaggttggggccccagcagccccctctgtgaagccacagcagcagcaggagccactggctgctgtgcgcccaccactgggagacctgagcaccaaagacctgggtgatccctcaatggacaaggcagctgtgaagatccaggctgcctttaagggctacaaggtccggaaggagatgaagcagcaggaagggcccatgttctcccacacatttggggacaccgaggcacaggtgggggatgccctgcggctggagtgtgtcgtggccagcaaggcagatgtgcgagcccgctggctgaaggatggtgtggagctgaccgatgggcggcaccatcacatcgaccagcttggggatggcacctgctctctgctgatcgctggcctggaccgtgctgatgctggctgctacacctgtcaggtgagcaacaagtttggccaggtgacccacagtgcctgtgtggtggtcagtgggtcagagagtgaagccgagagctcctctgggggtgagctggacgatgccttccgccgggctgcccgtcggctgcaccggctcttccgcaccaaaagtccggctgaagtttcagatgaggagctcttcctgagtgcagacgagggccctgcagagccagaggagcccgcggactggcagacataccgcgaagatgagcatttcatctgcatccgttttgaggcgctcactgaggcccgccaggcggtaactcgcttccaggagatgtttgccacactgggcattggggtggagatcaagctggtggaacaggggcctcggagggtagagatgtgcatcagcaaagagactcctgcccctgtggtgcctccagagccattgcccagcctactgacttctgacgctgccccagtgttcctgactgagttgcagaaccaagaagtgcaggatgggtatcctgtgagctttgactgcgtggtgacaggtcagcccatgcccagtgtgcgctggttcaaggatgggaagttgttggaggaggatgatcactacatgattaatgaagaccaacagggtggccatcagctcatcatcacagccgtggtgccagcagacatgggcgtctaccgctgcctggccgagaacagcatgggtgtctcctccaccaaggctgagctccgtgtggacttgacaagcacagactatgacactgcagcagatgccacggagtcctcatcctacttcagtgcccaaggctacctgtccagccgggagcaggagggaacagagtccaccactgatgagggccagctgccccaggtggtggaggagctgagagacctccaggtggcccctggcacacgcctggccaagttccagctcaaggtgaaaggctaccctgctcccagattatactggttcaaagatggccagcccctgaccgcatctgcccacatccgcatgactgacaagaagatcctgcacaccctggagatcatctccgtcacccgggaggactctggccagtatgcagcctatatcagcaatgccatgggtgctgcctactcgtctgcccggctgctggttcgaggccctgatgagccagaagagaagcctgcatcagatgtgcatgagcagctggtgccgccccgaatgctggagaggttcacccccaagaaagtgaagaaaggctccagcatcaccttctctgtgaaggtagaaggacgcccggtgcccaccgtgcactggctcagggaggaggctgagagaggcgtgctgtggattggccctgacacaccgggctacaccgtggccagctctgcgcagcagcacagcctggtcctgctggacgtgggccggcagcaccagggcacctacacatgcattgccagcaacgctgccggccaggccctctgctccgccagcctgcacgtctcgggcctgcctaaggtggaggagcaggagaaagtgaaggaagcgctgatttccactttcctgcaggggaccacacaagccatctcagcacaggggttccaaactgcgagttttgctgaccttggtgggcagaggaaagaagagcctctggctgccaaggaggccctcggccacctgtccctcgctgaggtgggcacagaggagttcctgcagaaactgacctcccagatcactgagatggtatcggccaagatcacgcaggccaagctgcaggtgcccggaggtgacagtgatgaggactccaagacaccatctgcatccccccgccatggccgatcacggccatcctccagcatccaggagtcttcctcagagtcagaggacggcgatgcccgaggcgagatctttgacatctacgtggtcaccgctgactacctgcccctaggggctgagcaggatgccatcacgctgcgggaaggccagtatgtggaggtcctggatgcagcccacccactgcgctggcttgtccgcaccaagcccaccaagtccagcccctcacggcagggctgggtgtcaccagcctacctggacaggaggctcaagctgtcacctgagtggggggccgctgaggcccctgagttccctggggaggctgtgtctgaagacgaatacaaggcaaggctgagctctgtgatccaggagctgctgagttctgagcaggccttcgtggaggagctgcagttcctgcagagccaccacctgcagcacctggagcgctgcccccacgtgcccatagctgtggccggccagaaggcagtcatcttccgcaatgtgcgggacatcggccgcttccacagcagcttcctgcaggagttgcagcagtgcgacacggacgacgacgtggccatgtgcttcatcaagaaccaggcggcctttgagcagtacctggagttcctggtggggcgtgtgcaggctgagtcggtggtcgtcagcacggccatccaggagttctacaagaaatacgcggaggaggccctgttggcaggggacccctctcagcccccgccaccacctctgcagcactacctggagcagccagtggagcgggtgcagcgctaccaggccttgctgaaggagctgatccgcaacaaggcgcggaacagacagaactgcgcgctgctggagcaggcctatgccgtggtgtctgccctgccacagcgcgctgagaacaagctgcacgtgtccctcatggagaactacccaggcaccctgcaggccctgggcgagcccatccgccagggccacttcatcgtgtgggagggtgcaccgggggcccgcatgccctggaagggccacaaccgtcacgtgttcctcttccgcaaccacctggtaatctgcaagccccggcgagactcccgcaccgataccgtcagctacgtgttccggaacatgatgaagctgagcagcatcgacctgaacgaccaggtggagggggatgaccgcgccttcgaggtgtggcaggagcgggaggactcggtgcgcaagtacctgctgcaggcacggacagccattatcaagagctcgtgggtgaaggagatctgtggcatccagcagcgtctggccctgcctgtgtggcggcccccggactttgaagaggagctggccgactgcacagccgagctgggtgagacagtcaagctggcctgccgcgtgacgggcacacccaagcctgtcatcagctggtacaaagatgggaaagcagtgcaggtggacccccaccacatcctcattgaagaccctgatggctcgtgtgcactcatcctggacagcctgaccggtgtggactctggccagtacatgtgcttcgcggccagcgccgctggcaactgcagtaccctgggcaagatcctggtgcaagtcccaccacggttcgtgaacaaggtcctggcctcaccctttgtggagggagaggacgcccagttcacctgcaccatcgaaggcgccccgtacccgcagatcaggtggtacaaggacggggccctgctgaccactggcaacaagttccagacactgagtgagcctcgcagcggcctgctagtgctggtgatccgggcggccagcaaggaggacctggggctctacgagtgtgagctggtgaaccggctgggctccgcgcgggctagtgcggagctgcgcattcagagccccatgctgcaggcccaggagcagtgtcacagggagcagctcgtggctgcagtggaagtcactgagcaagagactaaagtccccaagaaaaccgtcatcatagaagagaccatcaccactgtggtgaagagcccacgtggccaacgacggtcccccagcaagtccccctcccgctcaccttcccgytgctctgccagcccgctgaggccaggcctactggcccccgacctgctgtacctgccaggtgctggccagccccgcaggccggaggcagaaccaggccagaagcccgtggtgcccacactgtatgtgacggaggccgaggcccactctccagctctgcccggactctcggggccccagcccaagtgggtggaggtggaggagaccattgaagtccgggtgaagaagatgggcccgcagggtgtgtctcccaccacagaggtgcccaggagctcatcggggcatctcttcacactgcccggtgcgacccccggaggggaccccaattccaacaactccaacaacaagctgctggcccaggaggcctgggcccagggcacagccatggtcggcgtcagagagccccttgtcttccgcgtggatgccagaggcagtgtggactgggctgcttctggcatgggcagcctggaggaggagggcaccatggaggaggcgggagaggaagagggggaagacggagatgcctttgtgacggaggagtcccaggacacacacagccttggggatcgtgaccccaagatcctcacgcacaacggccgcatgctgacactggctgacctggaagattacgtgcctggggaaggggagaccttccactgtggtggccctgggcctggcgcccctgatgaccctccctgcgaggtctcggtgatccagagagagatcggggagcccacggtggggcagcctgtgctgctcagcgtggggcatgcactgggtccccgaggccctctcggcctctttaggcctgagccccgtggggcgtcaccaccgggaccccaggtccgtagccttgagggcacctccttcctcttgcgggaggccccggctcggcctgtgggcagtgctccctggacgcagtctttctgcacccgcatccggcgttctgcggacagtggccagagcagcttcaccacagagctttccacccagaccgtcaacttcgggacagtgggggagacggtcacccttcacatctgcccagacagggatggggatgaggcggcacagccctgatgctgctgccatggtggcttggggcagcggggagaaaggagtgtccttgaggcctaggacgctgcccggcctcagcagcagccctgggagcctcctgagggccctccctgtccctggccacgggcccttcttacctcactcaacttcagccaggaggactgggtggtgcttgcaatgttggaatgaccggctcaaagacctcagctctgggctgtttcctgtcagcctggcaggagcctcaggactgtggacgaaggatgtggccttgggcatttgtcctgttcccacatgggcctggtccctccctcctggccccagccacagctgccaggcctgacatggccttgcctctcctgcagtcttggtgactgagacccttgggtggcgcttcccagctctgcaggccctcctggccttttctgcagggtggacacagggtctgtgtgtgggcagcagcccctgtctctcagcaagaataaagcagcttcctgtgcaaaaagg

SEQ ID NO: 31040 - DNA, 1724 bp, Homo Sapiens
ggggactccgcccctcccgatttcctccgggctacaggcgacagagctgagccaagcgtttactgggcagctgttacggtaagtgaggaggggctggggtgcccagcgttttggatctcccactctggcccggccccggaataccacatagaggccttgggacctgattcatcccgtccagacagccctagagacctgagcgactgaggcctgggatctggacgccggaatttcctgcgtggttctggacgccctgccctgggctcagattccaaatgaaaatgtttgagagcgctgactctacagccacaagatctggccaggatctctgggctgaaatttgttcctgtctgccaaatcctgaacaagaagatggtgccaacaatgcattctcagactcctttgtggattcttgccctgaaggtgaaggccagagggaggtggctgactttgctgtccagccagctgtaaagccttgggctcccttgcaggattcagaagtgtatttagcatctctagagaagaagctaagaagaatcaaaggtttaaatcaggaagtgacttccaaggacatgcttcgaactctggcccaagccaagaaggaatgctgggatcggttcctccaggagaagttagcttcagagttctttgtggatggacttgattctgatgagagcaccttggaacatttcaagaggtggctccagccagataaagtagccgtcagcacagaggaggtccagtatctgattcctccagagtcacaggttgagaagccagtggccgaggacgagccagcagccggggacaagccagcagcagcagaacagtaaattacacacacacacacacacacacacacacacacacacacacacacacacacacacacacacacgccgagcagctgtctcgggtccagagcgagcagcgtggagctcagtgacagcagcagggagaaatccactgaaggaaaaaacccaaatttccactccacaaagaaaacagctgcaagcccccagggacttacctggggctggcatgtgtgactgtctcggatgaagtgactgacccagtgcacactggatcaaaatgctgctttcctctgtgtctcacagcttggctgagctctgtctctgcaggttagaagtctgctaaagatcaaatgtgaaagtacttggagaaactgaggcctcttatgtgtaatgtgtaagttaagtgagccatatattttcttgcctcttccggacattcatgcttgtgtcccaagcattcccttggtgaattgtcacgtgagtggggccagtaagagtgaagtctgctccttgaatccaagccccatctggggcttctctaacaaatctgtagtaagtatacggactccagggagagaggctgggcttctttctctcatttgttccttgtggaacaaatgggcaaaagaagtgtgaaaatgtgggtgtttatgtctgtgtatatgtattttttacttcatgcatggcttctcctccaacttcctcctgcacttaaaaagggccaggttccaaattagacttgtaaatatggtgttagtgtttgacactactcctggatagttccaaacatcttccttgtggcaggtttcctggctgagcccgagcttccctccctgtttattgtgttcatgatcagtatgtgtttccatataaaacttttctcaacggaaaaaaaaaaaaaaaaaaaaa

SEQ ID NO: 31041 - DNA, 2376 bp, Homo Sapiens
ggcgcgggcctccggcctgaggcccggcgaggtgctggagggagcggggcgcggatccggcccagatgggcagctccgtccgcggggtcagggccgggcttcggcttcaccgcagcctcgcctgagcgggcgcctctgaagtggagggcgggccgcctgggccgcgggcctcgggaggatggtggcgccctggcgcgtctccgtcagggtttgcctgtcgcacctgaggtgcttcgagctcagacagggactcagcctcctgaggccctccgagtgccctcgcgatgccaggctctgctggcttctgctgggcactttgcccaaggtcgtctccctgtgcggggacgtgggtgagggggcccctgacgttctgagtcggcgaagggtccgctgcagcggggcggctggcgcggggcccgcggagagcctcccccgagcgggacctctgggcggcgtcttcctgcatctccgcctctggcttcgcgccggcgctctgttggtgaaattcttccccctcctactcctctaccccctcacctacctggctcccagcgtctccaccctctggctccacctgcttctgaaagccaccgagacctcaggcccaacctacatcaaactgggccagtgggccagcacccggcgcgatctgttttcggaggctttctgtgcccaattttccaagctgcatgtccgagtgacgccccacccgtggactcacactgagcgcttccttcggcaggcttttggggatgactgggggagcatcctctcttttgagaaccgggaacctgtgggctcaggctgcgtggcccaggtgtacaaagcatacgccaacactgccttcctggagactgacagcgtccagagacttggcagggcctcctgtctgccgcccttctcacatactggggcagtcggtgggctgagagagctctttggataccttggaaatggccggaaacctccagaaaatctcgcagaccagtcgtttctagaaaggctgctcctccctaaagctgacctggttggatcaaatgcaggggtgtctcgggctcaggtccctggccaccaacctgaggccaccaacctcatctccgtggcagtgaaagtgttgcaccctggcctgctcgctcaggtgcatatggacctgctgctgatgaagattggcagccgagtcctgggagttttgccaggcatcaagtggcttagcttgcctgagattgtggaggaatttgagaagctgatggtccaacagattgacctgcgttacgaagctcagaatctagaacacttccaggtcaacttccggaatgtgaaagccgtcaagttccccacccctctgcgcccctttgtcaccagagaagtcttggtggaaacgtatgaagagagtgtgcctgtgtccagttaccagcaggcaggaattcccgtggacttgaaaaggaagattgcacggctggggatcaacatgctcctgaagatgatatttgtggataactttgtccatgcagaccttcaccctggaaacatcctggttcagggtgccaacggcctgtcctcgagtcaggaggcgcagctgcagcaggcggacatctgtgacactctggtggtggccgtgccatcttccctctgcccgctgcgactggtgctgctggatgctggcattgtggcggagctgcaggcccctgacctgaggaatttccgggcagttttcatggctgtggtgatggggcagggccagagagtggctgagctgatcctgcatcatgcccgggccagcgagtgcagggacgtggaggggttcaaaaccgagatggccatgctggtgacccaggccaggaagaacaccatcaccctggagaagcttcatgtgtccagccttctctctagtgtctttaagttgctgatgactcacaaggtaaagcttgagagcaactttgcctccattgtgtttgccatcatggtgttggaggggcttggccgctcactggaccccaaactggacatcctggaggcagcgaggcccttcctcctcacgggcccagtgtgccccccgtgatggggcagtggcctctgtgggcccttgtcaagagctggaggccactcccaagagcctctcctatggcagctgggacgttttaaaattgggacaccaatttcaaatgtaaccctccagtggtggaaggcacaccatggcttcctctgcttggtttgagggtctgttcaaaagctttgggccaattagggagtaaaaggagggaaggggcctatccattccattgtggaagctgggccaggtgccagggacactctccttcagggaaaatgttatgtggaggaggacgaataaatttattttgttttaaaaaaaaaaaa

SEQ ID NO: 31042 - DNA, 2060 bp, Homo Sapiens
ccggagccggccttcgggaggcgcggcccgggaggaggcctgggcctgcgggccgggagcagcaggggcggcccgcgggagggagcggaagtcccgggacgggcgcgggcagcggcgcgagcagggcgggcgagttccgcgctccctccccatggccgggagcgggccgcggcgacggcggcggcgctgacaggccccgggcggggcggggcaggcggcctggacgggggcctggggctgtgggaagatgaacgccctcctagagcagaaggagcagcaggagaggctgcgggaggccgcggccttaggggacattcgggaggtgcagaaactggtggagagcggggtggatgtgaactcccaaaatgaggtcaacggctggacttgtttacactgggcatgtaaacgaaaccatggtcaggtggtctcttacctgttaaaatcaggagctgacaaagaaattcttaccacaaaaggagaaatgccagtccagttaacatcaaggagagaaatcaggaagattatgggagtggaagaagaagatgatgatgatgatgatgatgacaacctcccccagctgaagaaggagtcagaactgccctttgttcccaactatttggccaacccagccttcccttttatctatacacccacagcagaggattcagcccagatgcagaatgggggcccctccacaccccctgcatcaccccctgcagatggctcacctccattgcttccccctggggaacctcccctgttagggacctttccccgggaccacacctctttggcactagttcagaatggtgatgtgtcggccccctctgccatactcagaacaccagaaagcacaaaaccgggtcctgtttgtcagccaccagtgagtcagagccgctccctgttttcttctgtcccgtccaagccaccaatgtctctggagcctcaaaatgggacgtatgcaggaccagcgccagcattccagccatttttcttcactggagcatttccatttaatatgcaagagctggtactcaaggtgagaattcagaacccatctcttcgagaaaatgatttcattgaaattgaactggaccgacaggagctcacctaccaagagttgctcagagtgtgttgctgtgagctgggtgttaatccagatcaagtggagaagatcagaaagttacccaatactctgttaaggaaggacaaggatgttgctcgactccaagatttccaggagctggaactggttctgatgataagtgaaaataattttctgttcagaaatgctgcatccacactgactgaaaggccttgctataacaggagagcttcaaaactgacttactaatgcagcagggacttttatcactgagtattatgacagtgtgcatcacctctgggccaaggacaagccattgatctaaatgcctcagatgcccgggagggcctctggtgccactgcatagtatatactaacatcattctgccaaggtaggaagcccctgacccccaagcagtggtgccactcttccaagcctcttggtgcacagtaaacctattgcttgaagctttgaacagctgagaagtggtctggagaggcagaagctgaaggttctatatccagtgtgttttatgtccagaatgtaagagagttgtctaagcagcagctgagagagagcggagcctatttctagccactcctgttgacagtgcacctgaagggctgggatgcgtttttcttggtgttgcatgctcacaactctgctgacattgggaacttatgagagaggaagactcgggaaagcacagatactggacagatggattctggtgtggggaaagcacagatactggacagatggattctagtgtgacttgtgactgtgaggtttcctataacatatttataaatgttactcaggttaaaagtatttaagaatacagttaactaattgtaaatatgctgttaaccaaaagagctttccctccctcactttttcctttgtaaacactcatgactgctaaaaaaaaaaaaaaaaaaaaaaaaaaaaaaa

SEQ ID NO: 31043 - DNA, 1646 bp, Homo Sapiens
ggtcgccaagatggcgtcctccgcctccgcccggactccggcagggaagcgagtgataaatcaggaagaattgcggcggttaatgaaggagaagcagcgtctgagcaccagtcggaaacggatagaatctccattcgcgaagtacaaccgtttggggcagctgagttgtgccctgtgtaacactccggttaagagcgagctcctgtggcagactcacgtcctgggaaagcagcaccgagagaaagtggccgagctgaaaggcgcgaaggaagccagccagggttcgtccgccagttcagcgcctcagtccgtcaagaggaaagcgccggacgcagacgaccaagatgtcaagagagcgaaggccaccttggtgcctcaggtacagccctccacatctgcgtggaccaccaactttgacaaaataggaaaggagttcattagagcgactcccagtaagccttcaggactcagtttactccccgattatgaagatgaggaggaggaggaagaggaggaggaaggagatggagaaagaaaaaggggggacgccagcaagccgctctccgacgcacagggcaaggagcactcagtttcctcttcacgggaggtaacaagtagtgtgctgccaaacgatttctttagtactaatcctcccaaggcccccataattcctcattcagggtcaattgagaaagcagaaatacatgaaaaagtggtggaaaggagagaaaacaccgcggaagcgttaccggaaggtttttttgacgaccctgaggtagatgcaagagtacgaaaggttgatgctccaaaagatcagatggacaaagagtgggacgaattccaaaaagccatgaggcaggtcaacactatttccgaagccatagttgccgaagaggatgaggagggacggttggaccgccagattggggagatcgatgagcagatagagtgttaccgacgggtggaaaagctacggaatcgccaggatgaaataaaaaataaacttaaagaaatcctgaccataaaagaactgcagaaaaaggaagaagagaatgctgacagcgatgatgagggggaactacaggatttgttgtctcaggattggagggtgaaaggggcattgttatagggttttaaagacccaaggtttctaacagcctctgctgttgtataaaaagtgctgtctctcagtagtatagcggttacttcatgcctcaagatttgggtacctggattgctaaactggattgttgagataaaatgagccagtgagctacagcactttggaaaatttgtgtaacatgtttttgaggtaaagttgtttttgaaatttctgaagtgttatataccaaaatgccaacatttccacgacagacttaactgtataatttcgttgtaaaatctgtaagttgtaaatattgtacatagttaaatctgtattctgttttgaatttttttaattaatagaaagaccaaccggcaaactttcagatgaatgcttactgtggtatttggaatgtatgtatcttctgaaccctacatcaagttgaaaaggtttgttttcttgtttctttggtttttgtatggttttttagaacacttcataaacacataagtcattgtaggttaaaaaaaaaaaaaaaaaa

SEQ ID NO: 31044 - DNA, 1791 bp, Homo Sapiens
tgttgccctcaggtcgctcccgggcgcggacacggaacccggccatggaagatccgtcgggggctcgcgagccccgggcccggccgagagagcgggacccgggacggcgcccccacccagaccaaggccgcacccacgatcgaccgcgggaccgacccggggacccgcgcaggaagcgaagcagcgacgggaaccggcgaagggacggggaccgggacccgaagagagaccaggagagggacgggaaccgcgaccggaaccgggaccgggagagggagagagagagggaaagagacccggaccgaggcccccgccgggacacacacagggacgcgggccctcgcgcaggtgaacacggagtttgggaaaaaccgcgccaaagccggacgcgggacggagcccggggactgacctgggacgcagccgcgcctcctgggcccgcgccctgggaagccccggagccgccgcagccgcagaggaagggagaccccgggcgccgcagacccgaaagtgaacccccttcggagagatatctgccctcgacccccaggcctggacgagaggaggtggaatattaccagtcagaggcggaaggactcctggaatgccacaaatgcaaatacttgtgcactgggagagcctgctgccaaatgctggaggttctcctgaacttgctgatcctggcctgcagctctgtgtcttacagttccacagggggctacacgggcatcaccagcttggggggcatttactactatcagttcggaggggcttacagtggctttgatggtgctgacggggagaaggcccagcaactggatgtccagttctaccagctaaagctgcccatggtcactgtggcaatggcctgtagtggagccctcacagccctctgctgcctcttcgttgccatgggtgtcctgcgggtcccgtggcattgtccactgttgctggtgaccgaaggcttgttggacatgctcatcgcgggggggtacatcccggccttgtacttctacttccactacctctctgctgcctatggctctcctgtgtgtaaagagaggcaggcgctgtaccaaagcaaaggctacagcggtttcggctgcagtttccacggagcagatataggagctggaatctttgctgccctgggcattgtggtctttgccctgggggcggtcctggccataaagggctaccgaaaagttaggaagctaaaagagaagccagcagaaatgtttgaattttaagggtttctaaaacgctctgacagatgcaagtggtggtggaaggtagtctgagccactgcctttcccaagaatcccttgttgtggaagtttccaatgctggaaaagcagcgagccagcgttggtgtggtgggcggagctcccagtcgcatggagcggtgttcatggatgcaacagaccctggcttctggagtcctctgtgagtgagggaccaatcaaaattatttttcaaaaagcaaaaaaatggccggcctcggcggctcacacctgtaaccccagcactttgggaggctgaggtgggtggatcacttgaggtcaggagctcgagaccagcttggccaacatggtgagcccccgtctctactaaaatacaaaaaaattagccaggcgtggtggcgggcgcctgtaatcccagctacttgggaggctgaggcaggagaatcgcttgaatctgggaggcggagattgcagtgagccgagatcccgccactgcactccagcccaggtgacagagcgagactccatctcaaaaaaaaaaaaaaaa

SEQ ID NO: 31045 - DNA, 3090 bp, Homo Sapiens
tttacaaaggccccgggcgcgagaggacgtgctctgccagccagtgggaaggcaggccgcgcgcgcgggagcgcgggaggatcggcggctcgcggtcactggtccctggctcggttccccgcaccccggggctcacacttacccgcgcggaggagcagcggccgggtgtccacccccatcctgcgcccagtctcctcgattcccctcgctctgagccgggagagccgaacagctgaagagagttcactgactccccagccccaggtgggccttgtgcacatcatgaccagttttgaagatgctgacacagaagagacagtaacttgtctccagatgacggtttaccatcctggccagttgcagtgtggaatatttcagtcaataagttttaacagagagaaactcccttccagcgaagtggtgaaatttggccgaaattccaacatctgtcattatacttttcaggacaaacaggtttcccgagttcagttttctctgcagctgtttaaaaaattcaacagctcagttctctcctttgaaataaaaaatatgagtaaaaagaccaatctgatcgtggacagcagagagctgggctacctaaataaaatggacctgccatacaggtgcatggtcagattcggagagtatcagtttctgatggagaaggaagatggcgagtcattggaattttttgagactcaatttattttatctccaagatcactcttgcaagaaaacaactggccaccacacaggcccataccggagtatggcacttattcgctctgctcctcccaaagcagttctccgacagaaatggatgaaaatgagtcatgaacacagaaagtctaagaggagaaatatgatggatgaagagctctgtagatgctgtatagacactaaataagagttgattagggtagtatattatagtcatctgttatgctgtgaaatttggaattcagtattatcattttgaagtctgtaaattgtgttagtcattaacttagtcacctgttgtattctggatctacacaaaattattttaactgctcttattaatctgtgaggattaatatacaaaaagtatcctttgagatgaagtcgtgttctcaaaataaggttatattattttctttttctgcttgattttcatcttgtgttttgctttgtttttgtaaggaaccatctcttggtttggtcacatcagttcacaacagccatttgttttcaaggtcaaggctccaggcaggttgttactggtgtttgcagcctgtcagtacttgcagtactggaataggttctaggctagtgtctgcgcgtcactgtggttttagcatgggaggacttatttgagaaatactaccttacttttctatgatttctttttacagagttatagtgtgtttactcctaagatgacagttctctttgtctatattcagcatctaagacaaatatttaaacattttaaagaaccactgtgttaagtttaggattatttacttaccaaattagaagtttgacttttatgtgttatacacaatcttaaaatttcacgaattcacctttttaatagtatccatgtacataataaaatcaaagtttaattagccattttctttgaatttttttctaaataagggaaataactgttcttgggccactttacagagataaatgtatgtgaatgtttatgataaacgcttaaatatttctaaaatattaacttcaaaaaagtctttttcagttcttaaataaaaatttatttatttaagatacttattcgacttatcttaactaaggtagctatgaatgttaagtagatgaggtaaccattcagttaagttaaattgtagcattgccaggtagtgaggctcactgtacaattttccaggtaaatgaaatttcctgtagtaagaggtccgtatttttgtaacagccttttaaaaatgcttttgggaaccctccagcctcttaccaaaagaggctttaaacctcatcttgattcagactgtcagtctattcctgggcagtagtatgtgatgtccagcaccctaaccccgactccccagccctgggactattccagtagagtgaaatatttgtccctgtacaaagtggcctgaatgactgttggagttcctgtgtctggttttcctgtttattccctgtgatgcccagagtaatggcccatccaaagatgtccagatgtccatgtgctagtctccagaacttgtaactgtgttgttatgtggcaaaggggaatgaaggctgcagatggaagtaaaatagattatgctggattatctgggtgtgcccaattgatcaccggatccgtaaaagtggaagagaggcagatcaggatgtcagcgtgatgaggtgtgagacagacttgacttgctgttgctgggaggaaggggaggtcatgagccaaggaatgtggacagtctcttgaagctggaaagtgtgcattggacatctggaagccagaaaagacaaagaaatatccagaaaggaacaaagtcttgtggacaccttgattttggtccagtgagaatatgtttgacttgttaacctacaaaactttatgatgataaatttgtgttggtcgtaagccactaaatcacagtaatttgttatagcagcagatagaaaactaatatactccctttaatataaggttatctactattgattctttctaggattttagcttctggtctgatgtgggtttacagccagatcacccggcttgaattgcttacagtgtgtagtctcatggtaaaggcgttctatgagtgaagtgtatatactttaatgtgtgtatactgtcacattttgactattttggaagactttcacctctgtttcttgtctttgaggctgatgaatgtgtttctaagttataaatttaatattaagggattcatgtattattgttattgaatccaaacaatgtgttaagtaatatttagggccagaaaaatcttgtacagaataatgatttctcctaatgtaaatcttggaaagggttttgttcaacttgagaaatattaaattttttattctaaaaaaaaaaaaaaaaaa

SEQ ID NO: 31046 - DNA, 850 bp, Homo Sapiens
cggagatggaggatttgctcgacttggacgaggagcttcgctacagcttggctacctccagggccaagatgggtcgccgagctcaacaggagtcagcgcaggccgagaatcacctcaatggcaagaattcctctttgactctgactggagagacttcctctgctaaattacctcgctgccgacagggaggctgggcaggtgattccgtgaaggcttcgaacggtacccaaacaggcaaacaacagctggatctgaacgcatgctatcacaaaacgcatcacagaaatttggggctggcttcattggaagaggcagatattcctatcattccggatctggaggaagtacaggaagaagactttgttttgcaggtggcagcccctcccagcatccagataaagcgggtgatgacctaccgtgacctggacaatgacctcatgaagtactcagccattcagacactggatggggagatcgacctgaaactcctcaccaaagtgctcgcgccggagcacgaagtccgggaggatgatgtcggctgggactgggaccatctgttcactgaggtgtcctcagaggtcctcactgagtgggacccactgcagacggagaaggaggaccctgcggggcaggccaggcacacctgagcccgtcacccatgctctagacatgaagaaatgcaatgagcttaaagctaaagaagcttgtaagcagctccgaatttttacctggaatattttgtaataaaaatatttatattcagtcaaccacattggataattcaattgcaataaattgcttattctgtgccatctcaaaaaaaaaaaaaaaaaaaaaaaaaaaaaaaaaa

SEQ ID NO: 31047 - DNA, 4556 bp, Homo Sapiens
tggccgccgcggctgccgctgctgctgaggcggaggccgcggaggccgcggaggcggaggccgaggccccggcgcagcggggcgcgccccgggcccaggcccggccccagccgccgctgcggagcccgccgggaccccccggagcgcggccacggcgcagccgctgccatggcccagacactgcagatggagatcccgaacttcggcaacagcatcctggagtgcctcaatgaacagcggctgcagggcctgtactgtgacgtgtcagtggtggtcaagggccatgccttcaaggcccaccgggccgtgcttgctgccagcagctcctacttccgggacctgttcaacaacagccgcagcgccgtggtggagctgccggcggctgtgcagccccagtctttccagcagatcctcagcttctgctacacgggccggctgagcatgaacgtgggcgaccagttcctgctcatgtacacggctggcttcctgcagatccaggagatcatggagaagggcaccgagttcttcctcaaggtgagctccccgagctgcgactcccagggcctgcatgcggaggaggccccatcgtcggagccccagagccccgtggcgcagacatcgggctggccagcctgtagcaccccgctgcccctcgtgtcgcgggtgaagacggagcagcaggagtcggactccgtgcagtgcatgcccgtggccaagcggctgtgggacagtggccagaaggaggctgggggcggcggcaatggcagccgcaagatggccaagttctccacgccggacctggctgccaaccggcctcaccagcccccgccaccccaacaggctccggtggtggcagcagcccagcccgccgtggctgcgggagcagggcagccagccggtggggtggcagcagcagggggtgtggtgagtgggcccagcacgtcggagcggaccagcccaggcacctcaagcgcctacaccagcgacagccctggctcctaccacaatgaggaggacgaggaggaggatggtggcgaggagggcatggatgagcagtaccggcagatctgcaacatgtacaccatgtacagcatgatgaacgtcggccagacagccgagaaggtggaggccctcccggagcaggtagcccccgagtcccgaaatcgcatccgggttcggcaagacctggcgtctctcccggctgaacttatcaaccagattgggaaccgctgccaccccaagctctacgacgagggcgacccctctgagaagctggagctggtgacaggcaccaacgtgtacatcacaagggcgcagctgatgaactgccacgtcagcgcaggcacgcggcacaaggtcctactgcggcggctcctggcctccttctttgaccggaacacgctggccaacagctgcggcaccggcatccgctcttctaccaacgatccccgtcggaagcccctggacagccgcgtgctccacgctgtcaagtactactgccagaacttcgcccccaacttcaaggagagcgagatgaatgccatcgcggccgacatgtgcaccaacgcccgccgcgtcgtgcgcaagagctggatgcccaaggtcaaggtgctcaaggctgaggatgacgcctacaccaccttcatcagtgaaacgggcaagatcgagccggacatgatgggtgtggagcatggcttcgagaccgccagccacgagggcgaggcgggtccctcggctgaagccctgcagtaacccgcccagcctcccgcggggccacacacttcccctcccaacacacacacacacctgccatcttggtcatgagctactgtctgtccctccccaggacccgcggtgggtgctgcatgttcccggccctctgcccctcctgtcctaccccctttccccaccgagagctgggccgggagaggaccgcagggcaggtggcgtgaggtccgtgttgccttctttaacacacactcgtgcagtgggggagttctggctccccaacctaacccctagccgtcatctccacactcaccaggcccaccaggggagggggctggcctgggggtcttgggaaggcccctccccaggccctaggccacctcgcggaagccttcagcctccgcccctcactgcagccccttgggacttgaggggggccccaggggttctcaggacccctcccaccacctcccagtgcttccacgtctccaaaagcgccttcctgtcaccctcgtctatccctgcgcctgggggctggggtaggcgaggccgtggggactacccattttatagctggggaaacaggctccgagaaattgcacaaccgacctcaggtggccggcagtggcgtgcctggtgccctttctcctcttccgcctctgttgctccctttggtcctctggggcctcagagaggcaggtcctaaaggagggggggtctcctgggggcagaccgagggtctcggaggatagaatgagaggtttccagggctggcagagtgtgtgcgtgtgtgtgtgcagaagttttgctttcaaacaaatgaagatacaagaggcagtaggacctgggttggaacccaggggagcagactggggggctgttgcccctccctccatctccccacacccaccccaccccacagcagggctcctggcccccacccccctgtacataatttttaaaacctttttttagcgaatgaaatattgaagtataagattccttttatttttcaaaccaatggggctgtgtctattgtccccctcggtccccaggggtggggggccttggaaggcagggcggtgttggggggctggggggcaggctgaatgtgtgtgtgtgggtgtgtatgtgtggagtgtgtgtgtgtgtttccatggtaggactccagtcccagctgctgcctaggctcctgtgggtcctgtgggtccccctcccctgttcaccttccccaacagggctatagtttaagggtgtcccaggccttggctggttggctgggcccagctcctgggggctgggcagggcagggcagggccgggtccacttccattgttagcagttgtttgcagaattttctcttttaccattcctctctttttgttctcgcccagagtgggtggttttttgttgttgttttagattttcatgtgaaggcagttttttttcttttttaactccccatccccctatgcagggtgtcatttcaccatccacatccacatccttgtttgtgtttctggccctcgtcctccctgcctctcatctgcctccccaacccccacctacccactgctcccaggggtctctccaggggcagggggattttaggagatggggtgggggccagcccctactggacccttgtaatctgatttggagaccatccccccgatgggaccagcagccccgccggcccactgggggtccctcttaacatctgcttgttgcgggggtcagtcatgagtgccagggtctggctggggtcttggcactgtcttcctggccggggcctgaaaccttagcccccagccggcctgagtgggggatattgacacccccagctaaagcacaagcaccttagtcacccctcctctccccccgcctcctggcctgccaccccaccccagcgtttaccccaaagcacaatgccctggtcacttggcaagcggctgggcctgacggaggccgaggggcagaccggggctccagccagacccctgaaaggaaggtgctcccccacttccaggccttagttggggtgggggggccagctcctgggcctggggtcttctcacccccacccccttgtcctgggtaggcccctgcctgcccctctctgccttttcctcgggtgtccctcctcgagcccctgtggcattggcttgggtggcagagcccacttgtttcagggaccccaggaggtgccccctggctcccaggactgtgtgtgggtccggggggtgggggggtggggagaagggtcgggcagggggtgcaggggaggaaactcctcaccaggagagccaaagacagggttgtgccttaccccaggagccacccctgtaccccccttgccctgccattcaccctccacccctacccctgggcggcctgctgctttttccttctcttcctcccctgccctgagctgcatggttcccccaccctgggcagccaggaaggaatctgaatggagaatcaccaaccaccagagaaaaaagactgtggggccctcccctgccaactccccttccctggccgcccactcaacccacacctctttcacgcaggacaggctgcccaccctgtccacgtgaagtgccaacgccctccccaccctgggccgagcccccacccctccctgggcccccaagtgagattgcacatttaactactgtaaggagaggagcggcgttggcaaatgtgaaccatgagaatatcagtgatactgatgagaataaactaaacgcctttgtaacaaaaaaaaaaaaaaaaaaaaaaaaaaaaaaaaaaaaaaaaaaaaaaaaaaaaaaaaaaaaaaaaaa

SEQ ID NO: 31048 - DNA, 3261 bp, Homo Sapiens
ctgccggcccgcggagccgcgtccccccgggcagccccgggcccctgccctatgtcccgcaaggcaagcgagaatgtggagtacacgctgcggagcctgagcagcctgatgggcgagcggcgcaggaagcagccggagccggacgcggcgagcgcggccggggagtgcagcctcctggctgccgccgaatcgagcaccagcctgcagagcgcgggcgcgggcggcggcggcgtcggggacctggagcgcgcggcgcggcggcagttccagcaggacgagacccccgccttcgtgtacgtggtggccgtcttctccgcgctgggcggcttcctgtttggctatgacaccggggtggtgtcaggggccatgctgctgctcaagcggcagctcagtctggacgcgctgtggcaggagctgctggtgtccagcacggtgggggcggctgccgtctcggcgctggccggaggcgccctcaacggcgtcttcggccgccgcgctgccatcctcctggccagtgccctcttcaccgccggctccgcggtgctggctgcggccaacaacaaggagacactgctcgccggccgcctggtcgtgggactcggcatcggcattgcttctatgacagtgccagtgtacattgcggaggtctcaccacccaatttaagaggccgattagtcaccattaataccctcttcatcacaggagggcagttctttgcaagtgttgttgatggagccttcagttatctccagaaggatggatggaggtacatgttgggacttgcarcagttccggcggttatacagttttttggctttctctttttgcctgaaagccctcgatggcttattcagaaaggacagactcagaaggcccgtagaattttatctcagatgcgtggtaaccagaccattgatgaggaatatgatagcatcaaaaacaacattgaagaggaggaaaaagaggttggctcagctggacctgtgatctgcagaatgctgagttatcccccaactcgccgagctttaattgtgggttgtggcctacaaatgttccagcagctctcaggcattaacaccatcatgtactacagtgcaaccattctgcagatgtctggtgttgaagatgatagacttgcaatatggctggcttcagttacagccttcacaaatttcattttcacacttgtgggagtctggcttgttgagaaggtgggccgcagaaagcttacctttggtagtttagcaggtaccaccgtagcactcattattcttgccttgggatttgtgctatcagcccaagtttccccacgcatcacttttaagccaatagctccgtcaggtcagaacgccacttgcacaagatacagttactgtaatgaatgtatgttggatccagactgcggtttctgctwcaagatgaacaaatcaactgtcattgactcctcctgtgttccagttaataaagcatctacaaatgaggcagcctggggcaggtgtgaaaatgaaaccaagttcaaaacagaagatatattttgggcttacaatttctgccctactccatactcctggactgcacttctgggccttattttatatcttgtcttctttgcacctggaatgggaccaatgccttggactgtgaattctgaaatatatcccctttgggcaagaagtacaggaaatgcatgttcatctggaataaactggattttcaatgtcctggtttcactaacatttttacacacagcagagtatcttacatactatggagctttcttcctctatgctggatttgctgctgtgggactccttttcatctatggctgtcttcctgagaccaaaggcaaaaaattagaggaaattgaatcactctttgacaacaggctatgtacatgtggcacttcagattctgatgaagggagatatattgaatatattcgggtaaagggaagtaactatcatctttctgacaatgatgcttctgatgtggaataattttcagctgctcatatatttagttatttaaacaaactggggggagaagaacagcaattggtgacttcactgccctgcttctaatctggttctttccacagcctagttttgattgacttcatattctagaatacttgattaggaggaagatacaaccatgatgactttttttttccacaaggaacaatattttaaaaaatatttacagagattttaatctaataattcttaagcaaatgtgtgtaatgccttcctgaaatagtctaaaatgaatattgtacccagtgacttcagtggtatccttttttcctaagaccatttataattattagtggcaacagagtcagtgctaatctagccaaattacatatgtataatatatttataaaggattctgggagatggtccaagggtgttctgtgtcaaaagatggcctattggccctcagttttcctacagagtagtggcttatctctgatcagctgttacaaactaaattccatgtaagctttcatcaacaaattccaaagtgcctcctacaagggcacagctgtccgtatctcctttggattccatatttttgtttctctccaattcagatattgggagttcttcagatactgactctgcacactatcttttgaacattatgaaaatataatctgtcgggttgttttcatacttcctttttttgcatcagtgataaggcatacatttgcgcagatgagctaggaagttttgagaagtaccttttatgttcagaaagtaacagattaaaggtttttatgggttccaaattggttagtcacttaggtatgcaattataaatgcaaaatagtgccagatctttaactgtatatcagggtcagtttttgttcatgcccaaatcactacaccttcctcattggccttggagtcctactattttgtgccttcatttgtgttacatacatagctgcaagcaaaccatttttcccctttcttttattcaaacaataatttttgaaacaaaaaagaggaaggaaatcagtggcagaaataatcctgctgttattggtgtttgtttaataaaaataatgggacttttttcttaactttttattagctcttcctaagggaaatgtcacatattattatttaattgtacttgtctttttttactttaagagcataaactcgtttttattttgcacacttttctcattttcctgagaatttaccagaaaaaaaaagatacatagatttgtctctgtgtttttctta

SEQ ID NO: 31049 - DNA, 4214 bp, Homo Sapiens
ggcagcggcgcttcctgctaggaccggccggggccgtaccggaggctcgggctccaccgaccctcctcccaccccctcccactcaccctctgggccgcgactgcgcagggcggggccggccgaaccatgggccgcggtgtgggctaagctggtggccccggctttagactggaccccacaatgtttgcagagatgttcaggcacgcgggagctgattacacacaatgaatgggggcaatgagagcagtggagcagacagagctgggggccctgtggccacatctgtccccatcggctggcagcgctgtgtgcgagagggtgctgtgctctacatcagtccaagtggcacagagctgtcttccttggagcaaacccggagctacctcctcagcgatgggacctgcaagtgcggtctggagtgtccacttaatgtccccaaggttttcaactttgaccctttggccccggtgaccccgggtggggctggggtggggccagcatcagaggaggacatgaccaagctgtgcaaccaccggcggaaagctgttgctatggcaactctgtaccgcagcatggagaccacctgctcacactcttctcctggagagggagcgagcccccaaatgttccacactgtgtccccagggcccccctctgcccgccctccctgtcgagttcctcctacaactccacttaatgggggtcctggctcccttcccccagaaccaccctcagtttcccaggcctttcccactctagcaggccctggggggcttttccccccaaggcttgctgacccagtcccttctgggggcagtagcagcccccgtttcctcccaaggggcaatgccccctctccagccccacctcctccacctgctatcagcctcaatgctccctcatacaactggggagctgccctcagatccagcctggtgccctctgacctgggctctcctccggcccctcatgcctcctcctcaccaccttcagaccctcctctcttccactgtagtgatgccttaacaccccctcccctgcccccgagcaataatctccccgcccaccctggtcctgcctctcagccaccagtgtcttcagccactatgcacctgcccctggtcctggggcccctgggaggggcccccacggtggaggggcctggggcaccccccttccttgctagcagcctactctctgcagcggccaaggcacagcatcccccactaccccctcccagcactttacagggccgaaggccccgtgcccaggcaccctcagcttcccactcctcatcacttcgtccctctcagcgtcgtccccgcagaccccctactgtatttcgattgctagaagggagaggccctcaaacccctagacggagccgtcctcgggcccctgctcctgtcccccaacccttttctctcccggagccatcccaaccaattctcccttctgtgctgtccctgctgggactccccacccctggcccttcccactctgatggaagctttaaccttttggggtcagatgcacaccttcctcctcccccaaccctctcctcagggagccctccccagcccaggcaccccatccagccctccctgcctgggaccaccagtggcagcctcagcagtgtgccaggtgcccctgccccaccagctgcctccaaagccccagtagtccccagccctgtgcttcaaagcccatccgaaggactggggatgggggcaggcccggcctgccctctgcctcccctggctggtggagaggctttccctttccccagccctgagcagggcctggcactgagtggagctggcttccctgggatgcttggggccttgcctctccctctgagtctggggcagcctccaccttctccattgctcaaccacagtttatttggtgtgctgactgggggaggaggacaacctccccctgagcccctgctacccccaccaggaggacctggtcctcccctagccccaggagagcctgaagggccttcgcttttggtggcttccttgcttcctccaccaccctcagaccttcttccacctccttcagcacctcccagcaacctccttgcctctttcctgcccctgttggctctgggccccacagctggggatggggagggatctgcagagggagccgggggtccaagtggggagccattttcaggcttgggagacctgtcccccctacttttccccccactttcagccccccctaccctcatagctttaaattctgcgctgctggctgccaccctggatcccccctcggggacacccccccagccctgtgtcctgagtgccccccaacctggaccacctacctccagtgtcaccacggcaactactgacccgggggcctcctctctgggcaaggccccctccaactcagggagacccccccaactccttagccctctgctgggtgccagcctgctgggtgacctgtcttcactgaccagcagccctggagccctccccagcctgttgcagcctcctggccctcttctctctggccagttggggctgcagctcctccctggggggggagctcctccacccctctcagaggcttctagtcccctagcctgcctgctacagagtctccagatccctccagagcagccagaagccccctgtctaccccccgagagccctgcctcagccctcgaaccagagcctgccaggcctcccctcagtgccttagccccaccccatggttctcccgaccccccagtccctgagctgctcactgggagggggtcagggaaacggggccggaggggaggagggggacttaggggcattaatggtgaggccaggccagcccggggccgaaagcctggcagccggcgggagcctggccgactggccctcaaatgggggacacgtggtggcttcaatggacaaatggaaaggtccccaagaagaacccaccattggcagcataatggggagctggctgaagggggtgctgagcccaaggatccaccccctcccgggccccattctgaggaccttaaggtgcccccgggagtagtcagaaagtctcgtcgtggccgtaggagaaaatacaaccctacccggaacagcaatagctcccgccaggacattaccttggaacccagccctacagcccgagcagctgtccctctgcctccccgggcccgccctggccgtcctgccaaaaacaagaggaggaaactggccccatagcagccatacctggagctggatctgaccctgattggggagagctgagtgctgagccttgggagcccctgccagccacctgcacctgtggacagtgggtgggggcactactccccactcagagcacaaatgcaactccttcccctacaatcccatcctgagccattgcagggggcagggaagttcacccccccccaccacccccccgcccccccgaagccatgtcactgaaaaggcctgggggggatggtatatggccctttccccaccaggcgctaaggggaacacccccttccccaggtcttttatttgtttaagttatttttgcacaaatgactcttttatatttaattcgatttcattgcctcccttcttaaagccaacaggctcagtttacaaacctgtgagctactgttggctgctgccctccttcccagtgaaaggtacaaagcaataagcatcatgcatcctccccttacccctccaacacccctctgcctctggctcaggttgctcaaagcacagatcctctcttaccccgtccccaggtttgaaacacatagcctcatttcaaggtgtagccaggttcccccgactttcctctgggatataaaaaagggggtaagggggcaaagagagccctctgggcctctcctcccatacacactacactgccccttctccccccatcaaaacgctcagagacgttgtgatgatgcgactgaggattatgcaacgtggtccaaccggagcggccagcatgaccagctgtccaggggctgcctcctgccttttcttttgtaaagacaagacccttgggagttttaattctgttttgtacttgccctgtggggcctccactgcttttctatgggagacactcttaatttaacagatgagaatattttgaaactctgaaaaaaaaaaaaaaaaaaaaaaaaaaaaaaaaaaaaaaaaaaaaaaaaaaaaaaaaaaaaaaaa

SEQ ID NO: 31050 - DNA, 4222 bp, Homo Sapiens
acggcggcgccgagtctgcgggtcctcccgccagcccggccggaggcagccgaggccgctcgggcggcggcggcggcggcggcgggagccggagcgcatctcgcccaggagccggagcagcggcactgcctgaaccagacagcagccttgggtgcaggcgtggtcatgagggcagatggacactgctgaagacccggcctggctccagctgcttcaaaaggattccagccccccaggaccccgacccacagccttcttctgcccacaggatgggagcctgggggctggcagctcggctatgagggattactgcccctcccagcaaaaggcaagccctgcaccccccaggcacacccctgaccaaagcccaggcatggagtctagacacagaagccccagtggggctggggaaggggcctcctgctctgacggccccagagggagcctggcctgcccctccccaacctgcttctctccccaggagtcaccctccaaggagacattggaggcacatggagcctccatctcagggacaacagaagccaccacgtctgggaagccagagcctgtgtcctccgtgaaaactgagcccaaatcctcagatgacagaaatcccatgttcttagagaagatggatttcaagtcctcaaagcaggccgattccacttccataggaaaggaggatcctgggtcctcacggaaggcagatcccatgtttacaggaaaggcagagcctgaaatcttgggaaagggggatcctgtggctcctggaaggatggatcccatgactgtaagaaaggaagatcttggatccctgggaaaagtagatcctttgtgctccagcaagacgtatacagtgtcaccgaggaaggaggatcctgggtctttgagaaaggtggatcctgtgtcctcagacaaagtggaccctgtattcccaagaaaggaggagcccaggtattcaggaaaagagcatcctgtgtcctcagaaaaggtcgctcctacatctgcagaaaaggtagatcttgtattgtcgggaaagagagatcctgggccctcgggaaaggcagatcccgtgcccttggaaagcatggattctgcgtccacaggaaagacagagccggggctcctgggcaagctgattccaggctcatcaggcaagaatgggcctgtatcctctgggaccggggctcctgggtccttgggaaggctggatcccacatgcttggggatggcagatcccgcatctgtgggaaatgtagaaactgtgcctgccacaaaagaggactcccggttcctgggaaagatggaccctgcctcctcaggagaggggcgtcctgtgtctggccacacggatactacggcttcagcaaagacagatctcacatctttgaaaaatgtggatcccatgtcttcaggcaaggtggatccagtttctctgggaaagatggaccccatgtgctcaggaaagccagagctcttgtctcctggacaggcagagcgtgtgtctgtgggaaaggcaggaactgtatccccaggaaaagaggacccggtgtcctccagaagggaggaccccatatctgctggaagtagaaagacatcatctgaaaaagtgaatcctgagtcttcaggaaagacaaaccctgtgtcttcaggtccaggcgatcccaggtccttggggacagcaggtcccccatctgcagtaaaggctgagccagcgacagggggaaaaggagatcccctgtcctcggagaaggcaggtctggtggcctctggaaaggcggctcccacagcctcagggaaggccgagcccctcgcggtgggcaaggaggaccctgtgagcaagggaaaggcagacgctggcccctctggacaaggggactctgtgtctataggtaaagtggtctcaactccaggaaaaacagtcccggtgccctcggggaaggtggatcccgtgtccctgggaaaagcagaagctatcccagagggaaaagtgggttctctgcctctagagaaggggagtcctgttaccaccacaaaggcggatcccagggcctcggggaaagcacagccgcagtctggtggcaaagcagaaacaaagctccctgggcaagagggcgctgcagcaccaggagaagcaggggctgtgtgtttgaaaaaggagacaccacaggcctcagagaaggtggatcctggatcctgcagaaaagcagagccccttgcctcagggaagggagagcctgtgtccctggggaaagccgactctgcaccttccagaaaaacggagtccccatccttggggaaggtggtccccctgagtctggagaagaccaagccgtcctcctcctccaggcagttagaccgcaaagccctcggctcagcccggtctcccgagggtgccaggggcagtgaaggccgcgtggagccgaaggccgagcccgtgtccagcaccgaggcctccagtctcggccagaaagacctggaagccgctggggccgagagaagcccctgcccagaggccgcagcgcccccgccggggccgcggactcgcgacaacttcaccaaggcgccgtcgtgggaggcgagcgccccgccgccgccgcgcgaggacgcgggcactcaggcgggcgcgcaggcctgcgtctcagtggccgtgagccccatgtctccgcaggacggcgctgggggctcggccttcagcttccaggcggcgccgcgcgcgcccagcccgccctcgcgccgagatgcgggcctgcaggtgtcgctgggcgccgccgagacgcgctcagtggccactgggcccatgacacctcaagccgccgcgccgcccgccttccccgaagtgcgggtgcggcccggctcagcgctggcggccgctgtagcgcccccggagccggctgagcccgtgcgagacgtgagctgggacgagaagggcatgacgtgggaggtatacggcgccgccatggaggtggaggtgctgggcatggccatccagaagcatctggagcgacagatcgaggagcacggccgccaaggggcgcccgcgccgccgcccgccgcccgtgccggccccggccgttcgggctcggtgcgcaccgcgcccccagatggcgccgccaagcgtccgcccggcctgttccgcgcgctgctgcagagtgtgcgccggccgcggtgctgctcgcgggcgggacccacggccgagtgatctgcccccattttgtacgcccgagtttccgaccttctcaggctcccttcttgatcacaggcccctagaaggggtcccctctgcgtgccacaggcctccgaggggttgtgcagcctctagggctgttgcgtccccgtctttccagcccctcccatcacaaatacagaagaaccccttctaccaagctccctcgtggccacgaggccacgaacccggccagccctgacgccccactgtcccctcacagccctcagctctactcccggtcacactgggcgaccacgggggcctgctcagcaccctcacctcccaccccctgagagctggggcaggctcctgagatgtctagactggtgcgttgtggtctccggtggggccagatccccagaacagggagagactgcatacaagtctgagtggcagaagcttcaagtgggtgaggatcggtgtgtgagacccgcgagtgggcacgtctctgaatgtgaggtctcgggcagcacgtgaggtagaacgagtgtgagcgtctccacgcagtggctggccccgtggccggggcgtctcttgcatgctgttggtggtccttccccagttcctatctcccacccgcctggttccagccccatcccctctcccactgagtcacaggtttgagattcccagagaggccaaagacagctacaggaagtaccctgggggctcagctgagagagagtcacagaaaggccagagggtctcaggaaggtctggaggtcacagctgggctcacagaagctcttgggccctggcatcctgggtgaccggtgttcttgggtattggggacaggacagagagctcattctataaccacagttgtcttttaaaggccaccctctccagccccttgtcccccctgtgctgtgagcccaagtcccttgtgaccactcagtgtcccgtccccacccctccagccgcagtttttggctacaaactgtcacagtatacattggtaataaaatatttccccaaaaaaaaaaaaaaaa

SEQ ID NO: 31051 - DNA, 3830 bp, Homo Sapiens
gggcgcgcgctgcaggagcgcggaacatggcgcggcacgggccaccgtggagtcggttggacgcgcagcaggagcgcgacgtgcgggagctcgtccggggtgtcgccggcctccaggacgaggcagaccccaacttccagctcgccctaaacttcgcctggtccaacttcagatttcatcgtttcttggatgtcaacagccacaaaatagaaaaaacaatcgaaggaatttatgaaaaatttgtcattcattctgatctaagcaaagctgctagttggaagagattaacggaggaatttctaaatgcaccacttcccagtataaaggaaataaagacagatgcacattattccatactgtcacttcttctgtgtctgtcagactctccttcaaacagcagttatgtggagacaccaagaaataaagaagtggaaaagaaagatgatttcgactggggaaaatacttgatggaagatgaagaaatggacattggtccgtacatggacacaccaaattggtctgaagaaagtgaagaggaaaatgatcaacagcccttaagcagagaggactctggaattcaggtagacaggacaccgttagaagaacaagatcaaaacggaaaactggatccttgtatcagttggaaagatgagccagatgaccgaagctggctggaacatcatgtggtccatcagtactggacagccaggccctcccagtttcctcatagtttacatttgcactctaatttagctgctgtctgggaccaacacttgtacagcagtgatccattgtatgttccagatgacagggttttggttactgagactcaggttattcgggaaaccctatggttactttcaggagtgaaaaagctctttatatttcagttgatagatgggaaggtaactgtgagaaacaatattatagtaactcatttaacacatagctgtttacgatctgtgctggaacaaatagcagcatatggccaggttgtgtttcgactccaggagttcattgatgaagtcatgggacacagttctgagagcatgctgcctggaagtgggtctgttcctaagaagtcaactgaagctccctttagaacctaccaggctttcatgtgggccctgtacaaatatttcattagtttcaaagaggaacttgcagaaattgagaagtgcatcatcaataatgatactacaataactcttgcaatagtggtggacaagttggcacctcgattgtctcagctcaaggttctgcacaaagtgtttagtactggagtagcagaagttccacctgatactcgaaatgtcgtccgggcctctcacctgcttaacaccctgtacaaggccattcttgaatatgacaatgttggagaagcctctgagcaaaccgtctccctccttttctctctctgggtggaaacggtgcggccttacctgcagacggtggacgagtggatcgtgcacgggcacctgtgggatggcgccagggagttcatcatccagagaaacaaaaatgttccagttaatcacagagacttctggtatgcaacttacacgttatatagcgtatcagaaaagacagaaaatgaagaaaaaatgagtgataacgctagtgcgagttccggcagtgaccaggggccctccagcaggcagcacaccatggtgtccttcctcaaacctgtcctgaagcagatcataatggctggcaagtcgatgcagctgctgaagaacctgcagtgtgcggagagcaccacctgccaggcaggagccagagatgcagaaagaaaaagtttatacactctctttctggaatctgtacagtcccgtcttcgacatggagaagattccactccacaggttcttactgagcaacaggcaaccaaggagaacctgatgaagatgcagtccattgctgaaagccatcttgaactggatgatgttcatgatccactgcttgccattaactttgcaaggatgtatttggagcagagtgactttcacgagaagtttgctggtggtgatgtatgtgtggatagatcatcggaatctgtgacatgccagacttttgaattaacgctgagatcctgcctctatcctcatattgacaagcagtatctagattgctgtggaaatctcatgcaaactctaaaaaaagattacaggttggtagaatacttgcaagctatgaggaattttttcttaatggaaggaggagataccatgtatgacttctacacgtcaatttttgataaaataagagaaaaggaaacatggcagaatgtgtcttttcttaatgtccaactccaagaagcagtaggacagcgttatcctgaagatagttcacgtctatctatatcttttgaaaatgttgacacagctaagaagaagctgcctgttcatatcttagatggtctgaccctcagctacaaggtcccatggcccgtggacattgttataagtttggaatgtcaaaaaatttataatcaagtgtttcttctcttattgcaaataaagtgggcaaaatatagtctggatgttttactttttggtgaactggttagtactgcagaaaaaccacgacttaaagaaggccttatacatgaacaagacacagttgctcagttcggaccacaaaaagaaccagtaagacagcagattcatcgcatgttcctcttaagagtgaagctcatgcatttcgtgaacagcttgcacaactacatcatgaccaggattctacacagtacagggctggagtttcaacatcaagtcgaggaagccaaggatttagatcaattgattaaaattcactataggtatctgtcaaccatccatgaccggtgtctgctgagagaaaaggtcagctttgtgaaagaagctatcatgaaggtgttgaacttggctctcatgtttgcagacggttggcaggcaggcctgggcacttggcgaatggaatctatagagaaaatggaatctgattttaaaaactgccatatgtttcttgtaaccattttaaacaaagccgtctgtagaggatcctttccccatttggaatctctagcgttgtcactcatggctggcatggaacaaagttaaatgtcttcagcgtaataaatatctccgactttgtcatcatacatgtacatttccaccatgtgcagctgaaaagtgaaaatatttttattttggtttatttgtaaaacttgtccacagtcagcctggcacagtcgctcatgcctctaatcccagcacgatgggaggccaagacaggcagatcacttgagcccaggagtttgaggccagcctgggcaacatggtgaaacccggtgtctaccaaaaatacaaaatgtatccagacatggtggtgtgtacctgtagtccaagctactcaggaggcaaagatgggaggattacttgagcccaggaggtcaaggctacagtgagccatgattgcactactgcagtgcaacctgggtgacagagtgagaccctgactcagaaagaaccacttgcccacagtccagacagatggattgtaggtgggttttctggagattagtagatactgtatagagttgtatacataaaattgtgtcagtagtacaaagtgtatataggctgtttactcttacatttcctactgtaagatacagatttatggtactgatacctttaaattatatcatattttgaaaatgtaattactgatattcaaaataaattaaaggacttaaaatcaaaaaaaaaaaaaaaaaaaaaaaaaaaaaaaaaaaaaaaaaaaaaaaaaaaaaaaaaaaaaaaaaaaaaaaaaaaaaaaaaaaaaaa

SEQ ID NO: 31052 - DNA, 5344 bp, Homo Sapiens
cgcctgggcgcggcggagggcggggagccgggcaggtcgcgcctgcgggcggcagccgaccgccgggagctgttctgatttccgacgcgcacgctaggggcccggagcagcccccggccccggcgcgccgccgacatgggcaacgcagggagcatggattcgcagcagaccgatttcagggcgcacaacgtgcctttgaagctgccgatgccagagccaggtgaactggaggagcgatttgccatcgtgctgaacgctatgaacctacctcctgacaaagccaggttactgcggcagtatgataatgagaaaaaatgggaactgatttgtgatcaggaacgattccaggtgaagaatcctccccatacatacattcaaaagctcaaaggctatctggatccagctgtaaccaggaagaaattcagacggcgtgttcaagaatctacacaagtgctaagagaactggaaatttctttaagaactaaccacattggatgggtcagagaatttctgaatgaagaaaacaaaggtcttgatgttctagtggaatatctctcatttgcacagtacgcggtaacttttgactttgaaagtgtggagagtactgtggagagctcggtggacaaatcaaagccctggagtaggtccatcgaggacctgcacagagggagcaacctgccctcacctgtgggcaacagtgtctcccgctctggaagacattctgcactgcgatataatacattgccaagcagaagaactctgaaaaattcaagattagtgagtaagaaagatgatgtgcatgtctgtatcatgtgtttacgtgccatcatgaattatcagtatggtttcaacatggtcatgtctcatccacacgctgtcaatgagattgcactaagcctgaacaacaagaatcccagaacaaaagcccttgtcttagaactgttggcagccgtttgtcttgtcagaggcgggcatgaaatcattttatcagcatttgataactttaaagaggtttgtggagaaaaacagcgctttgagaagttgatggaacatttcaggaatgaagacaataacatagattttatggtggcttctatgcagtttattaatattgtagtccattcagtagaagatatgaatttcagagttcacctgcagtatgaatttaccaaattaggcctggacgaatacttggacaagctgaaacacactgagagtgacaagcttcaagtccagatccaggcttacctggacaatgtttttgatgtaggagctctactggaagatgctgaaactaagaatgctgccttggagagggtggaagaactggaagaaaacatttctcatttatctgaaaaactgcaagacacagagaatgaagccatgtccaagattgtggaactggaaaagcaactcatgcagaggaacaaggagctggatgtcgttcgggaaatctacaaagatgcaaatactcaagttcacacattaagaaaaatggtcaaagaaaaagaagaagcaattcaaagacagtctaccctggaaaaaaagattcatgagctagagaaacaagggaccattaaaattcagaagaaaggggatggggatatcgccatactgccagttgtggcttctggcacattgtccatggggtcagaagtggtagcaggtaactctgtgggacccacaatgggggccgcttcctcaggacccttgccccctcctccaccaccactgcctccctcatcagacacacctgaaacagtgcaaaatggtccagtaacaccacctatgccaccgccgccgccgccaccccctcctccacctcctcctcccccaccgccccctccccctcctcctctcccaggccctgcatctgagactgtaccagctcctcccttagcacctccccttccctctgcacctccgctgcctggaacatcttcacccacagtggttttcaactcaggattagcagctgtgaaaattaagaagccaatcaagacgaagttcagaatgccagtgtttaactgggttgctctgaagcccaatcagatcaatggcacagtcttcaatgaaattgatgatgagcgaattctggaggatttaaatgtggatgaatttgaggaaatattcaagacaaaagcccaaggacctgccattgatctttcttcaagcaaacagaagataccacagaagggatcaaacaaagtgacattactagaagcaaacagggccaaaaatcttgccataactttaaggaaagctggaaagactgctgatgaaatatgtaaagctattcatgtatttgacttgaagacactgcctgtggactttgtggaatgcttgatgcggttcctaccaactgagaatgaagtgaaagtgcttcggctctacgagcgggaaaggaagcctctggaaaacttgtcagatgaagatcggttcatgatgcagtttagtaaaatcgagaggctcatgcagaagatgaccatcatggccttcattgggaactttgctgaaagcattcagatgctgactcctcaactacatgcgattatagcagcatctgtctctataaagtcgtcccaaaaactcaagaaaattctggagatcatcttagcccttggaaactacatgaatagcagtaaaagaggagcagtttatggatttaaacttcagagtttagatctgctcttagatacaaagtcaacagacagaaagcaaacactgttgcactatatatccaatgtggtgaaagaaaaatatcaccaagtgtccctgttttataatgagcttcattatgtggaaaaagctgctgcagtctcccttgagaatgttttgctggatgtcaaggagctccagaggggaatggacttgaccaagagagagtacaccatgcatgaccataacacgctgctgaaggagttcatcctcaacaatgaggggaagctgaagaagctgcaggatgatgccaagatcgcacaggatgcctttgatgatgttgtgaagtattttggagaaaaccccaagacaacaccaccctctgtcttctttcctgtctttgtccggtttgtgaaagcatataagcaagcagaagaggaaaatgagctgaggaaaaagcaggaacaagctctcatggaaaaactcctagagcaagaagctctgatggagcagcaggatccaaagtctccttctcataaatcaaagaggcagcagcaagagttaattgcagaattaagaagacgacaagttaaagataacagacatgtatatgagggaaaagatggtgccattgaagatattatcacagatcttagaaaccaaccatacagacgagccgatgcggtgaggagaagcgtcaggcggcgctttgatgatcagaacttgcgttctgttaatggtgccgaaataacaatgtgaacctgagactggcctgcatgaatacagggtgtgcgtgaatgaaactgcccacatgaactttatgtgctacgatttaactgcagccttgaacacacacaaaaatattcttaagggctcagatttagcaaacacggaagaattttaaaatgagctctcctttcaacccttgttaacaagtgcctaaaaatggaagtacctgttcagattaatcaaagcaataggatttgatttgattaggtatctttttacaccagtatgttatttttaaccaaaatgtaaagttcttattaaactcattacctgccattgtgattgtcccatcatggcccacctggtttcctgatgttgtaaataacatcaatgcatctgctgtgggtcctttgctgagatgtcttcgaaggaattttgttttagccatatccatcaactttgtattttacttgcaatttggaagaaggaaagtcacatgatgaaactccttttgtctataaccaggccctggcaaagtgcaaacaggatgcaactgcagtggcacaaaggtcactcaatcctttgtttccagtttcacattctactacttctgcgctagagaacgatgctctgtgagaggcattcactagtatgaatgtggggatatagtgtataagacttatttgcagtactgtgttcttcagctagaggcagctttttaaataatgcaagtgtatttattagcattaaaattaacatctcagtaatcagcattagcatttctgaggaccattattaattctgagaacagaaattggtgccttgcaaggaagtttactagctctatcaacaagcattcaaggttacatctgctagcagagtagtgttaggaacctggccttactctcctctgacaatcgcaattttttcttattttttataaattcaagaagatacacttggcatcgtgtatcgaggctaagtttttcatgcatttcccagactacttatggagaattgcagtttaagttgctgaaaagtattaacatggtattaagcttaaataatacgtaatgggactagatggcccactaagccactgttattttccttcctctctggcagggcacttgatccattccaaagtcaaaaactggactgaagctaaatttgtacttttcataatatacattctgcttctggcttatcttcttggtacatcaatatattaattgtaaagtttattgtatagtatttaaccgctgaagttcctattttatgttgtgcttatgtgaaccccttggtgaaggtcccttttccttggatgtgtagttatatgatctttttaaatgtacagatattttgctataaaatcggtgcagttttttatggtttttacacttctctttaattcccacctaagcctctgggtaatattgtaaatattgttttaaaatgcatcagcctatgctatacaatctgaatgttattttaacttatagttttttttaatatatatatttaactataaggacagtttagggaacaagttacctaccacatttcactttagtgtacctatttacagaaagattaaactgccacctgcgggcacattcccataaatgtgtactttactttaaaaagaacatgccacgattttgtctttctgtggactcaacattcacttcgattaaaaatagcaatttgaccaagttggacttccactacaaagcagctgttttccaaagttcaatgctgacatatatgtatattaaaataattgcctatttattaatctacaaatagacaacgttggcatgttcttttctgtttgtctattaatgggcctgcttcttagcaatattagaatgttttataaaagcaattcatgttacttttctggtcttttcatggcatatgagcaaataataaactatttacactactattctgt

SEQ ID NO: 31053 - DNA, 4435 bp, Homo Sapiens
ggcgatccgctggcgctagtctgaccctccgccaggcaaaaggaagattgtctttggctatagagtttttttttttaaagattactaaacatacaggaagtgataagaagtatcattcatcagaagcatcattcatcaatcaacttgaagaaaaaggtgatatattatttctttaaggtgctgtgtgatgtgttaagagcatattagaaggaatggttttgtctaattttcttcatgagttatggtggctgagacatcgagtctatattttggggcaaaaactaaacggcagcacaaaaggaaatctatattaatagaatattttgttgaacaaaggaggttagataagaactgcaaaccaacagactcagcaaacaaggaaagaaacgtgttagccataagacatgtttcaagtgaatcgaagtccaataactgtagacttcagaagaaaaaagttttcaaaaattttatcaaaacaggtcactgataaataactcctccagtaatagagctaggcctgaaaccaaaattaattaaaaaattaacaaaacagattgaacctgaattaaatttcttttgataaaaaaacttattaaaaataatcaaaattttcctcaaatttttattaccttgtccaaagtaaagcaagtgtcttttagcattcatgccagcttttctcatgttctaggaatgacagaaaccttacttgaagcaaactagtatttttgttgaaaatgtatatcagcatcagttaaagttgatttttcagacctgctcctcagtaataatactagctagtcagcattcacgcctaccaggacacaaaaatcctcttcaaaactactcagaaaagaaagtcattactcaggaatgatgtccattcaggagaaatcaaaagagaattcctccaaagttactaaaaaaagtgacgataagaattcagaaacagaaattcaggattctcaaaagaatctagcaaaaaaatcaggtccaaaggagactataaaatcacaggctaaatcttccagtgaaagtaaaataaatcagccagaattggaaacacgcatgagtacaaggtcatcaaaggcagcatctaatgataaagctactaaatccattaataaaaatacggtgactgtgaggggatattcacaagaatctacaaaaaagaaattatctcagaaaaaattagtacatgaaaaccctaaagcaaatgaacagcttaaccggagatcacaaaggctacaacaattaacagaggtttcaagaaggtcgttacgcagtagagaaattcagggtcaagttcaagcagttaaacagagtttgccaccaactaaaaaagagcagtgtagcagtactcagagtaaatctaataaaacaagtcaaaaacatgtgaagagaaaagtactggaagtaaagtctgactctaaagaagatgaaaatctagtaattaatgaagtaataaattctcccaaagggaaaaaacgcaaggtagaacatcagacagcttgtgcttgtagttctcaatgcacgcaaggatctgaaaagtgtcctcagaagactactagaagagacgaaacgaaacctgtgcctgtaacttctgaggtgaaaagatcaaaaatggctacttcagtggtcccgaaaaagaatgagatgaagaagtcggttcatacacaagtgaatactaacacaacactcccaaaaagtccacagccatcagtgcctgaacaaagtgataatgagctggagcaagcaggaaagagcaaacgaggtagtattctccagctctgtgaagaaattgctggtgaaattgagtcagataatgtagaggtaaaaaaggaatcttcacaaatggaaagtgtaaaggaagaaaagcccacagaaataaaattggaagagaccagtgttgaaagacaaatacttcatcagaaggaaacaaatcaggatgtgcaatgtaatcgttttttcccaagtagaaaaacaaagcctgtgaaatgtatactaaatggaataaacagcttagccaagaagaactccaactggactaaaattaaactctcaaaatttaactctgtgcagcacaataagttggactctcaagtttcccctaaattaggcttattacgaaccagtttttcaccaccagctttagaaatgcatcatccagtgactcaaagtacatttttagggacaaagctacatgatagaaatataacttgccagcaggaaaaaatgaaagaaattaattctgaagaagtgaaaattaatgatattacagtagaaattaataaaaccacagaaagggctcctgaaaattgtcatttggccaatgagataaaaccttctgacccaccattggataatcagatgaaacattcttttgattcagcatcaaataagaatttcagccaatgtttggaatccaagctagaaaacagtccagtggaaaatgttactgctgcttcgactctgctcagtcaagcaaaaattgatacaggagagaataaatttccaggttcagctccccaacagcatagtattctcagtaaccagacatctaaaagcagtgataacagggagacaccacgaaatcattctttgcctaagtgtaattcccatttggagataacaattccaaaggacttgaaactaaaagaagcagagaaaactgatgaaaaacagttgattatagatgcaggacaaaaaagatttggagcagtttcttgtaatgtttgtggaatgctgtatacagcttcaaatccagaagatgaaacacagcatctgcttttccacaaccagtttataagtgctgttaaatatgtgggctggaagaaagaaagaattctggctgaataccctgatggcaggataataatggttcttcctgaagacccaaagtatgccctgaaaaaggttgacgagattagagagatggttgacaatgatttaggttttcaacaggctccactaatgtgctattccagaactaaaacacttctcttcatttccaatgacaaaaaagtagttggctgcctaattgcggaacatatccaatggggctacagagttatagaagagaaacttccagttatcaggtcagaagaagaaaaagtcagatttgaaaggcaaaaagcctggtgctgctcaacattaccagagcctgcaatctgcgggatcagtcgaatatgggtattcagcatgatgcgtcggaagaaaattgcttctcgcatgattgaatgcctaaggagtaactttatatatggctcatatttgagcaaagaagaaattgctttctcagatcccactcctgatggaaagctgtttgcaacacagtactgtggcactggtcaatttctggtatataattttattaatggacagaatagcacgtaaaacaaattcttgcctacaccactagaagacatctattgaagagaatggattggttgctgactttaaccaggaactagggccatttttattacaatgaactcaggactggcaacaaccatatggttgttccattttcataaaattggaaacaatgcagtaatagcttattgttttgttttttaaagaagatattttattatcttttacagaaatttatgattgatgtattttatctatagttatttagacatgtttacatgcagcagataattgttcatagtggactgaaaactaatgcaaggactatggtctcagtgataagtatattttgaagttcttaatatggaaatataccagtgtagcttggtactgtatttttttatattgatctgctgataccagtgataggcttaaagattgtattttcacagagtggaaaccaatttttttagttattgttcaaggagggtgcaatattaagtgttttggaatttgaagctaatttttaaaaggcctgaactatactttgaagaaacccctatagaaaaggaaagctccagctaaataggaagaattagaatattgagcttttttttcctgatttttctctttcctatctttgatggaaggaggaagtagaaagtggtaaagaattgaggctttccttcttggagagctgtaaatgacaagcattaggaaaggtaccctcctagattcattattctttcattctggtttcacttttaaaataaatggcaacttggcacacctaggctgttaacaaatctcaaagaggtttataaaaacgtatagaatacttggaagcaaagtatggatgactcggtatctgctttgttattcctcagaaatactgcactgagtatatgccctcattactggacttcattttgatacttgtctatccttcatagtgccctctacttttaaagggtttatatgttgaaaaactgctgtggccttttatgacctgtatataatgtagaataaaaataataaaatacttgatagctttttctaagtg

SEQ ID NO: 31054 - DNA, 3720 bp, Homo Sapiens; identical to SEQ ID NO: 26582

SEQ ID NO: 31055 - DNA, 4269 bp, Homo Sapiens
agtcgagggcgcagttcagggcgcgtctgagcggttctcgaggcgttctcgcctcggtctctggcgagtgcacggatcaaaagcagcatggatctgcctgtggatgagtggaaatcatatctgcttcaaaagtgggcttcactcccgacgtctgttcaggtcacaatttctacagcagagaccttgagggatatctttcttcactcctcttcacttcttcaacctgaggatgagctgtttctaaaaagactttctaaaggttacttggtgggaaaggactcggacgctcctcttttctacagagaagaaggaaacaaaaaatttcaggagaaagattacacaggagctgcagtgctgtactctaagggagtgtcacattcaaggcctaacactgaggacatgtcactgtgtcatgctaaccgctcggcagccctcttccacctgggtcagtatgagacgtgtcttaaagacattaacatagcacagacacatgggtatccagaaaggttgcaacccaagattatgttacgtaaagcagaatgtctggtggccctggggagactgcaggaggcaagccagaccatcagtgatcttgaaaggaacttcacagccacaccagccctagcagatgtcctccctcagactctgcagagaaacctccatcgtctgaaaatgaagatgcaagaaaaggacagtctcacagaaagcttcccagcagctctggccaaaacccttgaggatgcagcgctgagggaggagaatgaacaactttccaatgcctcatcatccatcggcttatgcgtagatcctttaaaaggtcgctgtctcgttgccacaaaagatattctcccaggagagctcctggtgcaggaggatgcttttgtgagtgttctcaacccaggagaactgccaccaccgcatcacggcctagacagcaaatgggacaccagagtcaccaatggggacctctattgtcaccgatgtttgaagcacactttggccacagttccgtgtgacggatgcagttatgccaagtattgcagccaggagtgtttgcagcaggtctgggagctctaccacaggacagaatgtcctctgggagggctgcttctcacactgggtgtcttttgccacattgccctgaggttgactcttttggtgggatttgaggatgttcgcaaaatcataacgaagctttgtgataagattagtaacaaggacatctgtttacctgaaagcaacaatcaggtcaagacacttaattatggcctaggggagagtgagaaaaatggcaacatcgttgagaccccaattcctggatgcgatattaatgggaagtatgaaaataattataatgctgtcttcaaccttttgccccacactgaaaaccatagcccagagcacaaattcctctgtgctctctgtgtttctgcactgtgcagacagctagaagcagccagtttacaggccatcccaactgagaggattgtgaactcctctcagcttaaagcagcagtgacacctgaattgtgtcctgacgtgactatttggggagtggcgatgctgagacacatgttacagcttcagtgtaacgctcaggcgatgaccaccatacaacacacaggacctaaagggagcatcgttaccgacagcaggcaggtgcgccttgccacaggcatcttccctgttatcagcctcctgaaccactcctgtagccccaacaccagcgtgtccttcattagcactgtcgccaccatccgggcgtcacagcggattagaaaggggcaagagattctccactgctatgggcctcacaagagccggatgggggttgccgaaaggcagcagaagctgaggtctcagtatttctttgactgcgcctgtccagcttgtcaaactgaggcacacaggatggctgcagggcccaggtgggaagcattctgttgcaacagttgcggagcgcccatgcagggagatgacgtgctgcgctgtggcagcagatcttgtgcagaatccgccgtcagcagggaccacctggtctctcggttacaggacctacagcagcaggtcagagtggcccagaagcttctcagagatggtgaactagagcgagctgttcagcggctgtcggggtgccagcgtgacgccgagagcttcctgtgggcagagcacgccgtggtgggagagatcgcggatggcctggcccgggcctgtgctgccttaggagactggcaaaagtcagccacccatctacagaggagtctctgcgtggtggaggttcgccacgggccgtccagtgttgaaatgggccatgagctcttcaaattggcccagatctttttcaacgggtttgcagtacccgaagccctgagcacaatacagaaagctgaggaggttctgtcgctgcactgtggcccatgggacgatgaaatccaggagctccagaagatgaaatcctgtttgttggacttaccacccacccctgtagggcctgcattgtagggttccaggaggattttgacccacagaaaaggagcccatggaacacaagttaaagaggttttgctggccaggtatggtggctcacgcctgtaatcccagcactttgggaggctaaggtgggcggatcacctgatgtcgggagttcaagaccagcctggccaacatggtgaaaccccatctttactaaaaatacaaaaaactagccaggcgtggtggtgggcacctgtaatcccagctacttgggaggctgaggcaggagaatctcttgaacccgggaggcggaggttgcagtgagccgagatcgctccactgcactccagcccaggtgacagtgtgagactccatctcaaaaaaaaaaataagaggccgggtgcggtggctcaagcctgtaatcccagcactttgggaggccgaggcaggcagatcacgaggtcaggagatccagaccatcctggctaacacggtgaaaccccgtctctactaaaaatacaaaaaaattagtcgggcgtggtggcggacgcctgtattcacagctactcgggaggttgaggcaggagaatggggtgaacccgggaggaagagcttgcagtgagccgagatcgcgccactgcactccagcctgggtgacagagccagactccatctcaaagaaaaaaaaaaaatattaagaggttctgctgccagatgtgggttctgtgggtcgggtgtgggttctgtgggtcgggtgtgggttctgcagaccaggtgcggattctgtgtaggttctgcaggcccagtgtagaggctcacacctgtaatcccagtactttgagacgctgaggtggggggatcacttgagcccaggagttcaaaaccagcctgggcaatatagtgagaccgtatcactacaaaaaagtttttttagttcaccgagcatggtggcacatgcctgtagtcccacctactcgagaagctgagatagggtcacctgagcctggtaggctgaggctgcagtgagccaagatcgcactactgcactccagcctgggtgacagagtaagaccctgtctcaacaaaaaaataacaggttctgttgctgctgagctttcgtcaggaagataagactttcccaacagtccgaagcctaggatatgagggctgaggaggactcaaaccgttgcagtcagagagacacctattttggtgaatattttttgaaatagttaagtggcctccagtacaaactcccagttcccagaaaagacttaaaactagtatctggagattccaagtcctttaaaaggattttagctgatctgcaggcatctggatgttagcctggggttttggctggattccacctcgctcagtgatgatagtctgtttccctggaacattcctgtggttttagtagtaatgagatgtgtgcaccactccagtgggaactgaagctcttagtagttacattgtaattaaaaaagaattataaaacaagaaatcagcaagcctgcttacctccagagacacaccgttccacttacagtatctagcttcctcgactcctttgttaaaatcgtggagtatgaaccgtgaccagagaagtaaatatggagcagttttattgagcagtttcctccagggatgacggctgtcagtgtgtttcctgccagttttccagtccttactctctgcccttcattctgtactcttggcagagtcagtaaccaaccactaataaaatcaaagttgtagtaaaaaaaaaaaaaaaaaagaaaaaaaaaaaaaaaa

SEQ ID NO: 31056 - DNA, 1714 bp, Homo Sapiens
ccccgccggtcccgcggtcccacggcgcctggttgcccccagccccctccctcctcccaccttcactgtgtcccacccttcctagctttgtgcccggggtgctgagcccttccccgtcagccgggccgcgggaggagggagccgtcaccgaggagctgccgctcgctgccccgggcaggggcacagttgcaaccaaggcaatgtcttactacctcagctcagaaaaccacctggacccagggcccatctacatgcgagaaaatgggcagctgcacatggtcaatctggctctggatggtgtcaggagtagcctgcagaagccaaggcctttcagactgttccccaaaggcttttctgtggagctttgcatgaacagggaagacgacactgcacggaaagagaagactgatcatttcatcttcacatacacccgagaggggaatcttcggtactccgccaaatccctcttcagccttgtcctgggtttcatctccgacaatgtggatcacattgattcccttattggctttcctgagcagattgctgaaaagctgttctctgctgctgaagccagacagaaattcactgagccaggtgcagggctgagggctttacagaaattcactgaggcctatggaagtttggtgctttgctccctgtgtttgcgaaacaggtatctcgtgatttcagaaaagcttgaggagattaagtctttccgggagctgacctgcctggatctttcctgttgcaagcttggagatgagcatgaacttctagaacatctcaccaatgaagccctgtctagtgtaactcagctccacctgaaggataattgtttatctgatgctggggtgcggaagatgacagcaccagttcgagtgatgaaaagaggccttgagaatctaacattattagacttatcatgtaaccctgagatcacagatgcaggcattggatacctcttttcttttaggaaactaaactgcttagatatctctgggacagggctcaaggacatcaaaaccgtcaagcacaagctccagacccacataggccttgttcactccaaagtgcctttgaaggaatttgatcatagtaactgcaagacagagggctgggctgaccagatcgttctgcagtgggagcgtgtgactgcggaagctgtgaagccacgggagacctcggagcctagagcagcagctcagcgcttctatgggaagcggtctcgagcagaagccccactgaagtgtcccctggcagacacccacatgaactcttccgagaaactccagttctataaagagaaagccccagattgccatgggccagtgttgaaacacgaagctatctcaagccaggagtcaaagaagagcaagaagagaccttttgaggagtcagagacagaacagaataactcttcacaaccttcaaagcagaaatatgtatgtcttgctgtggaagactgggacttgttaaattcctattgattagtagatacaagttgacctttctctggcccccagctctagtgtttgagtaaaggagactgaggatgatttactttttgtttgaatttacctatggcattagcatagtaagcagatatttctacttttgtggtgtgggaggggaatgctatggaagtaagtaataatttctaatgtatattttcaatacatagtaattttttcaaataaacatttttgctgtcctt

SEQ ID NO: 31057 - DNA, 2385 bp, Homo Sapiens
gttagtcgtcgccgtctgaggtgttccctggctttgtctcgccgtcgttgccgccccgtccctgccttcgtgccccccgccttggcccctgcccagccgctctccctgtcctcctccccttaaccacccccacggtttctgccgtcggggcccgggggccgggcggatgatgccgtcggagagcggagctgagcgcagggaccgggcggctgctcaggtggggacggctgcggccacggcggtggccacggcagccccggcaggcggcggccccgacccggaggccttatcggccttccccggacggcacctgagtgggctgagctggccacaggtgaagcgactggacgctcttctgagcgagccgattcccattcacgggcgcggcaacttccccacgctgagcgtgcagccccggcagatcgtgcaggtggtccgcagcaccctggaggagcagggactacatgtgcacagtgtgcggctgcatggttcagctgccagccacgtgctgcaccctgagagtggcctgggctacaaggatctggacctggtgttccgggtggacctgcgcagtgaggcatccttccagctgaccaaggcagtggtgctggcctgcctactagacttcctgccggccggtgtgagccgggccaagatcacgccactgacactcaaggaggcatacgtgcagaagctggtgaaagtgtgcacagactcggaccgctggagcctcatctcactgtccaacaagagcggcaagaacgtggagctcaagtttgtggactcggtgagacgccagtttgaattcagcatagactccttccagatcatcctggactccctgttgctctttggccagtgctcgtccactcccatgtctgaggccttccacccaacggtcacaggcgaaagcctgtacggggacttcaccgaggccctggagcacctgcggcaccgtgtcatcgccacgcgcagtcccgaggagatccgaggtggtggcctcctcaagtactgccacctcctggtgcggggcttccggccccggcccagcaccgatgtgcgcgccctgcagcgctacatgtgctcccgcttcttcatcgactttccagacctggtggagcagcggcgcaccctagagcgctacctggaggcccacttcggtggggcagatgcagcccgccgttacgcctgcctggtgacactgcaccgggtggtcaacgagagcaccgtgtgcctcatgaaccacgagcgccgccagacgctggacctcattgccgcactggcgctgcaggcactggctgagcagggcccagctgccactgccgccctggcctggcgccctccaggcactgacggggttgtgccagccactgtcaattactacgtgacccccgtgcaacctctcctggctcacgcctatcccacctggctgccttgtaactgactcagaccctggccagaagggaagggactgggcctcacggggtggggtggggcctccaagagtgtgtggaggacatgaccagaggcgcagaatgtgccaggaggcccagcactgcagggttgggcctttgattgaacagaccagactttcccgagcacgaggcccctgtgggcttaatgccagcctggggctctcagcaggaggaccctttggttattgcatcacacttttggaccagcatgccggtggggtgcaggcgccatttgtcttggaagtcaatttccttcaggagacaaagcaagtttggggtggtagccttaatgcccagcaccttggattgattcccatggtctaagagggtctttttgactaaggccagcctgtggtgatcccagcagctttggagggcctgcagcccacacactgactgatacatggtatgttacagggacttgtcactttggatcaggctgggccactacagggcctgatgggccaacttgggtaatcactgggaggagggaaactgaggcccgaggcagatacctgggtttggggagggctgggtttagcccggttctctgaactacatacccccagctgtgaagccttcctcttgaggggttgaggtgggcagtatacaggagccaagcagcccagggtgggtcgcagcccaggccccttccagggtgccactcctttcccccttgtgttgcaaggagccctcctgcctgggagcttgttctttggaaggtgctgagcctgaatttgccacagtcaagtcaacgttcccaccccactggcttggttacagggctctcacatggggtaggggagccatactcccacccccttgcgtattcccctgggtttgttgatattttgcactcttaacacctgccaataaagacggtctacactgaaaaaaaaaaaaaaaaaaa

SEQ ID NO: 31058 - DNA, 3094 bp, Homo Sapiens
gaaatgtgagcctgggtggccaaggacgccggagtggccgccttccccgcgcctgagcgcagtggggcgagacaaagagacctgggcccccagcgcagcccgtctcgggccacgggcgccccagctccgcggagtcccgcagtcgctggcccgggacgcgcccggcccgggctcccttggaaggctccctaggcaatggccgggtctctgctccacccggctctcaggagcgctgctctctccatctgatcgccctccatcctccccattccctccggttccgggctctcccttcgctccaagcctcaggccaccggcttggatggacgctccgaggctacccgtgcgtccaggggtcttgcttccgaagttggtcctgctctttgtctacgcagatgattgccttgctcagtgtggcaaagattgcaaatcttactgctgtgatggaaccacgccctactgttgctcctactacgcttatattgggaatatcctctcgggcactgcaattgcgggcattgtttttggaatagtatttatcatgggggtcattgctgggattgccatatgcatctgcatgtgcatgaagaaccacagggcgacccgcgtgggcatcctcaggacgactcacatcaacaccgtctcctcctatcctggaccaccaccctacggtcacgaccacgagatggaatactgtgcagacttgcctcctccatactcccccaccccacagggtccagcacagcgttctccaccccctccttatcctggaaacgcaaggaaataatctatctcccagaacagaacatgtgccaatgggcgatcttgcctggaataaaatgcctctactcagaaacaggcaggaaagaattgctccaaggaatactttttggggtcagataatgtgtcaggtggaatatccctgctaggagatataggatttctactctgctcaaagctgaccccatctggagtattaatgtttggttctatggaaccacattttaagagatctgctgatccacctaagcacattcagggaagagtaatgtaattgacaaaatatctgataatcatgttgtttaagggctaggtgaagaaagtttcagtattgatcctggaaaaaaagaagatctaagtaggatgggagaatgatttggcccacacaaggaagcaactttattctatatagctttaaaagtcagaactagaattgttcattctttcattcatcaataaatgtattttgagtgcctaagagtttactatgtgcctagcactgtttgaggtcctgatggaagttacaggacgggtactctggttttagtacaagaaagagcaatgactagattgctttgtgaagctcttggtagagacacgctccagaagggataacaaaatcaaatagtagatgggttcattgggcctcagaagttctgctcgtattttaggtgggtgtgaagtgaatttctatatgtccaggagtgaatacaacagaaagagttggatcttatttatttaattagggagttaaaacaagaccaaaaagactcaacagccgcttgaagccaagaactcttcaatgccagctactgccacctaaaaatcatctggctttatagtggatcagaataaaggttattctaactgtggggagaaaaaaaaaattgtatcaagttccacaggtagcagacacttcacttccaagtaaaagatgagaaatcaattattcccacaggattttaggtcagggagcaaaaatctcagaacttgaccatgaagatacacaacagactcgcaaaaataaagtgggaaatgaagttcagattcccttctgtagatttccttaaaactattatttttttcttcttcgtaaaattttgataatctgttctcttaaaaaagttaatgacacaattaagatactgacatcaaattgttgccttttaccaaaatgcaaattttatgaagtgcctacctttatatgtataaagcatttaataaataattctaatgtgccatattttgctgtgagtgaccttaacatttatatttttatatgaattgtttcatgtatttataaaaattgtatattgaacattggaaatagatgattagatttttgtgtcattttacaattaaatctaaaatgcttaatccaatatcatcatcaaaattcagtgaaatcccaaaacagtgccaagaattttgctgaatgaaacaatcaaacaaagcattttaaggtgtaagttatagtacctgtacttgcagataagaagcttactatatcattattataagtagcatatattactttcaaatacctatattagaaagatattgatctgactgaaatataacctacctgccagtaaggtccaaaggctgaatttgttttgaatgagttccttgatctttaagcactgatgattttcttatatatgaggatgcaaagcattcaagagtttcagcctgttctggtgaggggctccctgacttacataaagttttcagtgcaattttaatagtacatatgctttaatttatttttcttctgcgtgtggtcagacccaattacactgtggctaagactctcaaagtgccagggtttctgtgatgattctgagaatgctgaatacaaatataccttatattctttaaggaaaacggaaaggaaagatcagcagaaatagggttttctcatcttcaccatcaataaacatttattgcgtacctcctatattctgcaaattttccccaaatagaagccagttcagtccacaccatctcttctttgagttgtttatggcctcccttaaggcattttacaaacccataagcctacaatagatgagtatttttactatttgtattaagtgtcataatagcatcaatgtgcacattaccagtatagactgttggagttcactgattgttttcatagatgatgcttcttggggaaaaatagtataggatgtgaaagttttgaattacggttatttaaaaactaacatttgctatggccaaagtgtttacaataagcaataaagtgaaagaacctattataacacagattataaaaaaaaaaaaaaaa

SEQ ID NO: 31059 - DNA, 2792 bp, Homo Sapiens
aaaaggggcctgcgcctggcgttgttcatcgcagttgctccggatctttgcacacactccacgggcagttggaggtgagctgctgccggccacgccagaggctgcaacaccagacatggatgggtgcaaaaaagagctgccccgcttgcaagagccggaggaggacgaggattgttacatccttaatgttcagtcaagcagtgatgacaccagtgggtcttctgtggccagaagagctccgaagagacaggcgagttgcatccttaatgtccagtcaaggagtggtgacaccagtgggtcttctgtggccagaagagctccgaagagacaggcgagctccgtggtagtgattgactctgattctgatgaggaatgtcacacccatgaagagaagaaagctaagttattggaaataaacagcgacgatgagagtccggagtgttgtcatgtgaagcctgccatccaggaacctccaatagttattagtgatgatgacaatgacgatgacaacggtaatgatttggaagttcccgacgacaacagtgatgattcagaagctcccgacgacaacagtgatgattcggaagctcctgacgacaacagtgatgattcggaagctcccgacgacaacagtgatgattcggaagctcccgacgacaatagtgatgattcggatgttcccgacgacaacagtgatgattcatccgacgacaacagtgatgattcatccgacgacaacagtgatgattcggatgttcccgacgacaagagtgatgattcggatgttcccgacgacagcagtgatgattcggatgttcccgacgacagcagtgatgattcggaagctcccgacgacagcagtgatgattcggaagctcccgacgacagcagtgatgattcggaagctcccgacgacagcagtgatgattcggaagctcccgacgacagcagtgatgattcggaagcttccgacgacagcagtgatgattcggaagcttccgacgacagcagtgatgattcggaagctcccgacgacaagagtgatgattcggatgttcccgaagacaagagtgatgattcggatgttcccgatgacaatagtgatgatttggaagttcctgtgccagcagaagatttgtgtaatgaaggccaaattgcttcagatgaagaagagctggttgaggctgctgctgctgtctcccagcatgattcatctgatgatgctggtgagcaggatcttggtgagaatctcagcaaaccaccaagtgatcctgaggctaaccctgaagtttcagagagaaagctgccaactgaggaagagcctgcacctgtggtggaacaatcagggaaaaggaagtcaaaaaccaaaactattgtggagccaccgaggaaaaggcagacaaagaccaaaaatatagtggagccaccaaggaaaaggcagacaaagaccaaaaatatagtggagccactgaggaagaggaaggcgaaaaccaaaaatgtatctgtgacacctggacataagaagcgtgggccttcaaagaagaaacccggtgcagcaaaagttgaaaaacgcaagactaggactcctaaatgcaaagtccctggatgtttcttgcaagaccttgaaaagtcaaagaaatactctggaaaaaatttaaagcgaaataaggatgaattggttcagagaatctacgacctgtttaacagatccgtctgtgataaaaagctgccagagaaactacgcataggctggaataacaagatggtgaaaactgctggcttatgcagcactggtgagatgtggtacccaaagtggcggcgctttgccaagatccagattggcttgaaagtctgcgactctgcagaccgaatccgggataccttgatccatgaaatgtgccatgctgcctcctggctgattgatggtatccatgattctcatggtgacgcatggaagtattatgccaggaaatccaacaggatacacccggagctgcccagggtcacccgttgccataactataagattaactacaaggtccattatgaatgtactggatgcaaaacgaggattggctgctacaccaaatcgttggacaccagccgcttcatctgtgccaaatgcaaggggtctctggtcatggtgccattaactcagaaagatgggacccgtattgtgccccacgtgtgaccatttgctgtgtatgtgcagaagtattatagaaaaattatgcaggagatggctaggattagccttggggatgtgatgaaaacacttggcaggaattacaaggcaatgaagaattcttaaggttatcttagagtatattaatgtgagctatatcctttactggtaagaagttttagaaaggtttgttttgtgaagttaggaatattagaatttaggtactgttaagtaagtaatgttagaatttaagattcatgttattaacgatgattgaccttaaatagggactctattgctaaccattctgtgcccttgacagggtatttctgaagcccttgggatctaccttgggtcttacttgagttccatatttttcacatgtagaacaaaatgcaaaagaaaagtgagttttcaagagtggcaggttgagagaggagaatgctggaaagaggacaagtttgagaggcaacacttaaacactagggctactgtggcatctatgtagacaggaaagacaaacgtgtttcataaaattcgttgttgatggtattgattgaaactatctgagccatgtaatcaaaaaataaaagttttctgcatcttg

SEQ ID NO: 31060 - DNA, 3109 bp, Homo Sapiens
gcggccgccgcagcgggcacggccaacgagctgcgggcccgggatcgcggcggctggacggggctggagctgtcgggagggcggagctacagggcctgcaaggatgttggctgtcccggagatgggcctgcaggggctgtacatcggctccagcccggagcggtccccagtgcctagcccacccggctccccgaggacccaggaaagctgcggcattgcccccctcacaccctcgcagtctccaaaacccgaggtccgagccccccagcaggcctccttctctgtggtggtggccattgacttcggcaccacgtctagtggctatgctttcagctttgccagtgaccctgaggccatccacatgatgaggaaatgggagggcggagacccgggcgtggcccaccagaagaccccgacctgcctgctgctgactccggagggcgccttccacagctttggctacaccgcccgcgattactaccatgacctggaccccgaagaggcgcgggactggctctacttcgagaagttcaagatgaagatccacagcgccacggatctcaccttgaagacccagctagaggcagtaaatggaaagacgatgcccgccctggaggtgttcgcccatgccctgcgcttcttcagggagcacgcccttcaggagctgagggagcagagcccatcgctgccagagaaggacactgtgcgctgggtgttgacggtgcctgccatctggaaacagccagccaagcagttcatgcgggaggctgcctacctggctggactagtgtcccgagagaatgcagagcagctactcatcgccctggagcccgaggccgcctcggtatactgccgcaagctgcgcctgcaccagctcctggacctgagtggccgggccccaggtggtgggcgcctgggtgagcgccgctccatcgactccagcttccgtcaggctcgggagcagctgcgaaggtcccgccacagccgcacgttcctggtggagtcaggcgtaggagagctgtgggcagagatgcaagcaggagaccgctacgtggtggccgactgcggcggaggcaccgtggacctgacggtgcaccagctggagcagccccatggcaccctcaaggagctctacaaggcatctgggggcccttatggcgcggtgggcgtggacctggccttcgagcagctgctgtgccgcatcttcggcgaggacttcatcgccaccttcaaaaggcaacggccggcagcctgggtagatctgaccatcgccttcgaggctcgcaagcgcactgctggcccacaccgtgcaggggcgctcaacatctcgctgcccttctccttcattgacttctaccgcaagcagcggggccacaacgtggagaccgctctgcgcaggagcagcgtgaacttcgtgaagtggtcctcacaggggatgctccgaatgtcttgtgaagccatgaacgagctctttcagcccaccgtcagcgggatcatccagcacatagaggccctgctggcacggccggaggtgcagggtgtgaagctgctgttcctagtgggcggcttcgccgagtcagcggtgctgcagcacgcggtgcaggcggcgctgggcgcccgcggtctgcgtgtcgtggtcccgcacgacgtgggcctcaccatcctcaaaggcgcggtgctgttcggccaggcgccgggcgtggtgcgggtccgccgctcgccgctcacctatggcgtgggcgtgctcaaccgctttgtgcctgggcgccacccgcccgaaaagctgctggttcgcgacggccgccgctggtgcaccgacgtcttcgagcgcttcgtggccgccgagcagtcggtggccctgggcgaggaggtgcggcgcagctactgcccggcgcgtcccggccagcggcgcgtactcatcaacctgtactgctgcgcggcagaggatgcgcgcttcatcaccgaccccggcgtgcgcaaatgcggcgcgctcagcctcgagcttgagcccgccgactgcggccaggacaccgccggcgcgcctcccggccgccgcgagatccgcgccgccatgcagtttggcgacaccgaaattaaggtcaccgccgtcgacgtcagcaccaatcgctccgtgcgcgcgtccatcgactttctttccaactgagggcgcgccggcgcggtgccagcgccgtctgcccggccccgccctctttcggttcaggggcctgcggagcgggttggggcgggggaaacgatagttctgcagtctgcgcctttccacgccctccagccccgggggagataaggtcatgggagagtgggtggggacacacccagagactggctttgggattgggcactggtccgctgactgccaggctgaagggacccgccaaggactgaacgggtaagagaagaggtttgcaagacagagcgcgcagcccggcaaggggcatgtgaccccgaaggaagaacgcaacagaagagtcctggtctgaacttggccgagtaggggtgggggtgggatggcaggaggagccgcaggaggaaggaggttgtgcagggtctggacctgcagggctgaagttcactcatcgaccgactcagccccaaccgggagccaggcagaaaaaccctgtgccgtaggaaagtgactggaagtggactccagagggacaggtgtggtggcacagtcctggtgtggtgctgaccacccaaatatgactgtgaattgtggaaagggcagtagatctctaatgtggaggtgggaacattattgtggtggaggcaattatgagggtagcatttctttcgagacaaaacacccgtctgggaaggccccaaggtcagcttatgaaggaccccacttgcaccccaccccagccatggaagagcagctggagggtggatggggaggccagagggagcaatgaggggtggtcccagctctgctattgactcggtatgcctttaggacattctcttaccgctcatgggcctcagtttcctaaagtgtgaaatgtcaggcacttccctctaactggcatgcaacagccccacctgcctgagagccctgaggtgacaataaaacatttatgctcaaggggaa

SEQ ID NO: 31061 - DNA, 3717 bp, Homo Sapiens
attgcttttgctgcttttctggctttccctttcggacatgcgcgctcggagcaaggcgccctcgcactcagcttaccgcgcatgtacgttgccaggggtaacgcaggtagccaaagtggcttgtggagtggcgaccgttagtgaggcggttgctgagacagacgctgaggcgggtaggaggagcccgagccgtaagggaagccgtgatgagggccgtgttgacgtggagagataaagccgagcactgtataaatgacatcgcatttaagcctgatggaactcaactgattttggctgccggaagcagattactggtttatgacacctctgatggcaccttacttcagcccctcaagggacacaaagacactgtgtactgtgtggcatatgcgaaggatgggttgtggtctcctgaacagaagtctgtctccaaacacaaatcaagcagcaagatcatctgctgcagctggacaaatgatggtcagtacctggcgctggggatgttcaatgggatcatcagcatacggaacaaaaatggcgaggagaaagtaaagatcgagcggccggggggctccctctcgccaatatggtccatctgctggaacccttcaagagaggaacgtaatgacatcctggctgtggctgactggggacagaaagtttccttctaccagctgagtggaaaacagattggaaaggatcgggcactgaactttgacccctgctgcatcagctactttactaaaggcgagtacattttgctggggggttcagacaagcaagtatctcttttcaccaaggatggagtgcggcttgggactgttggggagcagaactcctgggtgtggacgtgtcaagcgaaaccggattccaactatgtggtggtcggctgccaggacggcaccatttccttctaccagcttattttcagcacagtccatgggctttacaaggaccgctatgcctacagggatagcatgactgacgtcattgtgcagcacctgatcactgagcagaaagttcggattaaatgcaaagagcttgtcaagaagattgccatctacagaaatcgattggctatccaactgccagagaaaatcctcatctatgagttgtattcagaggacttatcagacatgcattaccgggtaaaggagaagattatcaagaagtttgagtgcaacctcctggtggtgtgtgccaatcacatcatcctgtgccaggagaaacggctgcagtgcctgtccttcagcggagtgaaggagcgggagtggcagatggagtctctcattcgttacatcaaggtgatcggtggccctcctggaagagaaggcctcttagtggggctgaagaatggacagatcctgaagatcttcgtggacaatctctttgctatcgtcctgctgaagcaggccacagctgtgcgctgcttggacatgagtgcctcccgtaagaagctggccgtggtagatgaaaatgacacttgcctggtgtatgacatcgacaccaaggagctgctttttcaggaaccaaacgccaacagtgtagcttggaacacccagtgtgaggacatgctctgcttctcgggaggaggctacctcaacatcaaagccagcaccttccctgtgcaccggcagaagctgcagggctttgtggtcggctacaatggctccaagatcttctgcctccatgtcttctccatttctgccgtggaggtgccgcagtccgctcccatgtaccagtacctggataggaaactgttcaaggaagcctaccagattgcttgcttgggtgtcacagacactgattggcgtgaactggccatggaagcgctagaaggtttagattttgaaacagcaaagaaggccttcatcagagtacaagacctccgatatttagagctcatcagcagcattgaggagaggaagaagcggggagagaccaacaatgacctgtttctggcagatgtgttttcctaccaggggaagttccatgaggccgccaaactgtacaagaggagtgggcacgagaacctcgcgcttgaaatgtacaccgacctctgcatgtttgagtatgccaaggatttccttggatctggagaccccaaagaaacaaagatgctaatcaccaaacaggctgactgggccagaaatatcaaggagcccaaagccgccgtggagatgtacatctcagcaggagagcacgtcaaggccatcgagatctgtggtgaccatggctgggttgacatgttgatcgacatcgcccgcaaactggacaaggctgagcgcgagcccctgctgctgtgcgctacctacctcaagaagctggacagccctggctatgctgctgagacctacctgaagatgggtgacctcaagtccctggtgcagctgcacgtggagacccagcgctgggatgaggcctttgctttgggtgagaagcatcctgagtttaaggatgacatctacatgccgtatgctcagtggctagcagagaacgatcgctttgaggaagcccagaaagcgttccacaaggctgggcgacagagagaagcggtccaggtgctggagcagctcacaaacaatgccgtggcggagagcaggtttaatgatgctgcctattattactggatgctgtccatgcagtgcctcgatatagctcaagcagatcctgcccagaaggacacaatgcttggcaagttctaccacttccagcgtttggcagagctgtaccatggttaccatgccatccatcgccacacggaagatccgttcagtgtccatcgtcctgaaactcttttcaacatctccaggttcctgctgcacagcctgcccaaggacaccccctcgggcatctctaaagtgaaaatactcttcaccttggccaagcagagcaaggccctcggtgcctacaggctggcccggcacgcctatgacaagctgcgtggcctgtacatccctgccagattccaaaagtccattgagctgggtaccctgaccatccgcgccaagcccttccacgacagtgaggagttggtgcccttgtgctaccgctgctccaccaacaacccgctgctcaacaacctgggcaacgtctgcatcaactgccgccagcccttcatcttctccgcctcttcctacgacgtgctacacctggttgagttctacctggaggaagggatcactgatgaagaagccatctccctcatcgacctggaggtgctgagacccaagcgggatgacagacagctagagattgcaaacaacagctcccagattctgcggctagtggagaccaaggactccatcggagatgaggacccgttcacagctaagctgagctttgagcaaggtggctcagagttcgtgccagtggtggtgagccggctggtgctgcgctccatgagccgccgggatgtcctcatcaagcgatggcccccacccctgaggtggcaatacttccgctcactgctgcctgacgcctccattaccatgtgcccctcctgcttccagatgttccattctgaggactatgagttgctggtgcttcagcatggctgctgcccctactgccgcaggtgcaaggatgaccctggcccatgaccagcatcctggggacggcctgcaccctctgcccgccttggggtctgctgggctgtgaaggagaataaagagttaaactgtcaaaaaaaaaaaaaaaaaaaaaaaaaaaaaaaaa

SEQ ID NO: 31062 - DNA, 7632 bp, Homo Sapiens
ggcgctgagcgagctcggagcccgcgctgtgcgcctgcggccggggcgccccgccgagcgccggtgccccggctcccgggccgccttcgccgcgcgggaaggattcttcaaaattaacagaaaccaatttgggccagctgaagagaaaaaataaaggtggctcccggctgcctctgctgcagttcagagcaacttcaggagcttcccagccgagagcttcaggacgcctttcctgtcccactggcccagttgccacaacaaacaacagagaagacggtgaccatgggggatgtgaagctggttgcctcgtcacacatttccaaaacctccctcagtgtggatccctcaagagttgactccatgcccctgacagaggcccctgctttcattttgccccctcggaacctctgcatcaaagaaggagccaccgccaagttcgaagggcgggtccggggttacccagagccccaggtgacatggcacagaaacgggcaacccatcaccagcgggggccgcttcctgctggattgcggcatccgggggactttcagccttgtgattcatgctgtccatgaggaggacaggggaaagtatacctgtgaagccaccaatggcagtggtgctcgccaggtgacagtggagttgacagtagaaggaagttttgcgaagcagcttggtcagcctgttgtttccaaaaccttaggggatagattttcagcttcagcagtggagacccgtcctagcatctggggggagtgcccaccaaagtttgctaccaagctgggccgagttgtggtcaaagaaggacagatgggacgattctcctgcaagatcactggccggccccaaccgcaggtcacctggctcaagggaaatgttccactgcagccgagtgcccgtgtgtctgtgtctgagaagaacggcatgcaggttctggaaatccatggagtcaaccaagatgacgtgggagtgtacacgtgcctggtggtgaacgggtcggggaaggcctcgatgtcagctgaactttccatccaaggtttggacagtgccaataggtcatttgtgagagaaacaaaagccaccaattcagatgtcaggaaagaggtgaccaatgtaatctcaaaggagtcgaagctggacagtctggaggctgcagccaaaagcaagaactgctccagcccccagagaggtggctccccaccctgggctgcaaacagccagcctcagcccccaagggagtccaagctggagtcatgcaaggactcgcccagaacggccccgcagaccccggtccttcagaagacttccagctccatcaccctgcaggccgcaagagttcagccggaaccaagagcaccaggcctgggggtcctatcaccttctggagaagagaggaagaggccagctcctccccgtccagccaccttccccaccaggcagcctggcctggggagccaagatgttgtgagcaaggctgctaacaggagaatccccatggagggccagagggattcagcattccccaaatttgagagcaagccccaaagccaggaggtcaaggaaaatcaaactgtcaagttcagatgtgaagtttccgggattccaaagcctgaagtggcctggttcctggaaggcacccccgtgaggagacaggaaggcagcattgaggtttatgaagatgctggctcccattacctctgcctgctgaaagcccggaccagggacagtgggacatacagctgcactgcttccaacgcccaaggccaggtgtcctgtagctggaccctccaagtggaaaggcttgccgtgatggaggtggccccctccttctccagtgtcctgaaggactgcgctgttattgagggccaggattttgtgctgcagtgctccgtacgggggaccccagtgccccggatcacttggctgctgaatgggcagcccatccagtacgctcgctccacctgcgaggccggcgtggctgagctccacatccaggatgccctgccggaggaccatggcacctacacctgcctagctgagaatgccttggggcaggtgtcctgcagcgcctgggtcaccgtccatgaaaagaagagtagcaggaagagtgagtaccttctgcctgtggctcccagcaagcccactgcacccatcttcctgcagggcctctctgatctcaaagtcatggatggaagccaggtcactatgactgtccaagtgtcagggaatccaccccctgaagtcatctggctgcacaatgggaatgagatccaagagtcagaggacttccactttgaacagagaggaactcagcacagcctttgtatccaggaagtgttcccggaggacacgggcacgtacacctgcgaggcctggaacagcgctggagaggtccgcacccaggccgtgctcacggtacaagagcctcacgatggcacccagccctggttcatcagtaagcctcgctcagtgacagcctccctgggccagagtgtcctcatctcctgcgccatagctggtgacccctttcctaccgtgcactggctcagagatggcaaagccctctgcaaagacactggccacttcgaggtgcttcagaatgaggacgtgttcaccctggttctaaagaaggtgcagccctggcatgccggccagtatgagatcctgctcaagaaccgggttggcgaatgcagttgccaggtgtcactgatgctacagaacagctctgccagagcccttccacgggggagggagcctgccagctgcgaggacctctgtggtggaggagttggtgctgatggtggtggtagtgaccgctatgggtccctgaggcctggctggccagcaagagggcagggttggctagaggaggaagacggcgaggacgtgcgaggggtgctgaagaggcgcgtggagacgaggcagcacactgaggaggcgatccgccagcaggaggtggagcagctggacttccgagacctcctggggaagaaggtgagtacaaagaccctatcggaagacgacctgaaggagatcccagccgagcagatggatttccgtgccaacctgcagcggcaagtgaagccaaagactgtgtctgaggaagagaggaaggtgcacagcccccagcaggtcgattttcgctctgtcctggccaagaaggggacttccaagacccccgtgcctgagaaggtgccaccgccaaaacctgccaccccggattttcgctcagtgctgggtggcaagaagaaattaccagcagagaatggcagcagcagtgccgagaccctgaatgccaaggcagtggagagttccaagcccctgagcaatgcacagccttcagggcccttgaaacccgtgggcaacgccaagcctgctgagaccctgaagccaatgggcaacgccaagcctgccgagaccctgaagcccatgggcaatgccaagcctgatgagaacctgaaatccgctagcaaagaagaactcaagaaagacgttaagaatgatgtgaactgcaagagaggccatgcagggaccacagataatgaaaagagatcagagagccaggggacagccccagccttcaagcagaagctgcaagatgttcatgtggcagagggcaagaagctgctgctccagtgccaggtgtcttctgaccccccagccaccatcatctggacgctgaacggaaagaccctcaagaccaccaagttcatcatcctctcccaggaaggctcactctgctccgtctccatcgagaaggcactgcctgaggacagaggcttatacaagtgtgtagccaagaatgacgctggccaggcggagtgctcctgccaagtcaccgtggatgatgctccagccagtgagaacaccaaggccccagagatgaaatcccggaggcccaagagctctcttcctcccgtgctaggaactgagagtgatgcgactgtgaaaaagaaacctgcccccaagacacctccgaaggcagcaatgccccctcagatcatccagttccctgaggaccagaaggtacgcgcaggagagtcagtggagctgtttggcaaagtgacaggcactcagcccatcacctgtacctggatgaagttccgaaagcagatccaggaaagcgagcacatgaaggtggagaacagcgagaatggcagcaagctcaccatcctggccgcgcgccaggagcactgcggctgctacacactgctggtggagaacaagctgggcagcaggcaggcccaggtcaacctcactgtcgtggataagccagaccccccagctggcacaccttgtgcctctgacattcggagctcctcactgaccctgtcctggtatggctcctcatatgatgggggcagtgctgtacagtcctacagcatcgagatctgggactcagccaacaagacgtggaaggaactagccacatgccgcagcacctctttcaacgtccaggacctgctgcctgaccacgaatataagttccgtgtacgtgcaatcaacgtgtatggaaccagtgagccaagccaggagtctgaactcacaacggtaggagagaaacctgaagagccgaaggatgaagtggaggtgtcagatgatgatgagaaggagcccgaggttgattaccggacagtgacaatcaatactgaacaaaaagtatctgacttctacgacattgaggagagattaggatcctgtttgagcgcatcattgacgaggactttgagctgacggagcgtgagtgcatcaagtacatgcggcagatctcggagggagtggagtacatccacaagcagggcatcgtgcacctggacctcaagccggagaacatcatgtgtgtcaacaagacgggcaccaggatcaagctcatcgactttggtctggccaggaggctggagaatgcggggtctctgaaggtcctctttggcaccccagaatttgtggctcctgaagtgatcaactatgagcccatcggctacgccacagacatgtggagcatcggggtcatctgctacatcctagtcagtggcctttcccccttcatgggagacaacgataacgaaaccttggccaacgttacctcagccacctgggacttcgacgacgaggcattcgatgagatctccgacgatgccaaggatttcatcagcaatctgctgaagaaagatatgaaaaaccgcctggactgcacgcagtgccttcagcatccatggctaatgaaagataccaagaacatggaggccaagaaactctccaaggaccggatgaagaagtacatggcaagaaggaaatggcagaaaacgggcaatgctgtgagagccattggaagactgtcctctatggcaatgatctcagggctcagtggcaggaaatcctcaacagggtcaccaaccagcccgctcaatgcagaaaaactagaatctgaagaagatgtgtcccaagctttccttgaggctgttgctgaggaaaagcctcatgtaaaaccctatttctctaagaccattcgcgatttagaagttgtggagggaagtgctgctagatttgactgcaagattgaaggatacccagaccccgaggttgtctggttcaaagatgaccagtcaatcagggagtcccgccacttccagatagactacgatgaggacgggaactgctctttaattattagtgatgtttgcggggatgacgatgccaagtacacctgcaaggctgtcaacagtcttggagaagccacctgcacagcagagctcattgtggaaacgatggaggaaggtgaaggggaaggggaagaggaagaagagtgaaacaaagccagagaaaagcagtttctaagtcatattaaaaggactatttctctaaaactcaaaaaaaaaaaaaaaactcaagatagtaaaagcacctagtgtgatagattatcggttaggtcatttgtgggttgattcttcagaaacagcagttgatacctagcagcgttattgatgggcattaatctatgttagttggcaccttaagatactagtgcagctagatttcatttagggaaatcaccagtaacttgactgaccaattgattttagagagaaagtaaccaaaccaaatatttatctgggcaaagtcataaattctccacttgaatgcgctcatgaaaaataaggccaaaacaagagttctgggccacagctcagcccagagggttcctggggatgggaggcctctctctccccaccccctgactctagagaactgggttttctcccagtactccagcaattcatttctgaaagcagttgagccactttattccaaagtacactgcagatgttcaaactctccatttctctttccccttccacctgccagttttgctgactctcaacttgtcatgagtgtaagcattaaggacattatgcttcttcgattctgaagacaggtccctgctcatggatgactctggcttccttaggaaaatatttttcttccaaaatcagtaggaaatctaaacttatcccctctttgcagatgtctagcagcttcagacatttggttaagaacccatgggaaaaaaaaaatccttgctaatgtggtttcctttgtaaaccaggattcttatttgtgctgttatagaatatcagctctgaacgtgtggtaaagatttttgtgtttgaatataggagaaatcagtttgctgaaaagttagtcttaattatctattggccacgatgaaacagatttcaactgataaagagctggagaactccatgtactttggaatctcctccaagatagccagagtttaatacatcttcattctcaacactctccaaagaacttgacctaccttatgggttccatatttttcttcttaaatgtgcatcaatcatgccttgcccccaacctttaaatatattcttagacctggtaaatgcactcagacttgcgtctttaggaatttttaactttctttcactacattggcacttaaattttttctttataaagctttttgaaggtcataaacaaagaccataattgatgatagacctaatacatttcctctgtgtgtgtgtgtaacattccaaatactttttttttcttttccactgtttgtaaggtgcaacaatttaatatttttaagggactttttaagagttccttaagaaccaatttaaaattacttcagtgcaatcctacacagtatcaacattagaattttgatattagtcttatgttatcttccattctatttttatctgctttttgctgctagtttcaaactgccagtatttttccttttgcttttaaaatagttacaatatttttcatgatagccacagtattgccacagtttattataataaagggtttttatttgatttagcgcattcaaagcttttttctatcacttttgtgttcagaatataacctttgtgtgcgtgtatgttgtgtgtgtgcatgtgtggcgtatatgtgtgttacaggttaatgccttcttggaattgtgttaatgttctcttggtttattatgccatcagaatggtaaatgagaacactacaactgtagtcagctcacaatttttaaataaaggataccacagtgcatgctgtttgttcaaaaaaaaaaaaaaaaaa

SEQ ID NO: 31063 - DNA, 2676 bp, Homo Sapiens
ttggagctgtctcagcctgcagttgctttatataaaccatcccttttatgggagttgaagcactgtatgaaaagggtttttgtctcatgttgaccttgtttagtcacattaacgcacacatcagttccaggccccattccattctctgaacatcttctgacacactgacagtgctgagcagagcaaggttgggttcgctcctctggcagaacctcggctctcaggaggtccttgttccagggaacagctgcttctctggggctgggctctactccctgcagcccctcgcactacccagctggaaccagggacaacgcctgagtccaaccctcgtgtctattttccagaaaacgggcaatgctgtgagagccattggaagactgtcctctatggcaatgatctcagggctcagtggcaggaaatcctcaacagggtcaccaaccagcccgctcaatgcagaaaaactagaatctgaagatgtgtcccaagctttccttgaggctgttgctgaggaaaagcctcatgtaaaaccctatttctctaagaccattcgcgatttagaagttgtggagggaagtgctgctagatttgactgcaagattgaaggatacccagaccccgaggttgtctggttcaaagatgaccagtcaatcagggagtcccgccacttccagatagactacgatgaggacgggaactgctctttaattattagtgatgtttgcggggatgacgatgccaagtacacctgcaaggctgtcaacagtcttggagaagccacctgcacagcagagctcattgtggaaacgatggaggaaggtgaaggggaaggggaagaggaagaagagtgaaacaaagccagagaaaagcagtttctaagtcatattaaaaggactatttctctaaaactcaaaaaaaaaaaaaaaactcaagatagtaaaagcacctagtgtgatagattatcggttaggtcatttgtgggttgattcttcagaaacagcagttgatacctagcagcgttattgatgggcattaatctatgttagttggcaccttaagatactagtgcagctagatttcatttagggaaatcaccagtaacttgactgaccaattgattttagagagaaagtaaccaaaccaaatatttatctgggcaaagtcataaattctccacttgaatgcgctcatgaaaaataaggccaaaacaagagttctgggccacagctcagcccagagggttcctggggatgggaggcctctctctccccaccccctgactctagagaactgggttttctcccagtactccagcaattcatttctgaaagcagttgagccactttattccaaagtacactgcagatgttcaaactctccatttctctttccccttccacctgccagttttgctgactctcaacttgtcatgagtgtaagcattaaggacattatgcttcttcgattctgaagacaggtccctgctcatggatgactctggcttccttaggaaaatatttttcttccaaaatcagtaggaaatctaaacttatcccctctttgcagatgtctagcagcttcagacatttggttaagaacccatgggaaaaaaaaaatccttgctaatgtggtttcctttgtaaaccaggattcttatttgtgctgttatagaatatcagctctgaacgtgtggtaaagatttttgtgtttgaatataggagaaatcagtttgctgaaaagttagtcttaattatctattggccacgatgaaacagatttcaactgataaagagctggagaactccatgtactttggaatctcctccaagatagccagagtttaatacatcttcattctcaacactctccaaagaacttgacctaccttatgggttccatatttttcttcttaaatgtgcatcaatcatgccttgcccccaacctttaaatatattcttagacctggtaaatgcactcagacttgcgtctttaggaatttttaactttctttcactacattggcacttaaattttttctttataaagctttttgaaggtcataaacaaagaccataattgatgatagacctaatacatttcctctgtgtgtgtgtgtaacattccaaatactttttttttcttttccactgtttgtaaggtgcaacaatttaatatttttaagggactttttaagagttccttaagaaccaatttaaaattacttcagtgcaatcctacacagtatcaacattagaattttgatattagtcttatgttatcttccattctatttttatctgctttttgctgctagtttcaaactgccagtatttttccttttgcttttaaaatagttacaatatttttcatgatagccacagtattgccacagtttattataataaagggtttttatttgatttagcgcattcaaagcttttttctatcacttttgtgttcagaatataacctttgtgtgcgtgtatgttgtgtgtgtgcatgtgtggcgtatatgtgtgttacaggttaatgccttcttggaattgtgttaatgttctcttggtttattatgccatcagaatggtaaatgagaacactacaactgtagtcagctcacaatttttaaataaaggataccacagtgcatgctgtttgttcaaaaaaaaaaaaaaaaaa

SEQ ID NO: 31064 - DNA, 1454 bp, Homo Sapiens
aattgcttccggggagttgcgagggagcgagggggaataaaggacccgcgaggaagggcccgcggatggcgcgtccctgagggtcgtggcgagttcgcggagcgtgggaaggagcggaccctgctctccccgggctgcgggccatggccacggcggagcggagagccctcggcatcggcttccagtggctctctttggccactctggtgctcatctgcgccgggcaagggggacgcagggaggatgggggtccagcctgctacggcggatttgacctgtacttcattttggacaaatcaggaagtgtgctgcaccactggaatgaaatctattactttgtggaacagttggctcacaaattcatcagcccacagttgagaatgtcctttattgttttctccacccgaggaacaaccttaatgaaactgacagaagacagagaacaaatccgtcaaggcctagaagaactccagaaagttctgccaggaggagacacttacatgcatgaaggatttgaaagggccagtgagcagatttattatgaaaacagacaagggtacaggacagccagcgtcatcattgctttgactgatggagaactccatgaagatctctttttctattcagagagggaggctaataggtctcgagatcttggtgcaattgtttactgtgttggtgtgaaagatttcaatgagacacagctggcccggattgcggacagtaaggatcatgtgtttcccgtgaatgacggctttcaggctctgcaaggcatcatccactcaattttgaagaagtcctgcatcgaaattctagcagctgaaccatccaccatatgtgcaggagagtcatttcaagttgtcgtgagaggaaacggcttccgacatgcccgcaacgtggacagggtcctctgcagcttcaagatcaatgactcggtcacactcaatgagaagcccttttctgtggaagacacttatttactgtgtccagcgcctatcttaaaagaagttggcatgaaagctgcactccaggtcagcatgaacgatggcctctcttttatctccagttctgtcatcatcaccaccacacactgttctgacggttccatcctggccatcgccctgctgatcctgttcctgctcctagccctggctctcctctggtggttctggcccctctgctgcactgtgattatcaaggaggtccctccaccccctgccgaggagagtgaggaaaataaaataaaataacaagaagaagaaagaaagaaatcccacagaaacagataacctaacacagcccgtgcaacgtattttatacaatgctctgaaaatcatagtctcaatctagacagtcttttcctctagttccctgtattcaaatcccagtgtctaacattcaataaatagctatatgaaatcaaaaaaaaaaaaaaaaaaaaaaaaaaaaaaaaa

SEQ ID NO: 31065 - DNA, 4382 bp, Homo Sapiens
gatttacttggagaagatttgctatctggcaaaaagaatcagtcggatttgtcagatgaagagctaaatgatgatcttttgcagagtgataatgaagatgaagaaaatttcagttctcagggtgttacaattagtctgaatgctacatctggcatggttacatcatttgaactctctgacaacactaacgaccaatctggagaacaggaatctgagtatgaacaagaacaaggagaggatgaactggtttatcacaaatctgatggatcagaattgtatactcaagagtacccagaagaaggacagtatgaaggccacgaagctgagttgacagaagaccaaatagaatatgtggaagagccagaggaggagcagctttacactgatgaagtgttagacatcgagatcaatgaacctttagatgaatttacaggaggtatggaaacattggaacttcaaaaggacatcaaagaagaatcagatgaagaagaagaagatgatgaagaatctggacgattacgtttcaaaactgaaaggaaagaaggaacaattattaggctctcagatgtaactagagagagaaggaacattccagaaactttggagctttcagcagaggccaaggcagcattgcttgaatttgaagaaagggagcgacagcataaacaaggacgctacagctccaggcggggaggacggcgaggaggtccgctgatgtgtcgtggtgtgggggaccagaggagagagagcaccgagaggggcaggatgaaggaccacagacctgcgctgcttcctacacagcctcctgtcgtgatacttccagaggaggaattaatgagcgacctgatgccctaagatgacataagctgttggaccttgctacctaaagcctctagagagccccaggctccccctccaccgcctccgccgcctcagcagcagccgatcagaagcctgttccagccgcagccgctgcagccgctgcttccggtgcagcacccgcaccacccatccccgcctcagggaatgcacatgcctccccagctagagaccccaaggatgatgatgaccccgccacccgtgactccacagcagcccaagaacatacacatcaacccgcacttcaaagggacggtggtcacgcctgttcaagtgcccttgctaccagttccgagccagccgagacctgccgtgggaccccagagattcccaggccctccagaatttccacagcatacacctggacctgttcccaacagtttcagccagcccccacgactccctctccaggaccagtggagagccccacccccgcctcaggatcgagaccctttcttcttaggagtttcaggtgaaccaagattcccgagccatctttttctggaacagcgaagtccccctccaccaccaccgcctcctacccttcttaacagtagccatcctgttcctactcagagtcctctaccattcactcagccaggaccagcatttaatcagcaaggacagcagccagtgttcccaagagagcggcccgtacgaccagccttgcagcctccaggtccggtggggattctgcactttagccagcctgggtcggcaaccacacggcccttcattcctcctagacagccgttcctgccaggcccaggacagccgtttctgcccacacacacacagcccaacctgcaggtaatgcatcctgagtgaacctccagggaaaaaatgtgtagcttcaaggctttgtgttccataaagtttcagatttttatttgagcctactaatttgtggttatttaaagaatagagtattagtctcaaatgtactgtttgttaaagacaacttttttcaacaatgttacttatctcaatacaagaaaaaaatgggaaaatgtcattttttgggaattgaaaaatgctacttattataattgtttaaagggtatactactaataaaattaggacatgttttgataatacatttgctcatctgtataaaatttcatgagaggtttaccagtggaaatactttgtcaaattatattcctgcagtagacagttttgaaaagagtctttgcatggagggaagaagatgttgctgttcactggttatttgaaggccttgagtgccctctgccgaccggcttctgcttcatgggttttcactggttatttgaaggccttgagtgccctctgcccatcggcttctgcttcatgggttgacatgcgtctgtaacatctttcttaccaagtgtatatttcttcttgtattgtagggttactattaaaatacatagcgatggtaaacttgaatcaactatttaaaaatacgtggaatacgtatctaagccaaaaacggaaaatgaatattatctagggtgttaaaggaagataaaatgtttttaagaatttttctttttattaaaaaaatgcaattaatacatccccattgcagaaattttcaagtatatataagaaaggaaattaaatactctcgttacctagaaacaattcaggagcttttttttttgtctttttttaaatgcacatcttctcgccacctgctttttccctccagtgtcacatatcatttgatcttttcatgtcagcgagttggttttgatgccatcgtttgagagtgctgtatgcggttccctttcatgctgtctgtgtggttgcatgtgtgtatactggtttcagtactttagtatcatagtgctacagggaacatgctttagagttatgagtttgtctgcatacctagttttccttaggacaattcaatcctagaattactggattaaatataaaatttaaggtaatagcttctggcttattactgcattttagatagtattaccttcatcagcaagtctaaaatgaagttttggtatcgctgaaagttcctttcttgtgttgaggttttttaggaaatgattgaagtgattatgcccggtgtaaccatttatgaactgttgtttctctttctttggaaatggaaggggccgttgcatcctccattgccccctccgcatcagcctcagcctcagcaacctcagcaacagcccccgccacagcaccagcctccgcaccagcccccgcaccagcccccgccccagcaccagcccccaccccagcacccaccacagcacccgccgcagcaccagcaccaccaccaccaccaccacctgtccgtcccgccccctcctttgatgccgatgtctcagccacagttccggcctcacgtacagaccgctcagcctcaggccagcagcagccggatgcagtgcccccagcgccaggggctccggcataatacaacttctcagaatgtaagcaagcggcccatgcagcaaatgcagcccactgcgccaaggaacagcaatttgcgtgaattacccatagcgccgtcacacgtgatagaaatgagcagcagccgctgctctgccacgccctcagcacaagtgaaacctatcgtcagcgcgtcaccaccctcgcgggccgtggcgggttccagaagctcacagggaaagacggaagtgaaagtcaagccagctagccctgtggctcaacctaaagaagaggcaaaaacagaaacagagtttcctgatgaagatgaggaaacaaggttatatcgcttaaagatagaagaacagaaacgcctaagagaagaaatcctgaaacagaaggagttacggcggcagcagcaggctggtgccaggaagaaggagctgctggagagactcgcgcagcaacagcagcagctgtacgctcccccacccccagcagagcaggaagagcaggcactgtcaccatcacccaccaacggtaacccactgttgccctttccaggtgcacaggtcagacaaaatgtgaagaacagacttcttgttaaaaaccaggatgtcagtatttcaaacgttcagcccaaaacatccaattttgtaccatccagtgccaacatgcagtatcaaggacaacagatgaaagcactgaaacatttgagacagaccagaacagttcctcaaagtcagactcagccgctgcataaagtgctcccgatcaaacctgcagatgtggaggagccagctgtcccccagactcctcgagtggcgtccatccagggccggccccaggacacaaagcctggcgtgaaaaggactgtcacgcacaggacaaacagtggtggtggagacgggccccacatcagctccaaggtcagggtgattaagctgtcaggtggggtaagttgacaagttttatgagagcctctttgagtctgtgtatcacatagaatgtcctcatttgcagagaatgtttttgaagaaagaattaaaagttacctctgttatagtcttgtaaaaaaaaaaaaaaaaaaaaaaaa

SEQ ID NO: 31066 - DNA, 2110 bp, Homo Sapiens; identical to SEQ ID NO: 26052

SEQ ID NO: 31067 - DNA, 2630 bp, Homo Sapiens
gaatagtcaggcctttctggaagcccagtgccacagtctgcactgagcttggctcaggaaagaagggaaatccaggcggggcctgttgggcccaggtcttgagctcttttggctccagagttcccaacacagtcatggatcaaaactcagtgcctgaaaaggctcagaatgaggcagacaccaataacgcagataggttctttcgctctcactcatcacccccacaccacaggccaggccacagcagagctctccaccattacgagttgcaccatcacggcgtgccccaccaacgtggtgaatctcaccaccctccggagttccaagacttccacgaccaagccttgtcctcccatgtccaccaatctcaccaccacagcgaggcacggaatcacggcagagcccatggccccacaggctttggtctggctccctctcaaggcgccgtcccctcccaccgttcctacggtgaggactaccatgatgagctccaacgtgatggcaggaggcatcatgatgggtcccaatacagtgggttccatcagcagagtgactcccattaccatagggggtctcaccatggcagaccccaatatctcggtgagaatttatcccactattcctctggcgtgccccaccacggtgaggcttcccaccatggtgggtcctacctcccccatggacccaatccctacagtgagtccttccaccacagcgaggcttcccaccttagcgggctccaacacgatgagtcccagcatcaccaagtcccccaccgtggctggccccaccatcaccaagtccaccaccatggcaggtcccgtcatcatgaagcccaccagcatggaaagtctcctcatcacggagagaccatttcccctcattcctctgtggggtcctaccagcgtgggatatctgactatcacagcgagtaccaccaaggtgatcaccaccccagtgagtaccaccatggcgaccatccccaccacacacagcaccactaccaccagacccaccggcaccgagactaccatcagcaccaagaccaccacggcgcgtatcattccagttacctccatggcgactacgtccagagcacttcccaactctctatcccacacacatcccggagcctgattcacgatgcccccggccctgctgcttctcgtacaggagtcttcccctatcacatagcacacccacggggctcggctcacagcatgactcggtcctccagcacaatccgctcacgtgtcacccagatgtccaaaaaagtccatacccaggatatctccaccaaacattcagaagactggggcaaagaagaagggcaatttcagaaacgcaaaaccggccggctccagcggacccgcaagaagggacactctaccaatctcttccagtggctgtgggaaaagctaaccttcctcattcagggcttccgggaaatgatccggaacctgacccaatccttggcctttgaaactttcatcttcttcgttgtctgcctcaacaccgtcatgctggtggcccagaccttcgctgaagtcgagatccggggcgagtggtacttcatggccttggactccatattcttctgcatctacgtggtggaagccctgctcaagatcatcgccctgggcctctcgtacttctttgacttctggaacaatttggacttcttcattatggccatggccgtgctggacttcttgctgatgcagacccactccttcgccatctaccaccaaagcctcttccggatcctcaaggtcttcaagagcttgcgggccctgagggcaatccgggtcctgcggaggctcagcttcctgaccagcgtccaggaagtgacagggaccctgggccagtccttgccgtccatcgcagccatcctcatcctcatgtttacctgcctcttcctcttctccgcggtcctccgggcactgttccgcaaatctgaccccaagcgcttccagaacatcttcaccaccatcttcaccctcttcaccttgctcacgctggatgactggtccctcatctacatggacagccgtgcccagggcgcctggtacatcattcccatcctcataatttacatcatcatccagtacttcatcttcctcaacctggtgattactgtcctggtggatagcttccagacggcgctgttcaaaggccttgagaaagcgaagcaggagagggccgcccggatccaagagaagctgctggaagactcactgacggagctcagagctgcagagcccaaagaggtggcgagtgaaggcaccatgctgaagcggctcatcgagaaaaagtttgggaccatgactgagaagcagcaggagctcctgttccattacctgcagctggtggcaagcgtggagcaggagcagcagaagttccgctcccaggcagccgtcatcgatgagattgtggacaccacatttgaggctggagaagaggacttcaggaattgaccccaggaggacaccagatacagacttcagcccctggcagtctgcccacctgggtgcactgggacgggtccccagatctgctggaatgattgtccgggccctgcagagcaggggccccaacagagtttttaaaccccaaaaaaaaaaaaaaaa

SEQ ID NO: 31068 - DNA, 2354 bp, Homo Sapiens
ggaggaagcggtggctgctgcggatgtcggtgtgagcgagcggcgcctgaacacacggcggctgccgagcgcctgacccgggcctgcgccagagcctgcaccgagctccggggccccacacccgctacggtggccctgcgcccgttgctactgaggcggcgtgctctgcattcttcgctgtccaggcctgccggctctggtgtctgctggctcctccttgctcgcctgctccctcctgcttgcctgagtcaccgccgccgccgccgccacagccatggccgagagtggtgaaagcggcggtcctccgggctcccaggatagcgccgccggagccgaaggtgctggcgcccccgcggccgctgcctccgcggagcccaaaatcatgaaagtcaccgtgaagaccccgaaggaaaaggaggaattcgccgtgcccgagaatagctccgtccagcagtttaaggaagaaatctctaaacgttttaaatcacatactgaccaacttgtgttgatatttgctggaaaaattttgaaagatcaagataccttgagtcagcatggaattcatgatggacttactgttcaccttgtcattaaaacacaaaacaggcctcaggatcattcagctcagcaaacaaatacagctggaagcaatgttactacatcatcaactcctaatagtaactctacatctggttctgctactagcaacccttttggtttaggtggccttgggggacttgcaggtctgagtagcttgggtttgaatactaccaacttctctgaactacagagtcagatgcagcgacaacttttgtctaaccctgaaatgatggtccagatcatggaaaatccctttgttcagagcatgctctcaaatcctgacctgatgagacagttaattatggccaatccacaaatgcagcagttgatacagagaaatccagaaattagtcatatgttgaataatccagatataatgagacaaacgttggaacttgccaggaatccagcaatgatgcaggagatgatgaggaaccaggaccgagctttgagcaacctagaaagcatcccagggggatataatgctttaaggcgcatgtacacagatattcaggaaccaatgctgagtgctgcacaagagcagtttggtggtaatccatttgcttccttggtgagcaatacatcctctggtgaaggtagtcaaccttcccgtacagaaaatagagatccactacccaatccatgggctccacagacttcccagagttcatcagcttccagcggcactgccagcactgtgggtggcactactggtagtactgccagtggcacttctgggcagagtactactgcgccaaatttggtgcctggagtaggagctagtatgttcaacacaccaggaatgcagagcttgttgcaacaaataactgaaaacccacaactgatgcaaaacatgttgtctgccccctacatgagaagcatgatgcagtcactaagccagaatcctgaccttgctgcacagatgcagaatcctgatacactatcagcaatgtcaaaccctagagcaatgcaggccttgttacagattcagcagggtttacagacattagcaacggaagccccgggcctcatcccagggtttactcctggcttgggggcattaggaagcactggaggctcttcgggaactaatggatctaacgccacacctagtgaaaacacaagtcccacagcaggaaccactgaacctggacatcagcagtttattcagcagatgctgcaggctcttgctggagtaaatcctcagctacagaatccagaagtcagatttcagcaacaactggaacaactcagtgcaatgggatttttgaaccgtgaagcaaacttgcaagctctaatagcaacaggaggtgatatcaatgcagctattgaaaggttactgggctcccagccatcatagcagcatttctgtatcttgaaaaaatgtaatttatttttgataacggctcttaaactttaaaatacctgctttatttcattttgactcttggaattctgtgctgttataaacaaacccaatatgatgcattttaaggtggagtacagtaagatgtgtgggtttttctgtatttttcttttctggaacagtgggaattaaggctactgcatgcatcacttctgcatttattgtaattttttaaaaacatcaccttttatagttgggtgaccagattttgtcctgcatctgtccagtttatttgctttttaaacattagcctatggtagtaatttatgtagaataaaagcattaaaaaaaaaaaaaaaaaaaaaaaaaaaaaaaaaaaaaaaaaaaa

SEQ ID NO: 31069 - DNA, 5525 bp, Homo Sapiens
gaagcgccgccgccaccgccgcctttgctgtcccccggcctctagttccccgcaggtgggaggtgggagccatgtcgaaacggctccggagcagcgaggtgtgcgctgactgcagcgggccggatccttcctgggcatcagtaaataggggaacgtttttatgtgatgagtgctgcagtgtccatcggagtctagggcgccatatctcccaagtgaggcatctgaaacacacaccgtggcctccaacactgcttcagatggttgagaccttgtataataacggtgctaactctatatgggagcattctttgctggaccctgcgtctattatgagtggaagacgtaaagctaatccacaggataaagtacatcccaataaagcggaattcatcagagccaagtatcagatgttagcgttcgtccatcgcttgccctgccgggatgacgatagtgtgactgccaaagatcttagcaagcaactccattcgagcgtgagaacagggaatcttgaaacctgtttgagactgttatctttaggagcacaagccaacttctttcatcctgaaaaaggaaacaccccactccatgttgcctccaaagcagggcagattttacaggctgaattattggcagtatatggagcagacccaggcacacaggattctagtgggaaaactcccgttgattatgcaaggcaaggagggcaccatgagctggcagagcgcctcgtggaaatacagtatgagctaacggacagactagccttctatctctgtggcaggaaaccagatcacaaaaatggacagcactttataatacctcaaatggcagacagcagcctggatttgtctgaattggcaaaagctgctaagaagaaacttcaatctctaagtaatcatttgtttgaagaacttgccatggatgtgtacgatgaagttgacaggcgagagacggatgcagtctggcttgccacgcaaaaccacagcgccctggtaaccgagacaacggtcgtcccctttcttccggtcaatcctgagtactcatcaacacgaaatcagggcagacagaagttagctcggttcaacgcccatgagtttgccacgctggtcattgacattctcagtgacgccaagaggagacagcagggcagttctctctcgggttcaaaagacaatgtggagctcatactgaaaaccatcaataaccagcacagcgttgagagtcaagacaacgatcagcccgactatgacagcgtggcatcagacgaagacacagatttggaaaccactgcaagcaaaacaaaccggcagaagagcctagattcagatttatcagatggaccagtcactgtacaggaatttatggaggtcaaaaacgctctagtggcttctgaggccaagatacagcagctaatgaaggtgaataacaacttgagtgacgagctgagaattatgcagaaaaagcttcaaacactccagagtgaaaattcgaacctcaggaaacaggccacaaccaatgtatatcaggtgcaaactggttctgagtacacagacacttccaaccactcttccttaaagagacgtccgtctgcccggggcagtaggcccatgtccatgtacgagaccggatcaggtcagaaaccatatctcccaatgggagaagcgagccgccccgaagagagcaggatgagactccagcccttccccgcgcacatcgggaggagtgcacttgtgacctcctcttcatctctgccttccttcccctccacactttcctggtcgagggacgaaagcgcccgaagggcatccaggctggagaagcagaacagcacacctgagagtgactacgacaacactcccaacgacatggagccagatggcatggggtcaagccgaaagggacggcaaagaagtatggtgtggccaggggatggcttggtaccagacacagcagaaccccatgtggccccaagccccactctccctagcaccgaagatgtcatcaggaagactgaacagatcaccaaaaacatacaggagctcttaagagcagcccaagaaaataaacatgacagttatattccctgctcagagaggatacacgtagctgttacagaaatggcagcattattccccaaaaaacccaagtctgatatggtgaggacttcccttcgtttactgacgtccagtgcctaccgactgcagtcagagtgcaagaagaccctcccaggggaccccggctcacccacagacgttcagctggtcacgcagcaggtcatccagtgtgcgtacgacatcgccaaggctgccaagcagctggttaccatcaccaccaaagagaacaacaactgacaagggcagggcaccgcctcctctgttttctaggctttataaagtccaatttcaaattcagacgcagaactcttcagatttctacaaaaagaaacatttaatgacggtttaaaactttttaaaagaaaactcagtattatttttgcatgttttctaaccaattttcaactatttaacccacttgccttattttgtgcctatttgctggtttagtttctgatgttcggttgtgttgtcaacaactgttgagttgatcacatacatccaaaagtatagtttcattgtctaaagtttgtgaaaacttttccatcccttaaaactccctgcctatggctgaaactataaatgaaatttttcataaaacattttcttgagagagttcagttaaaaaagaaaaaatcagcgtcatttgttccctgccaagcatcgtgcaataagtgaatttcctggcctacttcataatctctaagtttggggtatctccaagcatgtatgtagagaaaggactttgccgctttttaaaactagtgtcacagtctctcttgggaggaaacaatgaattggttcatttcttctcagtgttttaccctgttacatgttctgttatttaatgttgttatctcaagctcctatctcttgatgttttcttgtcatcttgaaggctccatggaatgagataaagcattgacccaccacaggacatctcatgaagccatgttcagggtaggagctccacgcacatcaccacccattgtcaggtgctctccctcacccctgtaagccagacagtttgttcaaaacctgcagcaaagagaagcatcagtctaacaagccagaactcattttgtgccacccatttaggtatcactaccatgaactatagggaaaagaaatcacctactccctgacactgtgttgtacccttcatccaaaagtcagcttgcttctctgaccacttacagctttctcacatgagttgcttcacatttttcatcatctttaaggacttcttataaggaaagatgtatcgtatcgcagtcatctgagttagtttctcctccatcacctcatgagtacttaaaaattagacatcaactttcaagagttccttagagagtgtgctctagctggctgcctgctaccccaaagctctgaaagagtaaggttgaagtgctggaacatgctcagattgttttttagttactcaaaagccccttcttgttctgaatgtgaaagctcttcccgttcctgcttactgcagccattctgtgtgtgtggttcagaccctggcctagggccggtgatgtggatgagtgaagggagccaggtacacggcagcagggcagaggagactatggggagcccaccgcctacacagtaggggcagtagcccccagctccacgcctgttgccatgtggaaaagtgggcctagggtggccacagctttgatttttcaagagacaagaaacctagatgttttttggtgccatctctccatttataaatgttggcaaccaatttgaacactttcagagaccatgtgcaggtgagctgtgtcctctaggctgccagctcacagcccccaccccagggccctgtaagctgtgcagtgtgagggcctggcttccccggacacacctggagcagcctctgagtcttacccgtaatggagccggccaaccctgtgtgttatgttgctgtcgctcctgtttttaaccatatgttctgtcccatagcagtcattcacacatgtgaagaagacacaagaatcaaagtacaagttgcctcaatacatgctaataactaagcttctattttcacaggactgatcgatgcacacctttatagcttgaccatatgctgtcatgaaagtagcaccccgacggtgcttgctttactaagtcaccgtgtgtggatgcttttgtcgcattttgcttcactgtgagtagcatgggaaaagggtccacgtctccaaaagactcttccacttgtttgtcccacagccctaagtgccacattgctgttggatgctcccgggatgccttctagaagggggcctcccaccttaagttcaggcgccatctgatagccttttctgcaggcttcatgtccttagctgaccctcctttatcttgcaaacccctgcccctgctgtcccagggaggacgggcttctgtagaggcttctgggaaatgagctgtctgcaggaggtgaagcagtgttttccttggaatgtttgaggacctgcaatagaagatgttgcctttatggccctagagaaagtcaaggaacatggggaccaacaaagcatttccagttgtaagaatatgtcagaagagtgctcggttagcccacggtgccaaaactccaaacaagttccccggtggaatgacgtggccattggagggctgcaggtcgtcctctctgtatgtgccccgcgcatttccttggcctcatctgagatctggtgtcagagttctctgctcctgttggcaaatcgcaccttatctgaacatttgttccagccaccttttgcacatggattccgtaccttgcactagcaatgtctaccttcagtaacgtcgttctttttcaccctgtattctcaatgatcccttcctccccatatgccacccttcccccaaagctgatagggcagaggtgcactttatgaaactggcacttgactgaacagaaggaaacagctgtacctctaagctcctttcacagaaatcgtcatctgccttggaatgcaaatagttcttatttgccaaagaacagtgaattgggcccaaagatcaaacacagcatttcatgtaatcagaattctaaacgcacaactcgggagctgtgcacggcttctcaagtgattcagttgcagaaccaagagcaaaactcgcctgtttttgtcctcaatggcacccatgagctttccaatagtatagttttctttctttccttgtcctggttgaaggtaacgtgttcctagaaaagaaaatgctgcataggaaaactgagatgccttttattccaacgtgtttgatccctgtcactcattattctgtactttttattgtacattctattcctgtaattattgtgccctttaagtgttgtaaaatcgttttggaatttgtgcctgctagttatgcaataaacaggctctacaagtg

SEQ ID NO: 31070 - DNA, 1726 bp, Homo Sapiens
acttgagggagtagggggccgggtttgggccctcagttgctaagggctacccgagtgggaagcggttcaagagatggggtgaagggtggttcaccggttcttcaagtcctcagccttctggcccgcggaagttaagcaaccaagaggcgggcctaagaccggaagcaggaaggagggcgcaggaagcagggcgccgcagcctgtcgtacggtccttctgtgggtctgtcggtgccgagggcaggatggagaagctgcggctcctgggcctccgctaccaggagtacgtgactcgtcacccggccgccacggcccagctggagacagcagtgcggggcttcagttacctgctggcaggtcgattcgccgattcgcacgagctgtcagagctggtgtactctgcctctaacctgcttgtgctgctcaatgacgggatcctacggaaggagcttcggaaaaagttgcctgtgtcgctgtcccagcagaagctgctgacatggctgagcgtgctggagtgcgtggaggtgttcatggagatgggagctgccaaggtgtggggtgaagtgggccgctggcttgtcatcgccctcatccagctggccaaggctgtactgcggatgctcctgctgctctggttcaaggctggcctccagacttcaccccctatcgttccactggacagagagacccaggcacagcccccggatggtgaccacagccctggcaaccatgagcagtcctacgtggggaagcggtcaaaccgggtggtgcgaaccctccagaacacgccgtccctgcactccaggcactggggagctccccagcagcgggagggacggcagcagcagcatcacgaggagctgagtgcgacccccacccccctggggctgcaggagaccatcgcagagtttttgtacattgcccggccgctgctgcacttgctcagcctgggcctgtggggtcagaggtcgtggaaaccctggctcttggctggtgttgtggacgtgaccagcctgagcctcctgagtgacagaaagggcctgacccggagggagcggcgggagctgcggcgccggaccatcctgctgctctactacctgctgcgctctcctttctacgaccgcttctccgaggccaggatcctcttcctgctccagttgctggccgaccacgtccctggcgttggcctggtcacaacgtcccagcgtgcggcctctccgtgcctaccggccaggccccacacacagccctggtcgccaccagcgttcctcccaggacacccttgactgcgctctcctgtgacgatgccactgcagcccgcaccttgtcactgctgggccaagaagccttcactaggagtgggatccaggctcctctcccacagaaagcggtgacttcacctcatggagcccgggaagctgcttgcctcggcagccataggagcgaacactgctgctctctcgctggcccctggtgaggacaggaagcctgaacccgggtgatggctgaacgctgcccagcgtgtcttctggctggggccctccgtctgccccttctccgcagggccctgtggctctggcagccccaggccatggcgttgccagcctccctgtgacagagcctggtgaacagtgagcctggctcccacgcaagtggcactttaagccctgcatcctcggttgagagtaaaaggcttttctcccttaaaaaaaaaaaaaaaaaaaaaa

SEQ ID NO: 31071 - DNA, 5574 bp, Homo Sapiens
ttttggctgcctctgtcggtctgttcagttaccacgtgaaccgccgacggagacccgtagtgggggaggcggcggcagcgttaagtgagaaaggaaaaaagacaacgaggaaaaaggaggtgtccgggtagggcaacgcggcgacacccgaggcctggtggtggcggcggatcgagatattcaaggctgaagcagctacggaacggcagcggcggcggtcggacaaactgactgaccgagccgggtggtggcgggagcagcgggagcagccggaacgatgccggccgtgagcctcccgcccaaggagaatgcgctcttcaagcggatcttgaggtgttatgaacataaacagtatagaaatggattgaaattctgtaaacaaatactttctaatcccaaatttgcagagcatggagaaaccttggctatgaaaggattaacattgaactgtttggggaaaaaggaagaagcttatgaattggttcgtagaggtttgagaaatgacttgaagagtcatgtgtgttggcacgtttatggccttcttcagaggtcagacaagaagtatgatgaagccattaagtgttacagaaatgcactaaaatgggataaagacaatcttcaaatcttaagggacctttccttactacagattcaaatgcgagatcttgagggttacagggaaacgaggtatcagttacttcagcttcgacctgcgcagagagcatcatggattggttatgctattgcttaccatttattagaagattatgaaatggcagcaaagattttagaagaatttaggaaaacacaacagacatcccctgacaaggtggattatgaatatagtgaactactcttatatcagaatcaagttcttcgggaagcaggtctctatagagaagctttggaacatctttgtacctatgaaaagcagatttgtgataaacttgctgtagaagaaaccaaaggggaacttctgttgcaactatgtcgtttggaagatgctgcagatgtttatagaggattgcaagagagaaatcctgaaaactgggcctattacaaaggcttggaaaaagcactcaagccagctaatatgttagaacggctaaaaatttatgaggaagcctggactaaatatcccaggggactggtgccaagaaggctgccgttaaactttttatctggtgagaagtttaaagaatgtttggataagttcctaaggatgaatttcagcaagggttgcccaccagtcttcaatactttaagatcattatacaaagacaaagaaaaggtggcaatcatagaagagttagtagtaggttatgaaacctctctaaaaagctgccggttatttaaccccaatgatgatggaaaggaggaaccaccaaccacattactttgggtccagtactacttggcacaacattatgacaaaattggtcagccatctattgctttggagtacataaatactgctattgaaagtacacctacattaatagaactctttctcgtgaaagctaaaatctataagcatgctggaaatattaaagaagctgcaaggtggatggatgaggcccaggccttggacacagcagacagatttatcaactccaaatgtgcaaaatacatgctaaaagccaacctgattaaagaagctgaagaaatgtgctcaaagtttacaagggaaggaacatcagcggtagagaatttgaatgaaatgcagtgcatgtggttccaaacagaatgtgcccaggcttataaagcaatgaataaatttggtgaagcacttaagaaatgtcatgagattgagagacattttatagaaatcactgatgaccagtttgactttcatacatactgtatgaggaagattacccttagatcatatgtggacttattaaaactagaagatgtacttcgacagcatccattttacttcaaggcagcaagaattgctatagagatctatttgaagcttcatgacaacccccttacagatgagaataaagaacacgaagctgatacagcaaacatgtctgacaaagagctaaagaagctacgtaataaacaaagaagagctcaaaagaaagcccagatagaagaagagaaaaaaaatgcagaaaaagaaaagcagcagagaaatcagaaaaagaagaaggatgatgatgatgaggagataggaggtccaaaagaagaacttattccagagaaactggccaaggttgaaactccattggaagaagctattaaatttttaacaccgttgaagaacttggtgaagaacaagatagagactcatctttttgcctttgagatttactttaggaaagaaaagtttcttttgatgctacaatcagtaaagagggcatttgctattgattctagtcatccctggcttcatgagtgtatgattcgtctctttaatactgcagtgtgtgaaagtaaagatttatctgatacagttagaacagtattaaaacaagaaatgaatcgtctttttggagcaacgaatccaaagaattttaatgaaacttttctgaaaaggaattctgattcattgccacacagattatcagctgccaaaatggtatattacttagatccttctagtcagaagcgagctatagagttggcaacaacacttgatgaatctctcactaacagaaacctccagacatgtatggaggtattggaagccttgtatgatggtagcctaggagactgtaaagaagctgctgaaatttatagagcaaattgtcataagcttttcccttatgctttggctttcatgcctcctggatatgaagaggatatgaagatcacagttaatggagatagttctgcagaagctgaagaactggccaatgaaatttgaacatcactaaacaagcaaatggaatgactttggaccatatctagtatataatatttttgtcacgcacctgctgcattgctctaacttacacagaatgagaggagtaaatgttcttgccttcaaatagtgttttacgttttttatcctgctgaaaaagtatatataaaatatctaacattacaggatagaggttcagtttcttaaaaaattaaagctgctaaaattgagtggttaaaaaagataccttatcctattcctccccacccacccatgtttttaaactaatttatataaaatctggaggctgttacagctaacaaagcaggtgtgtggcagaaatattactttaaatttgtcttgtgagattttactatatctcagacagcataaatgctgttttagcactggattctttcactgagcacaaagagttgttggggctttagcatctgactgattttgttacggggttgattctgaccataggaagtatgcaatgtgaatcactatttacagagaaacctacaacagatgcttgatgttgtagaaactgggacatatagataccaagcaaaattataagaaacctataaggtgttcaatacgcttgtgtttccaaaattcactgtacatgatcagtttggtgttcttgtaccacagtttttaactgaaggaaccagttgtaacagtctcaattttaactaaaacttgaagaactaaaacaacaatgcaaacctttcagcattgtttggccaaacttgttaaaactgtaatgcaagaaccaaatgcactgtgatgtggcaccaactaattagcaagcatgaatttttcacccaagagtgaaaaaaggaaaatctaccatggcttgaagttaaagagcagaactcctgactaccattctatgactgatcaaaagactaatagttaaaaacctcagcaggccttgttcacgatatgcagaaaaaaaagtgctgcagtttagatacctctggaatttttccacagtgtcacaggtttgtaatacttgaagccctacatttctaagaatatatttcttgctcagttgtttcaggcaagcccaagactttgtaatttttaaagggcccaagatttttttttttttttttttttcaaataacagaccagcttctttttcttgcagttacagatgtaatttcctttttgttgtcaaacataaggtaccaaatatgatgcaataaattgttttgaaaaacagttgtgtgaatatttcaactaatctgtgttgggcttctgtgaaatacacaggtggaaacagaggtgcaagccagaggcaatgtaatatgctgtaaggctagtgcagatgggagctttttagaaggggctaagtgctggtgtcagggaaattccataatgaagtagaatgctgctcctgcattaagatttcattgagggcaaggctggtggcaggtactatgaatgtaattcataatttaaaaggaaaactaaaaactattttgatttgggaaaatgagccttaatttgttaaacctatacactgagaactagcctcaggcttaatattctcattgcatttgcaagatctgagcaaataagattaagtaaaacaaatcaattgtatatataattgacctttttgtggaacatgtagtttatagaaagtatactctaaagggaatttgccgaagaccttttactgattgaacagttgtgctacaatcaacttttcatagtacatgacctgcattccacatctcagtctaacagtttagtagtgatgtaaagagaagtacaaaccgaactccagtgctttgttatgttttattaactggccctgtctcaggaacatcttaacagatggcaaaaaaacaaaaactttttttcaactcctatgagtggcaactgaagttcttattgttgggaaagaacactagtcctacctctgccactaatgaggtgtttggaggaggtaccagccatataatagggggtgtatgtgtgaattttgtttaaactctactgtatattgaaatgaaattcatttatttgtcttgacaatgttcaaatgatgtagattgtcttagaatgaatattcataagtactcagaactcttaagatgcagatgccacccgtgaggagctaaattcctaatgtgtattgtattccaacccaattttactggaactattgaataaatcttttattttctttcaggtttacttgatagtggatacattggtgtcagaggaccttgactgggttcattttatgtccagacatcacccctgaaacactgtactgtactatcttgctctgagtagtatcaactggatcgtctcatatttgcctcattcatcctattaatttcaaatgatactgtgggggaaaaacagggttagaaaaacaagtggaaaaaatggagtgatgttgtaatctaaacaagtgccttatgtttattgctaagaactggtgttaccaacccttttgagaagaaagggtctcttgacctgtattaacataggaaagtaaagttctttttgtttttctttataagctactcttgtcatttctcgttgaaaaactaaaatctgactaggttagtttactcagctttaattagatagttgagtcatatattttcaacatttttctgtatcgtatttattatgcacaaaaataaagtgtgatctctaat

SEQ ID NO: 31072 - DNA, 1891 bp, Homo Sapiens
ttcctggggccgcccgtgaggatgtcgcgaccgcccccgggtgcccctcagccccagagacgccgccgcggcggagtccgcagcctccctgcctgaggcgtccgcggccgggatccggcccctcccctcgcctcctctcctaggtgccggccgggagggcggccgcagcagattttatcatgtgggcaacctgctgcaactggttctgcctggatggacagcctgaggaggtcccaccaccccagggagccaggatgcaggcctattccaaccctgggtacagctccttcccttccccaacaggcttggaaccaagctgcaagtcctgtggggctcactttgcaaacacggccaggaagcagacctgcttggactgtaagaaaaatttttgcatgacctgttcgagccaagtagggaatgggccccgcctctgccttctctgccaacggtttcgagctacagcctttcagcgagaggagctcatgaagatgaaggtgaaggacttgagggactatctcagcctccatgacatctctaccgaaatgtgccgggagaaagaagagctggtgctcttggtccttggccagcagcctgtaatctcccaggaggacaggactcgtgcctccaccttgtccccagactttcctgagcagcaggccttcctgacccagcctcactccagcatggttccacctacctcacccaacctcccctcttcatctgcacaagccacctccgttcccccagcccaggttcaggagaatcagcaggccaatggccatgtgtctcaggatcaagaggaacccgtctacctggagagcgtggccagagtacctgctgaggatgagacccagtctattgactcagaggacagctttgtcccaggccgaagggcctctctgtctgacctgactgacctggaggacattgaaggcctgacagtgcggcagctgaaagagatcttggctcgcaactttgtcaactacaagggctgctgtgagaagtgggagctgatggagagagtgacccggctatacaaggatcagaaaggactccagcacctggtcagtggtgccgaagaccaaaacgggggagcagtaccatcaggcttggaggagaacctgtgtaagatctgcatggactcacccattgactgtgttcttctggagtgtggccacatggtaacctgtaccaagtgtggcaagcgcatgaatgaatgtcccatctgccggcagtatgtaatccgagctgtgcatgtcttccggtcctgagagcttgcatcggtttcttcagtgccttacagggaaatagcctggggtgtctgggctcagggttggccagcttgcagaggagcaagctagtagaaatattgcagggttcccaaaaccaggtcaagcaagatgccatgtcacccctgagcatgcctgtcttcccaggggtgtacctcttggctggcaaagcccaaggccagtgggaacttgtataaatcacatgggtatgttcttggttcagtgatcttggagtgatgatggtaactgatgaacagagaactttccagaacttgggtcctgtcttcctccctgaacctagacagtttcacccctcctcctgtacccaacccatccccaccccatatgggagatgcttgcccatgtgtttcatcaatcagaagtcctcctccccagcacattcggatttaaatttctggtctctccggctttctgtgctttaactatctttgctaaagtctcttgctacattgcctaaatccatttgtttctttggaccaaaaatgttagtttaccagaccgatagtggtccttaggacagattttagaccagtaaacttatctttggtgagaaatgaaatacaaatgctatagaaaaattt

SEQ ID NO: 31073 - DNA, 2748 bp, Homo Sapiens
agcgggtgcggggcgggaccggcccggcctatatattgggttggcgccggcgccagctgagccgagcggtagctggtctggcgaggttttatacacctgaaagaagagaatgtcaagacgaagtagccgtttacaagctaagcagcagccccagcccagccagacggaatccccccaagaagcccagataatccaggccaagaagaggaaaactacccaggatgtcaaaaaaagaagagaggaggtcaccaagaaacatcagtatgaaattaggaattgttggccacctgtattatctggggggatcagtccttgcattatcattgaaacacctcacaaagaaataggaacaagtgatttctccagatttacaaattacagatttaaaaatctttttattaatccttcacctttgcctgatttaagctggggatgttcaaaagaagtctggctaaacatgttaaaaaaggagagcagatatgttcatgacaaacattttgaagttctgcattctgacttggaaccacagatgaggtccatacttctagactggcttttagaggtatgtgaagtatacacacttcatagggaaacattttatcttgcacaagacttttttgatagatttatgttgacacaaaaggatataaataaaaatatgcttcaactcattggaattacctcattattcattgcttccaaacttgaggaaatctatgctcctaaactccaagagtttgcttacgtcactgatggtgcttgcagtgaagaggatatcttaaggatggaactcattatattaaaggctttaaaatgggaactttgtcctgtaacaatcatctcctggctaaatctctttctccaagttgatgctcttaaagatgctcctaaagttcttctacctcagtattctcaggaaacattcattcaaatagctcagcttttagatctgtgtattctagccattgattcattagagttccagtacagaatactgactgctgctgccttgtgccattttacctccattgaagtggttaagaaagcctcaggtttggagtgggacagtatttcagaatgtgtagattggatggtaccttttgtcaatgtagtaaaaagtactagtccagtgaagctgaagacttttaagaagattcctatggaagacagacataatatccagacacatacaaactatttggctatgctggaggaagtaaattacataaacaccttcagaaaagggggacagttgtcaccagtgtgcaatggaggcattatgacaccaccgaagagcactgaaaaaccaccaggaaaacactaaagaagataactaagcaaacaagttggaattcaccaagattgggtagaactggtatcactgaactactaaagttttacagaaagtagtgctgtgattgattgccctagccaattcacaagttacactgccattctgattttaaaacttacaattggcactaaagaatacatttaattatttcctatgttagctgttaaagaaacagcaggacttgtttacaaagatgtcttcattcccaaggttactggatagaagccaaccacagtctataccatagcaatgtttttcctttaatccagtgttactgtgtttatcttgataaactaggaattttgtcactggagttttggactggataagtgctaccttaaagggtatactaagtgatacagtactttgaatctagttgttagattctcaaaattcctacactcttgactagtgcaatttggttcttgaaaattaaatttaaacttgtttacaaaggtttagttttgtaataaggtgactaatttatctatagctgctatagcaagctattataaaacttgaatttctacaaatggtgaaatttaatgttttttaaactagtttatttgccttgccataacacattttttaactaataaggcttagatgaacatggtgttcaacctgtgctctaaacagtgggagtaccaaagaaattataaacaagataaatgctgtggctccttcctaactggggctttcttgacatgtaggttgcttggtaataacctttttgtatatcacaatttgggtgaaaaacttaagtaccctttcaaactatttatatgaggaagtcactttactactctaagatatccctaaggaatttttttttttaatttagtgtgactaaggctttatttatgtttgtgaaactgttaaggtcctttctaaattcctccattgtgagataaggacagtgtcaaagtgataaagcttaacacttgacctaaacttctattttcttaaggaagaagagtattaaatatatactgactcctagaaatctatttattaaaaaaagacatgaaaacttgctgtacataggctagctatttctaaatattttaaattagcttttctaaaaaaaaaatccagcctcataaagtagattagaaaactagattgctagtttattttgttatcagatatgtgaatctcttctccctttgaagaaactatacatttattgttacggtatgaagtcttctgtatagtttgtttttaaactaatatttgtttcagtattttgtctgaaaagaaaacaccactaattgtgtacatatgtattatataaacttaaccttttaatactgtttatttttagcccattgtttaaaaaataaaagttaaaaaaatttaactgcttaaaagtaaaaaaaaaaaaaaaaaaa

SEQ ID NO: 31074 - DNA, 1353 bp, Homo Sapiens
taatggcgggcgctgcagaagatgcgcgagctcttttccgggctggggtctgcgcggccctggaggcctggccggccttgcagatcgctgtggagaatggcttcgggggtgtgcacagccaggagaaggccaagtggctggggggtgcagtggaggattacttcatgcgcaatgctgacttggagctagatgaggtggaagacttccttggagagctgttgaccaacgagtttgatacagttgtggaagacgggagtctgccccaggtgagccagcaactgcagaccatgttccaccacttccagaggggtgatggggctgctctgagggagatggcctcctgcatcactcagagaaaatgcaaggtcacagccactgcacttaagacagctagagagactgatgaggatgaagatgatgtggacagtgtggaagagatggaggtcacagctacgaatgatggggctgctacagatggggtctgcccccagcctgaaccctctgatccagacgctcagactattaaggaagaggatatagtggaagatggctggaccattgtccggagaaaaaaatgagtggggatgattggaaatggctttgggcccttatttgctgttctaagagttgtctgtaggggttttttttttgaggattgcagacctgtggactggttaccccatctccaccctctcccctgttcctctgtctggctccctccagggcaaggaaaacctagggtccttggtcttgggggtggggggaccttttccagcatattcccctgggcctttagttaacatccgagtgacgaagccgggttccccagtacagtgtcttttgggtgcggtcattgtgaggaaggggatgagtgagtgtgggtgtggctggaggaggagctagatgccggtggacagtgggcaggtggatttggggaggagaggatcagcagcagcagcagtactcagtgatagggggctggctgggtcaggaatggtgagatgaacatgcaagtggaagagagaatagttgaaaatgtgaatgaaagtagctctggagcctctcccttaccccaccccacacacacgcaacagctctgtacccctgcccagaacttggaacctcccaggaatgctgccttccttcagcccagcctccagtcctgggttccctcaggaattcgaagaccttggctaggtggtgagcttggaagagctgggctttgttttctgtctcctctaacctctttccttactccttatcccatcccatttgagttcaggggtgaggcttaagatcttaataaataataccttactgcttaaaaaaaaaaaaaaaaaaaaaaaaaaaaaa

SEQ ID NO: 31075 - DNA, 3438 bp, Homo Sapiens
gcgcccgcgcctcgggccgtcgggagcggagcctcctcgggaccaggacttcagggccacaggtgctgccaagatgctccagggcacctgctccgtgctcctgctctggggaatcctgggggccatccaggcccagcagcaggaggtcatctcgccggacactaccgagagaaacaacaactgcccagagaagaccgactgccccatccacgtgtacttcgtgctggacacctcggagagcgtcaccatgcagtcccccacggacatcctgctcttccacatgaagcagttcgtgccgcagttcatcagccagctgcagaacgagttctacctggaccaggtggcgctgagctggcgctacggcggcctgcacttctctgaccaggtggaggtgttcagcccaccgggcagcgaccgggcctccttcatcaagaacctgcagggcatcagctccttccgccgcggcaccttcaccgactgcgcgctggccaacatgacggagcagatccggcaggaccgcagcaagggcaccgtccacttcgccgtggtcatcaccgacggccacgtcaccggcagcccctgcgggggcatcaagctgcaggccgagcgggcccgcgaggagggcatccggctcttcgccgtggcccccaaccagaacctgaaggagcagggcctgcgggacatcgccagcacgccgcacgagctctaccgcaacgactacgccaccatgctgcccgactccaccgagatcaaccaggacaccatcaaccgcatcatcaaggtcatgaaacacgaagcctacggagagtgctacaaggtgagctgcctggaaatccctgggccctctgggcccaagggctaccgtggacagaagggtgccaagggcaacatgggtgagccgggagagcctggccagaagggaagacagggagacccgggcatcgaaggccccattggattcccaggacccaagggcgttcctggcttcaaaggagagaagggtgaatttggagccgacggtcgcaagggggcccctggcctggctggcaagaacgggaccgatggacagaagggcaagctggggcgcatcggacctcctggctgcaagggagaccctggaaaccggggccccgacggttacccgggggaagcagggagtccaggggagcgaggagaccaaggcggcaagggggaccctggccgcccaggacgcagagggcccccgggagaaatcggggccaagggaagcaaggggtatcaaggcaacaatggagccccaggaagtcctggtgtgaaaggagccaagggcgggcctgggccccgcggacccaaaggcgagccggggcgcaggggagaccccggcaccaagggcagcccaggcagcgatggccccaagggggagaagggggaccctggccctgagggcccccgcggcctggctggagaggttggcaacaaaggagccaagggagaccgaggcttgcctggacccagaggcccccagggagctcttggggagcccggaaagcagggatctcggggagaccccggtgatgcaggaccccgtggagactcaggacagccaggccccaagggagaccccggcaggcctggattcagctacccaggaccccgaggagcacccggagaaaaaggcgagcccggcccacgcggccccgagggaggccgaggcgactttggcttgaaaggagaacctgggaggaaaggagagaaaggagagcctgcggatcctggtccccctggtgagccaggccctcgggggccaagaggagtcccaggacccgagggtgagcccggcccccctggagaccccggtctcacggagtgtgacgtcatgacctacgtgagggagacctgcgggtgctgcgactgtgagaagcgctgtggcgccctggacgtggtcttcgtcatcgacagctccgagagcattgggtacaccaacttcacactggagaagaacttcgtcatcaacgtggtcaacaggctgggtgccatcgctaaggaccccaagtccgagacagggacgcgtgtgggcgtggtgcagtacagccacgagggcacctttgaggccatccagctggacgacgaacatatcgactccctgtcgagcttcaaggaggctgtcaagaacctcgagtggattgcgggcggcacctggacaccctcagccctcaagtttgcctacgaccgcctcatcaaggagagccggcgccagaagacacgtgtgtttgcggtggtcatcacggacgggcgccacgaccctcgggacgatgacctcaacttgcgggcgctgtgcgaccgcgacgtcacagtgacggccatcggcatcggggacatgttccacgagaagcacgagagtgaaaacctctactccatcgcctgcgacaagccacagcaggtgcgcaacatgacgctgttctccgacctggtcgctgagaagttcatcgatgacatggaggacgtcctctgcccggaccctcagatcgtgtgcccagaccttccctgccaaacaggtttggacggagctgttttgtgctgaaaggttttctcggggtccgtggtgtcccccaaaggtgccaccgtgcgggtctcctagctccctgccagcttcctgtccctgtgctcactgcccccacgcctcctgccaaggccgagccacacacccgctccacctgcatttcctctaccgactcgccagcccaaatgccgctcttcactctggcctcgctgagcggctgcccgaggaggagctctaggccgacgcccaccgcaggccttacagtcgtctctggacgctcccttgcagatgcaccgtggcctggcggcgagcccccggtcaccttcctccgcacggaagaggggccggacgccaccttccccaggaccattcccctgatccaacagttgctaaacgccacggagctcacgcaggacccggccgcctactcccagctggtggccgtgctggtctacaccgccgagcgggccaagttcgccaccggggtagagcggcaggactggatggagctgttcattgacacctttaagctggtgcacagggacatcgtgggggaccccgagaccgcgctggccctctgctaaagcccgggcacccgcccagccgggctgggccctccctgccacactagcttcccagggctgcccccgacaggctggctctcagtggaggccgagagatctggaatcggggtcagcggggctacagtccttccaggggctctggggcagctcccagcctcttcccatgctggtggccaccgtgtcccttgctgcggctgcatcttccagtctctcctccgtcttccagtggccgctctctttataagaaccctggtcattgaatttaaggcccaccccaagtccagaatgacctcgcaagacccttaactcactccc

SEQ ID NO: 31076 - DNA, 2221 bp, Homo Sapiens
ggccaggaacgccagccgttcacgcgttcggtcctccttggctgactcaccgccctggccgccgcaccatggacgcccccaggcaggtggtcaactttgggcctggtcccgccaagctgccgcactcagtgttgttagagatacaaaaggaattattagactacaaaggagttggcattagtgttcttgaaatgagtcacaggtcatcagattttgccaagattattaacaatacagagaatcttgtgcgggaattgctagctgttccagacaactataaggtgatttttctgcaaggaggtgggtgcggccagttcagtgctgtccccttaaacctcattggcttgaaagcaggaaggtgtgctgactatgtggtgacaggagcttggtcagctaaggccgcagaagaagccaagaagtttgggactataaatatcgttcaccctaaacttgggagttatacaaaaattccagatccaagcacctggaacctcaacccagatgcctcctacgtgtattattgcgcaaatgagacggtgcatggtgtggagtttgactttatacccgatgtcaagggagcagtactggtttgtgacatgtcctcaaacttcctgtccaagccagtggatgtttccaagtttggtgtgatttttgctggtgcccagaagaatgttggctctgctggggtcaccgtggtgattgtccgtgatgacctgctggggtttgccctccgagagtgcccctcggtcctggaatacaaggtgcaggctggaaacagctccttgtacaacacgcctccatgtttcagcatctacgtcatgggcttggttctggagtggattaaaaacaatggaggtgccgcggccatggagaagcttagctccatcaaatctcaaacaatttatgagattattgataattctcaaggattctacgtttgtccagtggagccccaaaatagaagcaagatgaatattccattccgcattggcaatgccaaaggagatgatgctttagaaaaaagatttcttgataaagctcttgaactcaatatgttgtccttgaaagggcataggtctgtgggaggcatccgggcctctctgtataatgctgtcacaattgaagacgttcagaagctggccgccttcatgaaaaaatttttggagatgcatcagctatgaacacatcctaaccaggatatactctgttcttgaacaacatacaaagtttaaagtaacttggggatggctacaaaaagttaacacagtatttttctcaaatgaacatgtttattgcagattcttcttttttgaaagaacaacagcaaaacatccacaactctgtaaagctggtgggacctaatgtcaccttaattctgacttgaactggaagcattttaagaaatcttgttgcttttctaacaaattcccgcgtattttgcctttgctgctactttttctagttagatttcaaacttgcctgtggacttaataatgcaagttgcgattaattatttctggagtcatgggaacacacagcacagagggtaggggggccctctaggtgctgaatctacacatctgtggggtctcctgggttcagcggctgttgattcaaggtcaacattgaccattggaggagtggtttaagagtgccaggcgaagggcaaactgtagatcgatctttatgctgttattacaggagaagtgacatactttatatatgtttatattagcaaggtctgtttttaataccatatactttatatttctatacatttatatttctaataatacagttatcactgatatatgtagacacttttagaatttattaaatccttgaccttgtgcattatagcattccattagcaagagttgtaccccctccccagtcttcgccttcctctttttaagctgttttatgaaaaagacctagaagttcttgattcatttttaccattctttccataggtagaagagaaagttgattggttggttgtttttcaattatgccattaaactaaacatttctgttaaattaccctatcctttgttctctactgttttctttgtaatgtatgactacgagagtgatactttgctgaaaagtctttcccctattgtttatctattgtcagtattttatgttgaatatgtaaagaacattaaagtcctaaaacatctaaaaaaaaaaaaaaaaaaaaaaaaaaaaaaaaaaa

SEQ ID NO: 31077 - DNA, 1977 bp, Homo Sapiens
ggaaggcgctcaaggtgcgcggcccggggcgcgctactgggggcgccctccgcggtgggcagcgcgccagggatcggcctgggcagccgcggggcgcgcgaaggctgcgctttccctacggcccccctcgcttcctccggcacggcggcaacggagatttcctctcggggaaactacgcggatccttttcggggatcctcgccccgccccagttctccgccccctcccctttgctggggcgcctgggctggcccgcgcaggggaggaggctctggcagcctgggcagggaggcggcggggggccgcggagccgctggccatcgattctccccgccatgtgacgccgtccttagccctgcgacccccagcgcgtcccgggcctgcgcctccgccccgccgcgcagcgcacgatgcttctgccgggacgcgcacgccaaccgccgacgccccagcccgtgcagcatcccggcctccgccggcaggtagagccgccggggcagctcctgcgcctcttctactgcactgtcctggtctgctccaaagagatctcagcgctcaccgacttctctggttacctaaccaaactcctgcaaaaccacaccacctatgcctgtgatggggactatttgaatctacagtgccctcggcattctacgataagtgtccaatcggcattttatgggcaagattaccaaatgtgtagttcccagaagcctgcctcccagagggaagacagcttaacctgtgtggcagccaccaccttccagaaggtgctggacgaatgccagaaccagcgggcctgccacctcctggtcaatagccgtgtttttggacctgacctttgtccaggaagcagtaaatacctcctggtctcctttaaatgccaacctaatgaattaaaaaacaaaaccgtgtgtgaagaccaggagctgaaactgcactgccatgaatccaagttcctcaacatctactctgcgacctacggcaggaggacccaggaaagggacatctgctcctccaaggcagagcggctcccccctttcgattgcttgtcttactcagctttgcaagtcctatcccgaaggtgctatgggaagcagagatgcaaaatcatcgtcaacaatcaccattttggaagcccctgtttgccaggcgtgaaaaaatacctcactgtgacctacgcatgtgttcccaagaacatactcacagcgattgatccagccattgctaatctaaaaccttctttgaagcagaaagatggtgaatatggtataaacttcgacccaagcggatcgaaggttctgaggaaagatggaattcttgttagcaactctctggcagcctttgcttacattagagcccacccggagagagctgccctgctgttcgtgtccagtgtctgcatcggcctggccctcacactgtgcgccctggtcatcagagagtcctgtgccaaggacttccgcgacttgcagctggggagggagcagctggtgccaggaagtgacaaggtcgaggaggacagcgaggatgaagaagaggaggaggacccctctgagtctgatttcccaggggaactgtcggggttctgtaggacttcatatcctatatacagttccatagaagctgcagagctcgcagaaaggattgagcgcagggagcaaatcattcaggaaatatggatgaacagtggtttggacacctcgctcccaagaaacatgggccagttctactgaaaaccacatgcatcttgatgcgatcgcactttctgaagaaggaaggatcccaaatgcccctccagttctggttcacctgtaccttctatgaaggagaattcgtcatgtcattcaacactcgtgaggccaggaagctattaaagggatgtttcaagctgtttctagcacattccaaaataaatgaggagggaagagtcaaaaaaaaaaaaaaaaaaaaaaaaaaaaaaaaaaaaaaaaaaaa

SEQ ID NO: 31078 - DNA, 4614 bp, Homo Sapiens
tgaatgaaggagcgggcggaggaggaagtgtcatggcgtcgggccgtggagcttcttctcgctggttctttactcgggaacagctggagaacacgccgagccgccgctgcggagtggaggcggataaagagctctcgtgccgccagcaggcggccaacctcatccaggagatgggacagcgtctcaatgtctctcagcttacaataaacactgcgattgtttatatgcacaggttttatatgcaccattctttcaccaaattcaacaaaaatataatatcgtctactgcattatttttggctgcaaaagtggaagaacaggctcgaaaacttgaacatgttatcaaagtagcacatgcttgtcttcatcctctagagccactgctggatactaaatgtgatgcttaccttcaacagactcaagaactggttatacttgaaaccataatgctacaaactctaggttttgagatcaccattgaacacccacacacagatgtggtgaaatgtacccagttagtaagagcaagcaaggatttggcacagacatcctatttcatggctaccaacagtctgcatcttacaaccttctgtcttcagtacaaaccaacagtgatagcatgtgtatgcattcatttggcttgcaaatggtccaattgggagatccctgtatcaactgatggaaagcattggtgggaatatgtggatcctacagttactctagaattattagatgagctaacacatgagtttctacaaatattggagaaaacgcctaataggttgaagaagattcgaaactggagggctaatcaggcagctaggaaaccaaaagtagatggacaggtatcagagacaccacttcttggttcatctttggtccagaattccattttagtagatagtgtcactggtgtgcctacaaacccaagttttcagaaaccatctacatcagcattccctgcgccagtacctctaaattcaggaaatatttctgttcaagacagccatacatctgataatttgtcaatgctagcaacaggaatgccaagtacttcatacggtttatcatcacaccaggaatggcctcaacatcaagactcagcaaggacagaacagctatattcacagaaacaggagacatctttgtctggtagccagtacaacatcaacttccagcagggaccttctatatcactgcattcaggattacatcacagacctgacaaaatttcagatcattcttctgttaagcaagaatatactcataaagcagggagcagtaaacaccatgggccaatttccactactccaggaataattcctcagaaaatgtctttagataaatatagagaaaagcgtaaactagaaactcttgatctcgatgtaagggatcattatatagctgcccaggtagaacagcagcacaaacaagggcagtcacaggcagccagcagcagttctgttacttctcccattaaaatgaaaatacctatcgcaaatactgaaaaatacatggcagataaaaaggaaaagagtgggtcactgaaattacggattccaataccacccactgataaaagcgccagtaaagaagaactgaaaatgaaaataaaagtttcttcttcagaaagacacagctcttctgatgaaggcagtgggaaaagcaaacattcaagcccacatattagcagagaccataaggagaagcacaaggagcatccttcaagccgccaccacaccagcagccacaagcattcccactcgcatagtggcagcagcagcggtggcagtaaacacagtgccgacggaataccacccactgttctgaggagtcctgttggcctgagcagtgatggcatttcctctagctccagctcttcaaggaagaggctgcatgtcaatgatgcatctcacaaccaccactccaaaatgagcaaaagttccaaaagttcaggtagttcatctagttcttcctcctctgttaagcagtatatatcctctcacaactctgtttttaaccatcccttaccccctcctccccctgtcacataccaggtgggctacggacatctcagcaccctcgtgaaactggacaagaagccagtggagaccaacggtcctgatgccaatcacgagtacagtacaagcagccagcatatggactacaaagacacattcgacatgctggactcactgttaagtgcccaaggaatgaacatgtaataatttgtttaggtcaatttttcctttacttttttaatttaaaaattgttagaatggaaaaattccttctgatctagcagtggtaacccctgctgttgctgccactgcttcaatatttgtaagtgctgctttattcttcattctgaaaagaagagattatagtaaacaagtctttatctccacatatgatagtgttataaatactgtaaaagcatggaaggtgcaaaactcagtatttctacaattgcagctaagaacattaggatgaatggctggctgcttctaggaatataagatgcctcaagcattcattatttatgatttgaatactgtagctattttttgttgcttggcttttgaatgagtgtaaattgttttcttttgtgtatttatacttgtatgtatgatttgcatgtttcaatgataaagggataaaacagtatactgacaactgtttacaagaaagtggagaaaaatgtacatacatttttgtatgtttagatattaccgtaaatactcaggattggagctgcttgtaagtataacaatatacagaataactttattttatcttgtcagagtccatcactaatctaaaacaaaggtggcacttttttatgttaaccttaaactctaggccttactggaagccactgataggggaccattcactaccagatgtgtgcagtgcaacagatggtcatatacactgtgaggcactgaaattttgccttcagaggttctgaccagattggctgctgaaatagcccctaactttctgaaggcttgaagaggaaaaaataaagtttacatactcttgatgtgaagtgcatttaaatgtttgttggcttgttgcagttctatgaaacagagctgttaataatggttatgtggattactgtgatttgaaaactaaattcacaataacttacctagtagagatttagtgagttgtttcctttaaagaattttacactacatattttaatagtaaacagggatcacttttcctttagcattcagaatgacaccatattcttaaatatactccttccctgaagcgtgtttgtgtgtgatgccatatttctttttcaggtaaatgtagtcttccttataaaaatgaaattaaacctatgctctcaattcttttatattctaacaataaataaaaaagaaaagattactgactgtgcattgtacctgtatttatagtttatggttatcaggaagctctgtaagaaagaaaaggtcagcctcccaggcaaaccagtagtggaggttttacatttgtttgcacatctcagtatatttctgttgaggtaaagtttgcacagtcatctgacttctgatcaagcattagattttaacttgtttagattttgtcttaaacaccagtaatatggctcttgtttatcagctaatcttgaatttattctgtggtaaatcttttgagttgttgagtatatttgagattgattggattcgacctcttgttgaactgaaaacttaattttttctctgtatttttgttacaaagccactgatacgtgcacaattgtaattaagtatgttgcagttgtaaatattagagtttaatctcatgctctacctttatttagcaattacctaatttgccagtagctttataatttttaaagataattgttcattattttgtcaatgttatttgaacttggggtacttaggagcctctttgtagggactgtgcctaggtagcatgtcctaacatttgttctggtcttgcataacttcagtaatctttgtcattatatgtaactttgttgctctgtatggcataatattgtatccataaacatggtaattttgatacagttatacttttacagtggtacataatccaaggactagtatagaattaagctgagtgcaagatgagggagggaagggctttcttggtaatttagatgtgaaacctctacagagctatcatgtaaaaactacataaggtggttgtgctactgtataattgggggtgataataccaggaattttaataagattttgtaaagaatatccagaaaagtagtgaacttattttcagtagacatagaaaacaatgtgaatatttaaggtctgtgactatagttaaacttcactaagaatttgcagaattgttttgagatgtgtgaataaaggtaattttattgaatcttcattggtgctaatgatggacagttaaaaagatagctagtgtatattgttatgggtcagtacttattagtacttccaaaattgaatttgaaatgctatgtattcacttttcactctgtaaatgtaattctttacaatgactttatttattaaagggcagccagttgtcatttgtaaaaaaaaaaaaaaaaaaaaa

SEQ ID NO: 31079 - DNA, 7591 bp, Homo Sapiens
tccatccctgaccgggccgaggctgctggatgccgcgtctccgcttctgctgcctgccgggcgggctccggtggccgcagcaaagtggggcaccaaggccctgtgctaagcactcataatcctctgggggtgctacccctacaaacagcacccccaccatgtttaacctaatgaagaaagacaaggacaaagatggcgggcggaaggagaagaaggagaaaaaggagaaaaaggagcggatgtcagcggcagagcttcggagcctggaggagatgagcctgcgacgtggcttcttcaacctgaaccgctcctccaagcgtgaatccaagacgcgcctggaaatctccaaccccatccccatcaaggtggccagcggctctgacctgcacctgactgacattgactccgatagtaaccggggcagcgtcatcctggactcgggccacctaagtacagccagctccagcgatgacctcaagggtgaggagggtagcttccgtggctcggtgctgcagcgggcagccaagttcggctcactggccaagcagaactcacagatgattgtcaagcgcttttccttctcccagcgtagccgggatgagagcgcctcagaaacctcgacgccctcagagcactctgccgccccctcgccacaggtggaggtgaggactctagagggacagctggtgcagcatcctggcccaggcatccctcgaccagggcaccgatcccgagcccctgagctagtgactaaaaagttcccagtcgacctgcgcctgccccccgtggtgcccctgcccccacctaccctccgggagctggagctgcaacgacggcccactggagactttggcttctccctgcggcgcacaaccatgctggatcggggccccgagggccaggcctgtcggcgtgtggtccactttgctgagcctggtgcaggcaccaaggacctggccctggggctggtgccaggagatcgactggtggagattaatgggcacaatgtggagagcaagtccagggatgagattgtggagatgatccggcagtcaggggacagcgtgcggctcaaggtgcagcccattccagagctcagcgagctcagcaggagctggctgcggagcggcgagggacctcgcagggagccatccgatgcgaaaacagaagaacagattgcagcagaagaggcctggaatgagacggagaaggtgtggctggtccatagggacggcttctcactggccagtcaactcaaatctgaggagctcaacttgcctgaggggaaggtgcgtgtgaagctggaccacgatggggccatcctggatgtggatgaggatgacgttgagaaggctaatgctccctcctgcgaccgtctggaggatctggcctcactggtgtacctcaatgagtccagcgtcctgcacaccttgcgccagcgctatggcgctagcctgctgcacacgtatgctggccccagcctgctggttcttggcccccgtggggcccctgctgtgtactctgagaaggtgatgcacatgttcaagggttgtcggcgggaggacatggcaccccacatctatgcagtggcccagaccgcatacagggcgatgctgatgagccgtcaggatcagtcaatcatcctcctgggcagtagtggcagtggcaagaccaccagctgccagcatctggtgcagtacctggccaccatcgcgggcatcagcgggaacaaggtgttttctgtggagaagtggcaggctctgtacaccctcctggaagcctttgggaacagccccaccatcattaatggcaatgccacccgcttctcccagatcctctccctggactttgaccaagctggccaggtggcctcagcctccattcagacaatgcttctggagaagctgcgtgtggctcggcgcccagccagtgaagccacattcaacgtcttctactacctgctggcctgtggggatggcaccctcaggacagagctccacctcaaccacttggcagagaacaatgtgtttgggattgtgccactggccaagcctgaggaaaagcagaaggcagctcagcagtttagtaagctgcaggcggccatgaaggtgctgggcatctcccccgatgaacagaaggcctgctggttcattctggctgccatctaccacctgggggctgcgggagccaccaaagaagctgctgaagctgggcgcaagcagtttgcccgccatgagtgggcccagaaggctgcgtacctactgggctgcagcctggaggagctgtcctcagccatcttcaagcaccagcacaagggtggcaccctgcagcgctccacctccttccgccagggccccgaggagagtggcctgggagatgggacaggcccgaaactgagtgcactggagtgccttgagggcatggcggccggcctctacagcgagctcttcacccttctcgtctccctggtgaatagggctctcaagtccagccagcactcactctgctccatgatgattgtcgacaccccgggcttccagaaccctgagcagggtgggtcagcccgcggagcctcctttgaggagctgtgccacaactacacccaagaccggctgcagaggctcttccacgagcgcaccttcgtgcaggagttggaaagatacaaggaggagaacatcgagctggcgtttgacgacttggaacccccgacggatgactctgtggctgctgtggaccaggcctcccatcagtccctggtccgctcgctggcccgcacagacgaggcgaggggcctgctctggctattggaagaggaggctctggtgccaggggccagtgaggacaccctcctggagcgccttttctcctattatggcccccaggaaggtgacaaaaaaggccaaagcccccttctgcacagcagcaaaccacaccactttctcctgggccacagccatggcaccaactgggtagagtacaatgtgactggctggctgaactacaccaagcagaacccagccacccagaatgccccccggctcctgcaggactcccagaaaaaaatcatcagcaacctgtttctgggccgcgcaggcagtgccacggtgctctctggctccatcgcgggcctggagggcggctcgcagctggcactgcgccgggccaccagcatgcggaaaacctttaccacaggcatggcggctgtcaaaaagaagtcactgtgcatccagatgaagctacaggtggacgccctcatcgacaccatcaagaagtcaaagctgcattttgtgcactgcttcctgcctgtagctgagggctgggctggggagccccgttccgcctcctcccgccgagtcagcagcagcagtgagctggacctgccctcgggagaccactgcgaggctgggctcctgcagctcgacgtgcccctgctccgcacccagctccgcggctcccgcctgctcgatgccatgcgcatgtaccgccaaggttaccctgaccacatggtgttttccgagttccgccgccgctttgatgtcctggccccgcacctgaccaagaaacacgggcgtaactacatcgtggtggatgaaaggcgggcagtggaggagctgctggagtgcttggatctggagaagagcagctgctgcatgggcctgagccgggtgttcttccgggcgggcaccttggcacggctggaggagcagcgggatgaacaaaccagcaggaacctaaccctgttccaagcagcctgcaggggctacctggcccgccagcacttcaagaagagaaagatccaggacctggccattcgctgtgtacagaagaacatcaagaagaacaaaggggtgaaggactggccctggtggaagctttttaccacagtgaggcccctcatcgaagtacagctgtcagaggagcagatccggaacaaagacgaggagatccagcagctgcggagcaagctcgagaaggcggagaaggagaggaacgagctgcggctcaacagtgaccggctggagagccggatctcagagctgacatcggagctgacagatgagcgtaacacaggagagtccgcctcccagctgctggacgcggagacagcagagaggctccgggctgagaaggagatgaaggaactgcagacccagtacgatgcactgaagaagcagatggaggttatggaaatggaggtgatggaggcccgtctcatccgggcagcggagatcaacggggaagtggatgatgatgatgcaggtggcgagtggcggctgaagtatgagcgggctgtgcgggaggtggacttcaccaagaaacggctccagcaggagtttgaggacaagctggaggtggagcagcagaacaagaggcagctggaacggcggctcggggacctgcaggcagatagtgaggagagtcagcgggctctgcagcagctcaagaagaagtgccagcgactgacggctgagctgcaagacaccaagctgcacctggagggccagcaggtccgcaaccacgaactggagaagaagcagaggaggtttgacagtgagctctcgcaggcgcatgaggaggcccagcgggagaagctgcagcgggagaagctgcagcgggagaaggacatgctcctcgctgaggctttcagcctgaagcagcaactagaggaaaaagacatggacattgcagggttcacccagaaggttgtgtctctagaggcagagctccaggacatttcttcccaagagtccaaggatgaggcttctctggccaaggtcaagaaacagctccgggacctggaggccaaagtcaaggatcaggaagaagagctggatgagcaggcagggaccatccagatgctggaacaggccaagctgcgtctggagatggagatggagcggatgagacagacccattctaaggagatggagagtcgggatgaggaggtggaggaggcccggcagtcgtgtcagaagaagttaaaacagatggaggtgcagctagaggaagagtatgaggacaagcagaaggttctgcgagagaagcgggagctggagggcaagctcgccaccctcagcgaccaggtgaaccggcgggactttgagtcagagaagcggctgcggaaggacctgaagcgcaccaaggccctgctggcagatgcccagctcatgctggaccacctgaagaacagtgctcccagcaagcgagagattgcccagctcaagaaccagctggaggagtcagagttcacctgtgcggcagccgtgaaagcacggaaagcaatggaggtggagatcgaagacctgcacctgcagattgatgacatcgccaaagccaagacagcgctggaggagcagctgagccgccttcagcgtgagaagaatgagatccagaaccggctggaggaagatcaggaagacatgaacgaattgatgaagaagcacaaggctgccgtggctcaggcttcccgggacctggctcagataaatgatctccaagctcagctagaagaagccaacaaagagaagcaggagctgcaggagaagctacaagccctccagagccaggtggagttcctggagcagtccatggtggacaagtccctggtgagcaggcaggaagctaagatacgggagctggagacacgcctggagtttgaaaggacgcaagtgaaacggctggagagcctggctagccgtctcaaggaaaacatggagaagctgactgaggagcgggatcagcgcattgcagccgagaaccgggagaaggaacagaacaagcggctacagaggcagctccgggacaccaaggaggagatgggcgagcttgccaggaaggaggccgaggcgagccgcaagaagcacgaactggagatggatctagaaagcctggaggctgctaaccagagcctgcaggctgacctaaagttggcattcaagcgcatcggggacctgcaggctgccattgaggatgagatggagagtgatgagaatgaggacctcatcaacagtttgcaggacatggtgacaaagtatcagaaaagaaagaataaacttgagggagactctgatgtggactcggagctggaggaccgtgttgacggggtcaagtcctggttgtcaaaaaacaagggaccttccaaggcagcttctgatgatggcagcttaaagagttccagccccaccagctactggaagtcccttgcccctgatcggtcagatgatgagcacgaccctctcgacaacacctccagaccgcgatactcccacagttatctgagtgacagcgacacagaggccaagctgacggagactaacgcatagcccaggggagtggttggcagccctctcaccccagggcctgtggctgcctgggcacctctcccaggaagtggtggggcaccggtctcccccacccgactgctgatctgcatgggaaacaccctgaccttcttctgtcaggggcactttccaggctatgggtgtctgatgtctccacgtggaagaggtgggggaaagaggagtttctgaagagaactttttgctcctctgtctcaaaatgccagactcttggcttctaccctgtgtcaccgtgggcagtggcaggtggcctggcactgcatggagccagcacgttgacctccctctcagctccctgctcagggacggtggacaggttgcctactgggacactctaggttgctgggtccatggggaggattgggggaggagaagcagtgccttccctctcgtgtggggtgggggctctctcttcttggtgcctgctgtctttctactttttaatttaaatacccaacctctccatcacagctgcatccctgagagtgggagggggctgtagtggtagctggggctcccaagaacgactcgggaatgtcatctccatcttcacccttcagagagcagtcctttctctgtgcagctggagacgctggtgaggagagccgggtccaggttcttaagaatgaggtgcggaggggctctccggtgctgctgggctgggttgagcaagcctacgcagacaagtgtgtgtgtggaccatccgcacctccagcccccaccccaccctctttgtctcagcgtgttatgtgcaatgacctatttaaggtaaacccattccaactacagcagttcagggctgatccaagcactgcctccctcctgctctgtccaggtggtctggaccataaactcaacttgagagggaaggcttggggttgaggacttgtgatcagaaaaactgaagatggaagttttggccggtgctcattagacatgagtcctcactctgtgtcctgagcccgtgtcattcttccaacctccctgcccccacacacttatcccagacacaacaccatgtggtctggaggtcccagcccccaccctaaaaaggttatccctgagaactccaccagacttgggagcccaagtgcagtgcctggtgctgctcccatctgccgccccccttctctcctgcaattggtttgtactcactgggctgtgctctcccctgtttacccgatgtatggaaataaaggcccttttcctcctggctgcgccagtaaaaaaaa

SEQ ID NO: 31080 - DNA, 5821 bp, Homo Sapiens
tgaggtccggaagcggctgccgggcagcaaaggaggatggcgaggggctgatactgaacccgggaagggtgggctgtgctgaagccagagccggagccggagctggggccagaacccgagcagtgagttcctccactggctgccggctggcggcgctcgccgccttgggcaggacccacctcgccttcctcccggcgtggcagatgctccagctgccatgtccacgcagagacttcggaatgaagactaccacgactacagctccacggacgtgagccctgaggagagcccgtcggaaggcctcaacaacctctcctccccgggctcctaccagcgctttggtcaaagcaatagcacaacatggttccagaccttgatccacctgttaaaaggcaacattggcacaggactcctgggactccctctggcggtgaaaaatgcaggcatcgtgatgggtcccatcagcctgctgatcataggcatcgtggccgtgcactgcatgggtatcctggtgaaatgtgctcaccacttctgccgcaggctgaataaatcctttgtggattatggtgatactgtgatgtatggactagaatccagcccctgctcctggctccggaaccacgcacactggggaagacgtgttgtggacttcttcctgattgtcacccagctgggattctgctgtgtctattttgtgtttctggctgacaactttaaacaggtgatagaagcggccaatgggaccaccaataactgccacaacaatgagacggtgattctgacgcctaccatggactcgcgactctacatgctctccttcctgcccttcctggtgctgctggttttcatcaggaacctccgagccctgtccatcttctccctgttggccaacatcaccatgctggtcagcttggtcatgatctaccagttcattgttcagaggatcccagaccccagccacctccccttggtggccccttggaagacctaccctctcttctttggcacagcgattttttcatttgaaggcattggaatggttctgcccctggaaaacaaaatgaaggatcctcggaagttcccactcatcctgtacctgggcatggtcatcgtcaccatcctctacatcagcctggggtgtctggggtacctgcaatttggagctaatatccaaggcagcataaccctcaacctgcccaactgctggttgtaccagtcagttaagctgctgtactccatcgggatctttttcacctacgcactccagttctacgtcccggctgagatcatcatccccttctttgtgtcccgagcgcccgagcactgtgagttagtggtggacctgtttgtgcgcacagtgctggtctgcctgacatgcatcttggccatcctcatcccccgcctggacctggtcatctccctggtgggctccgtgagcagcagcgccctggccctcatcatcccaccgctcctggaggtcaccaccttctactcagagggcatgagccccctcaccatctttaaggacgccctgatcagcatcctgggcttcgtgggctttgtggtggggacctatgaggctctctatgagctgatccagccaagcaatgctcccatcttcatcaattccacctgtgccttcatatagggatctgggttcgtctctgcagctgcctacccctgccccatgtgtcccccgttacctgtcctcagagcctcaggtatggtccaggctctgaggaaagtcagggttgctgtgtgggaacccctctgcctggcacctggataccctgggccaggtaacctgagggcaggggagaggtggggtggcagacacgcagaagtgctactagtgacagggctgccatcgctcacctgtacctatttacacccagaactttccagctccccctcatcatgcctcctccttcctacctgcctcccctctgctggtgcacctcgcccaactcattcttactgcacagttcactttatttaacaattttcatgtcccccacctcatgttttcaccttttctgggccaggcatagattaagtaactgggaacgccccctctttataaagctgggcttctttctcatctctctcccaaatgttgtatctcagtattcttcctattcgagtctccagggggtggctggacctacctggtcatttgaaacaggcccccaagctggagtttttaatctggactctctggcttgctgtgacccctaaggcaatgcttctcttccctggattccttagtgtgggtcacagtactgtgttcttagttgctttagctcttaaaacatacgaagtgttgcctaaactgaaaatatttatcttttatttaaaatcagatttttgtttttagactgtcttagatctggggctattacgaatcacttcttcttcagtaaactttgactcaacttctcctgctgaaaagaagctcgctccagatgtctgcatgggtcctcggcactcttggctgaggactcaaaggttttaatcaggatcgtctaaaaatgtacctcggtgaggaggcacagattttgcctcctgttgaccagcctggtttcataccgaaaagacattgaaggactgcagaaatgtatgggtgcaccgggccgagggaagggtggctgagtgagaggcgtataaaatggggctgtgtgcatgcaggcccatgtttcagcctcagcccacgccaggtgaaaggatcagcaatgctctgttgccatcgtgctgggacgacaccagctctattgccaccgatgagtagctgaggtcagtgtgcacagagtttgaaattaagttaatagactttacagcagctggtctgacactacgcgcagtgctcggttgtttacaatcagtggggaaaagggcagaaccagtgcccggccccacactgcctctgtggcctggactttgaaaggaacccactgaacactaattatgagccctgtctttcccccagaatgcctccctgggtttcacaaacagccttgaggttggccctcctcaaggtcagccttcagatttgggagcaaacttcagagaaggcagaggaagatacattgccttgctgtgggctgcctcttctttcctcttggtgtgcgaagtatttcagaaggccattgatgaattccccctctttagctgtgtatttgtgcacgtgtgtgtgtacgtgcgtgtgtgtgtgtgttcctgtgtaagtaacagaccagactccttttctcttctgtcccgtcaccaggctcttgcttcactgcagatacagttcactctgaaagctggttgaaggagagcagcaaaaatgtatcaggggttttgcttctgtgtttcgccaaagctcataagggctgtgacccacccatatggccccagttttttctgtctcttctgttccaaagccaggagagctgacttccaggtgaagggatgggaaaagtggactctcattgtagtgactcccaacctacctaataatttgttaacttaggaatatgctatcattgttgacttgttcttccttaggagaaggacgattttcacccaccctttctgttctatggtggactcttaacaggtgctatgtgaccaggaatctagccgggagtagcagaggccctgtcttctgaagtctcaggcttagaagttaccaaagtgggctcagaaactgtcatctcctggttccaagttcgggctctggcagcccagccgctatcttagctgtctttcccagcggtgctaagagtggtctcagtgagaaggtagatgccaactggagggccagacctgtgtcctgcccatgtcctccttggtggacgtttctgtttactcagagctgctagagaccatcctgcccatccgagttctgagattgggactgtgatgttgggacctgaggactggatggtagaatactggggtcccccagctcttagcaggatgcaggctattgcttccacacccctggccgtgagaacgtggtatgtaggagagttggctgtagctttaggatttctggaagccaatttggcatggcctatttgatctctggcttgtgctcctgctacactgacagactgattgcgtggctctttcagaagacccaggaagggcagctccagccagaggaccttcctggctatgcaggtgcacagctcttaggcatcaagcaaagggtcagccagtcagtagtagtgggaggaagcccttcctcctcttatgcaagcagctcgcagccagcccagaatctcttatgcagcccaaagggcttcttgaggtagagagccctccccagtgtcttcccaggataagtagaaatatgatcacagagcaacggagcaaaggctttcgggagtgtgaggctgcatctgctggagcaaagggaaaccgtgggcttttccggccagatactcttgagctctgtgaccctgctcctgtcaccccaatttctccaagccagaggtagctttctcagagccccttggtggttctgtcctccaaatgctgctgttgggagcgggcttccagctctcagtgggcagtgcacctcctcctaaatgcaggcacttgctaggaagagtgtgagctggcgtcttctgttcaccctgcctagcagttgtcaccattcacaagtggcattatttatgttgtgctgctgtccagctgctaagatcccttcatctgcacaagccctggctagatatgtgtgaatgtgtggcatcatttcacttcagccgcccaattccatctctcctctgcagccagattcactggctgatgctcactgctcactgtctatccccacgaaatttagttttatcagtagtcttaaagtgttgatctcaaacaagtacattagaaaaatcatgtttcttctctctcatcttactttttcttctcagatttctcccttcctagaacattctctctgtttagcactaatgttcacctcgtattttttggaagtgcaaaaatctcaatttgtgtctgtttacagctctctctcctcactgctcacagcaaggggttctgtatcagtggatttcattttgtagctgctgagatgttaaggcaagcctcagcatctgcccctgctgggtgcacaatgctgcttcctcgaagagaagacacagagtccaagtggcaggacttgaggttggcttccactctgccttagaagttaattttccaaagtacattacaaatctctgaggccattaggggaaaaggaaggggtgtggtttgtctttgaaattacggttaatacttttagacagtaagtccggctggttgcagggctatttgccccgacagcatcagcctgtaacatttcttctctttcctttgtgccactgagtcgttccctggccagaggacataaatggtgctggtaggaggttatcagagtaaggaaggtagcagatataggtgcagggtgcctgtcattcactgtgttatttggtttaaatcaaagtgattctgggggaagctatgctctttcagtggataataaaattggtaactctattgtaaaacatgtcaatggtgtgtgaagaaaaatcaaccaatctgtaggtgttgataactagacagtactgtgtatgttacgtgcctgtgtggatgtgcacttccagcatggtatgtgtagcgatgtggatcatgccagagttcgtagatcctgttttggggtttgcacatggatcgtatgttaagctttttcttttcaataaatgaattttatttttatttttgaaaaaaaaaaaaaaaaaaaaaaaaaaaaaaaaaaaaaaaaaaaaaaaaa

SEQ ID NO: 31081 - DNA, 2260 bp, Homo Sapiens
cggccccccccggccacggcgcaccgcctccccgcccccgcccgccctcccccaccgcgcgcgctccgcccgccccggagcctcgccctccgccacgatgagcaaatgagcgcgagcgagggcatgaaatttaaattccactcaggggagaaagtgctgtgcttcgagcctgaccccaccaaggcgcgagtgctgtacgatgccaagctgggatagatgggcagcagaagatcatgtgcttcgtgataccgatgaaaatcgtagattacagcgtaaattggcaagaaaagctgtagctcgcctgaggagcacaggaagaaagaagaagcgctgcaggttgcctggtgtggactctgtcttaaaaggcctccccactgaagaaaaagatgaaaatgatgaaaactcattaagcagttcctctgactgtagtgaaaacaaggatgaagaaataagtgaagaaagtgatattgaagaaaagactgaagtgaaagaagaaccagagcttcaaacaagaagggaaatggaagaaagaacaataactatagaaatccctgaagttctgaagaagcagctggaggatgattgttactacattaacaggaggaaacggttagtgaaacttccatgccagaccaacatcataacgattttggaatcctatgtgaagcattttgctatcaatgcagccttttcagccaatgagaggcctcgtcaccatcacgttatgccacatgccaacatgaacgtgcattatatcccagcagaaaagaatgttgacctttgtaaggagatggtggatggattaagaataacctttgattacactctcccgttggttttactctatccatatgaacaagctcagtataaaaaggtgacttcgtctaaattttttcttccaattaaggaaagtgccacaagcactaacaggagccaggaggaactctctcccagtccgcctttgttgaatccatccacgccacagtccacagagagtcagccgaccaccggtgaaccagccacccccaaaaggcgcaaagctgagccagaagcattgcagtctctgaggcggtccacgcgccacagtgccaactgtgacaggctttctgagagcagcgcttcacctcagcccaagcgccggcagcaggacacatccgccagcatgcccaagctcttcctgcacctggaaaagaagacacctgtgcatagcagatcatcttcacctattcctctgactcctagcaaggaagggagtgctgtgtttgctggctttgaagggagaagaactaatgaaataaacgaggtcctctcctggaagcttgtgcctgacaattaccccccaggtgaccagccgcctccaccctcttacatttatggggcacaacatttgctgcgattgtttgtgaaacttccagaaatccttggaaagatgtccttttctgagaagaatctgaaggctttattgaagcactttgatctctttttgaggtttttagcagaataccacgatgacttcttcccagagtcggcttatgtcgctgcctgtgaggcacattacagcaccaagaacccccgggcaatttattaaaatgttgttggttctgtaagagcaactgctctgtctagtttggcgctctgggttccaggtgaataactaacaaggtggtgggtctttacccacagcgcaaacacaatgcccaccttggggctctgttgtttgagttgcccacatactgcagttattctgttaggaatgattccctgggtgcctgaaagtgctctgacacgacacttgttactttgcaggccatctgtgatggcaaggaaaaagcaactatgttcacagtgaaatattcgtggaataggttaggccatttcagtagacattgcagttagttagcaagaaccacattgtctctttatttgttagcattaaacaaatttttttttgcaaattggttttatttttttgatgaagccgagcaactctgtccaaaaaggtttagtttgtactcggaaaccacaaagtagtctcaaagtattttagagggaatcgatattgatggcaaaagaaaatttgcagctatgcatttgcttctaacggttccctctctgtgaaacattatttttggtgatctaaagaaagcattgcctttcttatttgagattttacagctatactttgttgtgtaatgttatggttccctttctgtaaaatgttatttttggtgatctaaataaagcctgtcttgtttgaaag

SEQ ID NO: 31082 - DNA, 5223 bp, Homo Sapiens
gcatgccgcagggaagacgatcaggactgtttttaatcgggcagtcgcgcggatggccttttccctctcgcctccttccgccccgcccccactctcagcccggccgcgctgattgtcctgggtcacataatgccagctgagcgtaaaaagccagcaagtatggaagaaaaagactctttaccaaacaacaaggaaaaagactgcagtgaaaggcggacagtgagcagcaaggagaggccaaaagacgatatcaagctcactgccaagaaggaggtcagcaaggcccctgaagacaagaagaagagactggaagatgataagagaaaaaaggaagacaaggaacgcaagaaaaaagacgaagaaaaggtgaaggcagaggaagaatcaaagaaaaaagaagaggaagaaaaaaagaaacatcaagaggaagagagaaagaagcaagaagagcaggccaaacgtcagcaagaagaagaagcagctgctcagatgaaagaaaaagaagaatccattcagcttcatcaggaagcttgggaacgacatcatttaagaaaggaacttcgtagcaaaaaccaaaatgctccggacagccgaccagaggaaaacttcttcagccgcctcgactcaagtttgaagaaaaatactgcttttgtcaagaaactaaaaactattacagaacaacagagagactccttgtcccatgattttaatggcctaaatttaagcaaatacattgcagaagctgtagcttccatcgtggaagcaaaactaaaaatctctgatgtgaactgtgctgtgcacctctgctctctctttcaccagcgttatgctgactttgccccatcacttcttcaggtctggaaaaaacattttgaagcaaggaaagaggagaaaacacctaacatcaccaagttaagaactgatttgcgttttattgcagaattgacaatagttgggattttcactgacaaggaaggtctttccttaatctatgaacagctaaaaaatattattaatgctgatcgggagtcccacactcatgtctctgtagtgattagtttctgtcgacattgtggagatgatattgctggacttgtaccaaggaaagtaaagagtgctgcagagaagtttaatttgagttttcctcctagtgagataattagtccagagaaacaacagcccttccagaatcttttaaaagagtactttacgtctttgaccaaacacctgaaaagggaccacagggagctccagaatactgagagacaaaacaggcgcattctacattctaaaggggagctcagtgaagatagacataaacagtatgaggaatttgctatgtcttaccagaagctgctggcaaattctcaatccttagcagaccttttggatgaaaatatgccagatcttcctcaagacaaaccaacaccagaagaacatgggcctggaattgatatattcacacctggtaaacctggagaatatgacttggaaggtggtatatgggaagatgaagatgctcggaatttttatgagaacctcattgatttgaaggcttttgtcccagccatcttgtttaaagacaatgaaaaaagttgtcagaataaagagtccaacaaagatgataccaaagaggcaaaagaatctaaggagaataaggaggtatcaagtcccgatgatttggaacttgagttggagaatctagaaattaatgatgacaccttagaattagagggtggagatgaagctgaagatcttacaaagaaacttcttgatgaacaagaacaagaagatgaggaagccagcactggatctcatctcaagctcatagtagatgctttcctacagcagttacccaactgtgtcaaccgagatctgatagacaaggcagcaatggatttttgcatgaacatgaacacaaaagcaaacaggaagaagttggtacgggcactcttcatagttcctagacaaaggttggatttgctaccattttatgcaagattggttgctacattgcatccctgcatgtctgatgtagcagaggatctttgttccatgctgaggggggatttcagatttcatgtacggaaaaaggaccagatcaatattgaaacaaagaataaaactgttcgttttataggagaactaactaagtttaagatgttcaccaaaaatgacacactgcattgtttaaagatgcttctgtcagacttctctcatcaccatattgaaatggcatgcaccctgctggagacatgtggacggtttcttttcagatctccagaatctcacctgaggaccagtgtacttttggagcaaatgatgagaaagaagcaagcaatgcatcttgatgcgagatacgtcacaatggtagagaatgcatattactactgcaacccacctccagctgaaaaaaccgtgaaaaagaaacgtcctcctctccaggaatatgtccggaaacttttgtacaaggatctctctaaggttaccaccgagaaggttttgagacagatgcgaaagctgccctggcaggaccaagaagtgaaagactatgttatttgttgtatgataaacatctggaatgtgaaatataatagtattcattgtgtagccaacctcttagcaggactagtgctctaccaagaggatgttgggatccacgttgtggatggagtgttagaagatattcgattaggaatggaggttaatcaacctaaatttaatcagaggcgcatcagcagtgccaagttcttaggagaactttacaattaccgaatggtggaatcagctgttattttcagaactctgtattcttttacctcatttggtgttaatcctgatggctctccaagttccctggacccacctgagcatcttttcagaattagactcgtatgcactattctggacacatgtggccagtactttgacagaggttccagtaaacgaaaacttgattgtttccttgtatattttcagcgttatgtttggtggaagaaaagtttggaggtttggacaaaagaccatccatttcctattgatatagattacatgatcagtgatacactagaactgctaagaccaaagatcaaactctgtaattctctggaagaatccatcaggcaggtacaagacttggaacgagaattcttaataaaactaggcctagtaaatgacaaagactcaaaagattctatgacagaaggagaaaatcttgaagaggatgaagaagaagaagaaggtggggctgaaacagaagaacaatctggaaatgaaagtgaagtaaatgagccagaagaagaggagggttctgataatgatgatgatgagggagaagaagaggaggaagagaatacagattaccttacagattccaataaggaaaatgaaaccgatgaagagaatactgaggtaatgattaaaggcggtggacttaagcatgtaccttgtgtagaagatgaggacttcattcaagctctggataaaatgatgctagaaaatctacagcaacgaagtggtgaatctgttaaagtgcaccaactagatgttgccattcctttgcatctcaaaagccagctgaggaaagggcccccactgggaggtggggaaggagaggctgagtctgcagacacaatgccgtttgtcatgttaacaagaaaaggcaataaacagcagtttaagatccttaatgtacccatgtcctctcaacttgctgcaaatcactggaaccagcaacaggcagaacaagaagagaggatgagaatgaaaaagctcacactagatatcaatgaacggcaagaacaagaagattatcaagaaatgttgcagtctcttgcacagcgcccagctccagcaaacaccaatcgtgagaggcggcctcgctaccaacatccgaagggagcacctaatgcagatctaatctttaagactggtgggaggagacgttgatccagcagcacgtgtcatttcattaggtcctgtatctgatgttgtggttagtggagtcctccagcaattgaatgagagcagtggacacatctcagcaggtcggtctagagagttgcgaatctaaacctgggacaggctggggccaggaggcagaaacaccagcctctgccaacaccggaacaagccgacgcttccagacaaggcggaaaaggccttttgtaatggaaatctcgcgagggttaatcttctcttgagaatggcagtcaagaaatgagatggttcacttgactactgagcagttacaccaaggagagcgtgaaggagatgattgagccagagaagaaacgggttgtgatggtaatggtgtgggggaaatgaacttgagctttaaacttgatttgagtttcagtgtctctgaattgaacatcccacgttggaagaagatacatttgggggctccaggactacagtagaaaagtatagagcaagcaggaaaatcttctagtaaaacttacatgcaggacaacaaaatgatgaaagatatccaaataccagataatccaccaggaaggcttttgtttaggaatttgtttcaagaggaacaagggatgagggagaaaaatccgttttatccatcagagtcagtgctataaaattgcctattaaggtaaaagaaaaatgtggagactattttactatacagagagcattaattcagatggcttagaaaagtgataccagcccaagaacagggatctaggtgagcccattgtaagtatcattgaaaacaaaacatgcccgtcaacatgtcacagaaaacgaacgaaggacaacaagaagtggatgagaatattttgttgaccttcatgggtttacagcctctgtctctaaacaaagtatggaaacaagtagagcttttattttgcttttgtttttgttttgtttttttttttgttttcccccactaaatagaaatgagggtccttagtctgtttctgacaatctgttaatttcttaggacagctgtctttggtttgctttccagcaggcgtagtatatttagtcggagagcacatctgtatgcgacaacttgattacatctttttttctagctattttgcattttttcttttaccatgtttcagtttctgcatgtagatttaaataaaaaacaaaacttgtaaagttgtaacatttcacatggaaatgctgcccaatcttcaccagcttcagaaatctgacctttgccgatgctgcaataaagtgttgtaattt

SEQ ID NO: 31083 - DNA, 2204 bp, Homo Sapiens
cagggctcggcggcaggtgcctcgtcgcgcacactcgcgggccgcggggaccggctcgggcgcggggccggctggggcggggcggggcggcggcgcgcgttccccgccggccacaccggccgccctgcactcggcgaggggcgtgtgcgcgggcctggcacccgcgggccccatgttcaccgagctgaggtccaagctgagccccccgcgtggccgcgccggggccgtgcgcgcgggcttcggggagcgccgggatgtggacgccactgcccacttcagcttctgccggaccctcctggagcacacggtgtcagctgagagcatcccctgccacttgcctcggacacctggcaccagcctcacgtggcatgactcccgcagccagagggcggccagcagcaggccaatcaagctcctgcagcagcccggcacagacaccccccagggccggctgtactctgaccactatggcctgtaccatacaagcccctcgctgggtggcctgacccggcccgtggtcctgtggagtcagcaggacgtctgcaagtggctcaagaagcactgtccccacaactacctcgtctacgtggaggccttctcccagcatgccatcaccggccgggcactgctgcggctgaatgcggagaagctgcagcggatggggctggcccaggaggcccagaggcaggaggtgctgcagcaggtgctccgcctgcaggtgcgtgaggaggggcggagcctgcagctgctcagccaagcttccttcgggaaaatgtcctagctgctgctgaggcttgaacccagaccccagcactgtgatgggagtccacggctagggaggaggccaagctggccccgcagcgcctcttggaccctgcgggatgccggggcggccaggctggcccaacggacagacaggaccaggatcacacctccaggcgcctctggttggacattccaggtcgtgccctggggctgggtgggtagggggctgcttgagtgtggccccacctcctgggacctgagcccaagccctcccctggtgcagctggcagcatgtggggcagctgcctggagccagaaccggtttggatgtcccccctagactcccagggagtctgtttatttacattcccctctccacgtgatgtcggtcccccatcgcctgctgagtcacttgtctgtccacccacccagcccagttctaggtcgttccccagcacctccaggttggcccacacaggtaccataagctgcctcggctccctgtggcttgtgcccatgcacctgccagggcccagcaggccaacccatcatctagagtagtggccatcagcacccgcctaacgggcaccatgccaagcactttcatcattatttatacatcgtcaccacaccccctctattcatgagaagtaaagctgagaaaggaccagattgaccaagcgccagagacaaaatgtggcacaacgagaaccccagccctgtccaggtggctccgcgcccagggcccaggcttagcagtgctccctgccctatctttgggaaaatcttgcttttatggtcttcccccctctcgccctcaagaacaagggccttgtgcgtgggccttcccattgctgctttcccaagaaggcctggattcaggggagaggccttcccagggccactccccttacaccctcccagaggcctgagcaacccctctctgggtggtttggggctggtgctgcctggcggaaggacagtgagggcggccctagccgcctccaccctcttgcgcctctgccctctcccagtccccctgtggcttctgaaaatctcagggacagatgaggctgagcccctagtcccctctgtgtgctttgagcctccagactcgaggctggtcactgcaggtcccaggtggaatttggacaactggcctggccgctcccatcctgtaagcccccaccacggggagaccctcatccctgcccctgtgtggctgcgcaagtattctgcccgcctcccaccatcagccttcgcccaaggggcccttctgcctctgcttccctcccttctcctctgtcttgccctggcccacgcacgcctgtctcgtcttccttgttttgctgcactcacttttttatactctgacaaaaaaaaaaaatcagaaataaagctggttcccaagtgaaaaaaaaaaaaaaaaaaaaaaaaaa

SEQ ID NO: 31084 - DNA, 2082 bp, Homo Sapiens
ccggcagggggagcgaggaggaagggaaccgcggccgggccagcggaggcggcggagcgcaccgcccaccagggctcagggtcctccgaccgggtgaagcttcgctggctgccaggatccccggcagggatgcacttcagcaccgtcaccagggacatggaagccttcacggccagcagcctgagcagcctgggggccgcggggggcttcccgggcgccgcgtcgcccggcgccgacccgtacggcccgcgcgagcccccgccgccgccgccgcgctacgacccgtgcgccgccgccgcccccggcgccccgggcccgccgccgccgccgcacgcctacccgtttgcgccggccgccggggccgccaccagcgccgccgccgagcccgagggccccggggccagctgcgcggccgcagccaaggcgccggtgaagaagaacgcgaaggtggccggtgtgagcgtgcagctagagatgaaggcgctgtgggacgagttcaaccagctgggcaccgagatgatcgtcaccaaggccggcaggcggatgtttcccaccttccaagtgaagctcttcggcatggatcccatggccgactatatgctgctcatggacttcgtgccggtggacgataagcgctaccggtacgccttccacagctcctcctggctggtggcggggaaggccgaccctgccacgccaggccgcgtgcactaccacccggactcgcctgccaagggcgcgcagtggatgaagcaaatcgtgtccttcgacaagctcaagctgaccaacaacctactggacgacaacggccacattattctgaattccatgcacagataccagccccgcttccacgtggtctatgtggacccacgcaaagatagcgagaaatatgccgaggagaacttcaaaacctttgtgttcgaggagacacgattcaccgcggtcactgcctaccagaaccatcggatcacgcagctcaagattgccagcaatcccttcgcgaaaggcttccgggactgtgaccctgaggactggccccggaaccaccggcccggcgcactgccgctcatgagcgccttcgcgcgctcgcggaaccccgtggcttccccgacgcagcccagcggcacggagaaagacgcggctgaggcccggcgagaattccagcgcgacgcgggcgggccagcagtgctcggggacccggcgcatcctccgcagctgctggcccgggtgctaagcccctcgctgcccggggccggcggcgccggcggcttagtcccgctgcccggcgcgcccggaggccggcccagtcccccgaaccccgagctgcgcctggaggcgcccggcgcatcggagccgctgcaccaccacccctacaaatatccggccgccgcctacgaccactatctcggggccaagagccggccggcgccctacccgctgcccggcctgcgtggccacggctaccacccgcacgcgcatccgcaccaccaccaccaccccgtgagtccagccgccgcggccgccgccgccgctgccgcagctgccgcggccgccaacatgtactcgtcggccggagccgcgccgcccggctcctacgactattgccccagataacacgggccctgtcgcgctcccgccccggtcctgcacagccccgaagttcgccgggcccggccaccctgccccaagggcaagcaaggaatacgttcccccagccccaggggccaccgcggctctccccttccccagcctcgaagccatgggggccccctcgccacccccagccccttgggctatcgaagtatccggttccccagtccctggagccaccgcgggtccttccccggccccgagggccaagggggtccccgcccgccagtgccaaagcgcccggtcggaggcggaaggaagtgatatttattgttctccccgagaccgcgtcgcccgcggcccggccggcagttgcagtgtagacagcccgagagccccgcctgcaggcggtgtagatacatgtagatactgtagatactgtagataccgccccggcgccgacttgataaacggtttcgcctcttttgg

SEQ ID NO: 31085 - DNA, 2093 bp, Homo Sapiens
acgcacgcgcactgcgcccagcatgagggtcgcggctctgatcagtggtgggaaggacagctgctataatatgatgcagtgcattgctgctgggcatcagatcgttgctttagcaaatctaagaccagctgaaaaccaagtggggtctgatgaactggatagctacatgtatcagacagtggggcaccatgccattgacttgtatgcagaagcaatggctcttcccctctatcgccgaaccataagaggaaggagcttggatacaagacaagtgtacaccaaatgtgaaggtgatgaggttgaagatctctatgagcttttgaaacttgttaaggaaaaagaagaagtagaggggatatcagtaggtgctatactttctgactatcagcgtattcgagtggaaaatgtgtgtaaaaggcttaatctccagcctttagcttatctttggcagagaaaccaggaagatttgctcagagagatgatatcatctaacattcaagcaatgatcatcaaagtagcagctttgggtttagatcctgataagcatcttgggaaaaccctggatcaaatggagccttatctcatagagctttctaagaagtatggagtacatgtttgtggagaaggtggagagtatgaaactttcactttggattgccctctatttaagaagaaaataattgtggattcatcagaagtagtcatacattcagctgatgcatttgcacctgtggcttatctacgctttttagaattgcacttggaggacaaggtgtcctcagtgcctgacaactacagaacatctaattatatatataatttttgaaaagtgttttggaacattgttcattaaaccaccatttctatacaaaaaaattgcatagtattttctcagttactatgactagtttatttttttctcatgactcttatttttttagagaaacatactttcactagaagaggttagtggaaccatttattaattgggaaaatgtcgacggcatgttcattaatagtgccaactttcttggaattcactctttctctttcgataacacatcttccctatgacctttttttcttttatttcatctataaaccccatttctgtagcatttctttttttatcacactagtttcttttcctccttctctctttcttgctccaatccctaccaataatgtcatgatgcagaggcatttgaaaatgaagatgaaaagatggtcactttatttagccagtcaagcttattctactgggtgtcgccaaagcgatttatcatttttattttaaatatattcatggttgaagtgtttcaacgttattggacaattaggaagaatgtccttaactcttacaagttattttataactgatttttaaaatgctgtttttcagtattaactatgttgaccttagaaaacttttacaaaaaatagactttatgttttagaacagttttaggttcacagcaaaaatggagcagaaaatgcagagatttcccatataccctctacctccacacattcacagcctcccctaccgtcaatgtcttataatagagtggtacatttgttacaactgatgaacctacattgacacattattatcacccaaagtccatagtttacgtgagggttcactcttggtgttgtacataatatgggttttgacaaatgtgtaatgacatttgtcaaccgttatagtattatacagaataatttcactgccttaaaaaatcctctgtgttttacttattcatccctccctctcctttaacccttagcaactgatcttttcactgtgtacatagttttgcttttaccagaatgtaatgtagttgaaatcatacagtatatagcttttcatgcagtatatagcttttcagattggcttctttcatgtattaatatgcatttaggtttctctgtatcttgtcatgtatatgtagctcattttttttttagtgtagaataaaattttattgtctggttctaccacatttcatttgtccatgcacctattgaagaacatctcagttgcttccatgttttggcgattatgaataaagcgactataaacatccatg

SEQ ID NO: 31086 - DNA, 1217 bp, Homo Sapiens
cgggaaggcggcgggctatccggtcctcggctgcggcgggcaccatggtcggtggcgaggcggctgccgcagtggaggagctggtttcgggggtgcggcaggcggccgacttcgcggagcagttccgctcctactcagagagcgagaagcaatggaaggcccgcatggaattcatcctgcgccacctgcccgactaccgcgacccgcccgacggcagtggccgcctggaccagctgctctccctctccatggtctgggccaaccatctcttcctaggctgcagttacaataaagaccttttagacaaggtgatggaaatggccgatgggattgaagtggaagacctgccacaatttactaccagaagtgaattaatgaaaaagcatcaaagctaagccagaagatttatcacattttcatcatcagctacaggattagaaaggaggctgggatgaatgtgacatagaccacagcagctctcttaagactcctggtattaccaacataaagaggcaggtggaatgagaaggactctgtctagattggcttttttaacattctcattttcccaggagttatcactgtaaaagtatgcatggatatttatgtatttataaatcatgcactctaagatgagttcatcaacattgtaaaagccctcttttctgttttcaggtttttttttttcttatcgacaaggtctcactctgtcgcccaggcagaagcacaaaggtgcagtattggctcattgcagcctcgaactcctgggctcatattttcagggttttttgttttttgttttgtttttttgagacagagtcttgctctgttgcccaggcagtagtgcagtggcgcgatatattttcagtttttaaacgtcagaatttttgtttaaaatgcctttttgggctgggcacagtggcttatgcccataataatcccagcactttgggaggccgaggtgagcagatcacctgaggttaggagtttgagaccagcctggccaacacgatgaaaccccgtctctactaaaaatacaaacaaaattagctgggcatggtggcggacatctgtaatcccagctactcaggaggctgaagcagaagaactgcttgaacctgggaggtggaggttgcagtaagccaagatcgtgccattgcactccagcctaggcaataagagcaaaactccgtctcaaaaaaaaaaaaaaaaaaaaa

SEQ ID NO: 31087 - DNA, 1437 bp, Homo Sapiens; identical to SEQ ID NO: 25758

SEQ ID NO: 31088 - DNA, 2507 bp, Homo Sapiens
gcagcgagtggccttcccggttggcgcgcgcccggggcggcggcgctggaggagctcgagacggagcctagttatgtctgggaggcgaacgcggtccggaggagccgctcagcgctccgggccaagggccccatctcctactaagcctctgcggaggtcccagcggaaatcaggctctgaactcccgagcatcctccctgaaatctggccgaagacacccagtgcggctgcagtcagaaagcccatcgtcttaaagaggatcgtggcccatgctgtagaggtcccagctgtccaatcacctcgcaggagccctaggatttcctttttcttggagaaagaaaacgagccccctggcagggagcttactaaggaggaccttttcaagacacacagcgtccctgccacccccaccagcactcctgtgccgaaccctgaggccgagtccagctccaaggaaggagagctggacgccagagacttggaaatgtctaagaaagtcaggcgttcctacagccggctggagaccctgggctctgcctctacctccaccccaggccgccggtcctgctttggcttcgaggggctgctgggggcagaagacttgtccggagtctcgccagtggtgtgctccaaactcaccgaggtccccagggtttgtgcaaagccctgggccccagacatgactctccctggaatctccccaccacccgagaaacagaaacgtaagaagaagaaaatgccagagatcttgaaaacggagctggatgagtgggctgcggccatgaatgccgagtttgaagctgctgagcagtttgatctcctggttgaatgagatgcagtggggggtgcacctggccagactctccctcctgtcctgtacatagccacctccctgtggagaggacacttagggtcccctcccctggtcttgttacctgtgtgtgtgctggtgctgcgcatgaggactgtctgcctttgagggcttgggcagcagcggcagccatcttggttttaggaaatggggccgcctggcccagccactcactggtgtcctgtctcttgtcgtcctgtccttcctatctccccaaagtaccatagccagtttccagatgggccacagactggggaggagaatcagtggcccagccagaagttaaagggctgagggttgaggtgagaggcacctctgctcttgttgggaggggtggctgcttggaaataggcccaggggctctgccagcctcggcctctccctcctgagttgccttctgttggtggctttcttcttgaacccacctgtgtaaagaggttttcagttccgtgggtttcccctttgattctgtaaatagtcccagagagaattcgtgggctgagggcaattctgtcttggaggaagaagctggacattcagcctgtggagtctgagttttgaaggatgtagggagccttagttgggtctcagaccataagtgtgtactacacagaagctgtgttttctagttctggtctgctgttgagatgtttggtaaatgccaggttgatagggcgctggctgcttggagcaaagggtgcatttcagggtgtggccaccaggtgctgtgagtttctgtggctcatggcctctgggctggtcccttgcacagggcccacgctggagtcttaccactctgctgcaggggtggaaggtggcccctcttgtcacccatacccatttcttacaaaataagttacaccgagtctacttggccctagaagagaaagttgaagagtcccagacctactagcattttgcaactatgcttgtaaagtcctcggaaagtttcctcgcgtaccagacagcggcgggggctgatagcaattttagtttttggcctccctatcctctcacatgagaacactgcctggatgcatctcatgatctctggagaatttccccatctttctcttctttccatcgtgtggattcaatagtttggatttgaaggctgccctgcccccgactctcctgccgcacccctggccattgtaccttttgatgtttagaagttcgtggaagtagacgctgaggtgtgcagaggagctggtggataacagagaatgccagggaagatgagtgctgggtcagggtacttggatgaaacggtgcaggccaggcgggccctaataaaaccctctgccaggtctgggagtcccaggccatctgctcaacgctctgtggtttgtcagacctgcaagcaagccccctgctggggaagcctaggtgtccttgagctgaaccgcactgaagaactcttgtcctcactggctgatgcagcagaactcttgggaaatgtcttagtcctgcagaatcaggagtcaccagatgatgcagagttgagatcatcattgcaaagttctctgttcctgaggaactaaatttaaggaaaaaatgggattttgttttagagttggaaaaaaagcctgattaaagagtttctgcctgttaaaaaaaaaaaaaaaaaaaaaaa

SEQ ID NO: 31089 - DNA, 6414 bp, Homo Sapiens
cacacagaagcggcagccaccgaggagggagcagtgccgggagccccgacggcgccttgctgcatggagctgggccgctgacagctgtcgtgcccgcagcctctgacctccctgggaccccggcgtctgaggctcatagtctgctccctgtcttctgtcagcctcagggcatccagcgtctcaggccgacctgtccctgggacccggcgtttcgcttctcagccatggagcggtgcagccgctgccatcgcctcctcctcctcctacctctggtgctggggctgagcgcggccccaggctgggcaggtgcaccccctgtggatgtgctccgggccctgaggttcccctccctccctgatggtgtccggagagcgaaaggcatctgtccagctgatgtggcctaccgagtggcacgacctgcccagctcagtgcacccactcgccagcttttcccaggaggatttcccaaagatttctctctgctgactgttgtccggacccgccctggtctccaagctcccctcctgactctctacagtgcccagggtgtccgacagctgggcctggagctgggccgacctgtccgcttcctgtatgaagaccagacagggcggcctcaacctccctctcagccagtcttccgaggcctcagcctagcagatggcaagtggcaccgtgtggctgtggctgtgaagggccagtctgtcaccctcattgttgactgcaagaagcgagtcacccggcctctcccccgaagtgctcgtccagtattggacacccatggagtgatcatctttggtgcccgtattctggatgaagaagtctttgagggtgatgtccaggagctggccattgtcccaggggtccaggcagcctatgaatcatgtgaacagaaggagctggaatgcgaggggggccagagggaaagaccccaaaaccaacagcctcacagagcccagagatctccacagcagcaaccatcaagacttcacaggccacaaaatcaggaaccccagagccagcccactgagtctctctactatgactacgagcccccctattatgatgtgatgactacggggacaacccctgattatcaggaccccaccccaggtgaagaggaagaaatcctggagtcgagcctcttgccaccccttgaggaggagcagacagatctccaggtcccccccacagccgacaggttccaggcagaggaatatggggagggtggcacagacccccctgaagggccctacgattacacctatggctatggggatgattatcgtgaggagacagagcttggccctgccctctctgcggagacagcccactcaggagccgctgcccatggaccccgagggctgaagggagagaaaggagagcctgcagtgttggaacctggtatgctcgtggaggggccccctggcccagaagggcctgcgggattgattggtccccctggcatccaggggaacccaggcccagttggagaccctggagagaggggcccccctggccgagcagggctccctggatcagatggggctcctggtcctcctggcacatctctcatgctcccattccggtttggcagtggtgggggtgacaagggccctgtggtggcggcccaggaggctcaggcccaggcgatcctgcagcaggcgaggctggcgctccgtggaccccctggccccatgggatacacagggcgccctggacccttgggccaacctgggagccctggcctgaaaggagagtctggagacttaggacctcagggccccagaggacctcagggcctcacaggctccctgggcaaggctgggcgaaggggccgggcaggtgctgatggagcccgagggatgcctggagatcctggagtgaagggtgaccgaggttttgatggactcccagggctccctggagagaagggccataggggtgatactggtgcccagggccttcctggtccccctggtgaggatggagagaggggagatgacggggagattgggcctcgagggctgcctggagagtcgggacctcgaggtctccttggccccaaaggcccacctggtattcctggaccccctggcgtccgaggcatggatggtccccagggccccaaagggagcttgggaccccagggagagccaggacctcctggacaacagggcacccctgggacccagggtcttcccgggccccagggtgccatcggccctcatggagagaagggtcctcaagggaagccagggctccccggcatgcctggctcagacggacccccgggtcacccagggaaggaaggtccccctggaaccaaaggaaaccagggtccctctggacctcagggacctctaggatacccaggacctcgaggggtcaagggtgtggacggaattcggggtctgaagggtcataagggtgagaagggtgaggatggctttcctgggttcaaaggtgacataggcgtgaaaggtgacaggggcgaagttggagtccctggttccaggggagaggatggtcctgaggggccaaagggacgcactggaccgactggagaccctgggcccccagggctcatgggcgagaagggcaagctgggtgttcctggtctgcctggctatcctggacgtcagggacccaaggggtccctaggatttcctggctttcctggtgccagtggagagaagggagcccggggcctgtcggggaagtcagggcctcggggagaacggggccccacgggtccacggggtcagcggggaccccgaggtgccactgggaagtctggagctaagggaacatctggtggtgatggcccccatggcccccctggagagaggggcctccctggacctcagggtcccaacgggtttcctggaccgaaaggacccccgggcccccctgggaaggacgggctgccgggacacccaggccaaagaggagaagtgggtttccaagggaagaccggcccccctggtcctccaggagtggtgggacctcagggagcagcaggagaaaccggccctatgggggagagaggtcacccaggccccccggggccccctggagagcagggactacctgggacagctggaaaagaaggaacaaagggtgaccctggtccccctggggccccagggaaggatggtcctgctggtctgaggggattcccaggagagagaggcctcccaggcactgctggtggacctggtttgaaggggaatgaaggtccgtctggcccccctggccctgcaggctcccctggggaacgaggtgcagcaggatcagggggacccattggtcgccaggggcgcccaggcccgcagggtccccctggagcagcaggagagaaaggtgtcccaggtgagaagggccccattggcccgactggccgagatggagtgcagggtcctgtggggcttcctggtcctgctgggcctccaggtgtggctggagaggatggagacaagggtgaggtgggggaccccggacagaagggcaccaaagggaacaagggtgaacatggccctcctggaccccctggacccattggtcctgtggggcagcctggagcagcgggagcagatggggagcccggagctcggggaccccagggacactttggagccaaaggtgatgaaggaacaagaggattcaatgggcccccaggacccattggcctacagggtttgccaggcccctctggggagaagggagaaacaggagatgtgggtcctatgggaccacctggccccccaggacctcgaggtccagctggacccaatggcgctgatggcccacaaggtcccccaggaggtgttgggaacctgggtccccctggagagaagggggaaccaggagagtcaggatctccagggatccagggcgagccaggtgtcaagggtccacgcggggaacgtggagagaaaggagagtcggggcagccaggagagccagggccaccaggcgctaaaggcccacagggcgatgatggccccaaagggaaccctggtcctgttggttttcctggtgaccctggcccccctggagaaggtggccctcggggccaggatggtgctaagggtgaccgaggcgaggatggtgagccaggacagcctggatcccctggtcccaccggggagaatggacccccagggccacttggaaagcgaggtcctgctggctcgcctggttccgaggggcgacaaggagggaagggagccaagggagatcctggcgctataggtgccccggggaagacaggcccggtgggtcctgcaggcccagcagggaaacctggccctgatggtctgagggggctcccaggctcagtgggtcagcaaggccgacctggagctacaggccaggctgggcccccaggtcctgtgggacccccagggctgcctggtctccggggcgatgctggagccaagggagagaagggccacccaggtctcattggactgattgggcccccgggtgagcagggagagaagggagatcggggacttcctgggcctcagggctcccctgggcagaagggtgagatgggtatcccaggagcatccggccccattggtcctggaggtccccccggcctccccggacctgctggccccaaaggagccaaaggagccacaggcccaggcggacccaagggagagaagggtgtgcagggccctccaggacacccgggtcccccaggcgaggtgatccagccactgcccattcagatgcccaagaagactcggcgctcggtggatggaagccgtctgatgcaggaagatgaggccataccgaccgggggagcccccggcagtcctggggggctggaggagatctttggctcactcgactccctgcgggaggagatcgagcagatgaggcggccaacagggacccaggacagccctgctcgcacctgccaggacctgaagctgtgccacccagagcttcccgatggagagtactgggtcgaccccaaccagggctgtgctcgggatgccttccgagttttctgcaacttcacagcagggggtgagacctgtgtgacgcctagggatgacgtcacgcagttctcttacgtggactcagagggctccccagtgggtgtggtccagctcaccttcctgcggctgctcagcgtctcagcccaccaggacgtctcctacccctgctctggagcagcccgtgacggtcccctgagactccgtggggccaatgaggatgagctgagcccggagactagcccctatgtcaaagaattcagagatggctgccagacacagcaaggccggacggtgctggaggtgcgaacgcctgtgctggagcagctgccagtgctggatgcctccttctcagacctgggagccccaccgaggcggggaggggtgctgctggggcctgtctgcttcatgggataggaccgtctctgtctgatcctgtccattcggtaccaggcccacctggaatcccacaacatcagctctgtgccacctcccaagagggctcctcactatctagggagccctgggccagggctggagagccctcagtcggggcaggccaggggaggggtgaagtggttgcctggacaccccacgggaggagtggcatctgggctcttggccctcccacctggagcctgttacccgttagagagctgagagcccttatttaaaactcacctcccaatcaccccaaacaaatggaagagaagagaaaggacatggcgtattttgtatttaaaagtaattgtattaattatttaaagtgtggaaagcaaaataacaaaaaagagaaacgccaacaaaaaatcagcagatgttgaagacaggggtctcgggggtgggctccggcacccacatctgagtcaggactttcctcagtgactgtgtgtaggggggttcagggctgaacccacctccctcccaccttcctcccacctcacctgtcgcacccactgtgaaagttggaatatgtggtctccctggcctcagggctctgactctgccagggtggggctctctaacccacaggtgttggctgcctggcccatgtgcccactgtctcttccacttggtctgggtttggcaggcactgctgctacttgagggccaggatgctcccccagggaagaaacggaatagtgtggggtgtgtgcagggctgcatccgcagatggctggaatattaaaattcttctatattggctggtaaattgccatggccctgagccactgagtatgttcattgccacccctgtcctcccctgggcacccctcactttccctgatcctgcaattaaagggttaatgtgtggcatatggaagggactcccaggaccctgtgcccagcttccatgctgactgatggttaaataatgtgattgtctcctcccagg

SEQ ID NO: 31090 - DNA, 7546 bp, Homo Sapiens
cgtccctgcagccctcgcccggcgctccagtagcaggacccggtctcgggaccagccggtaatatgcacgtgtcactagctgaggccctggaggttcggggtggaccacttcaggaggaagaaatatgggctgtattaaatcaaagtgctgaaagtctccaagaattattcagaaaagtaagcctagctgatcctgctgcccttggcttcatcatttctccatggtctctgctgttgctgccatctggtagtgtgtcatttacagatgaaaatatttccaatcaggatcttcgagcattcactgcaccagaggttcttcaaaatcagtcactaacttctctctcagatgttgaaaagatccacatttattctcttggaatgacactgtattggggggctgattatgaagtgcctcagagccaacctattaagcttggagatcatctcaacagcatactgcttggaatgtgtgaggatgttatttacgctcgagtttctgttcggactgtgctggatgcttgcagtgcccacattaggaatagcaattgtgcaccctcattttcctacgtgaaacacttggtaaaactggttctgggaaatctttctgggacagatcagctttcctgtaacagtgaacaaaagcctgatcgaagccaggctattcgagatcgattgcgaggaaaaggattaccaacaggaagaagctctacttctgatgtactagacatacaaaagcctccactctctcatcagacctttcttaacaaagggcttagtaaatctatgggatttctgtccatcaaagatacacaagatgagaattatttcaaggacattttatcagataattctggacgtgaagattctgaaaatacattctccccttaccagttcaaaactagtggcccagaaaaaaaacccatccctggcattgatgtgctttctaagaagaagatctgggcttcatccatggacttgctttgtacagctgacagagacttctcttcaggagagactgccacatatcgtcgttgtcaccctgaggcagtaacagtgcggacttcaactactcctagaaaaaaggaggcaagatactcagatggaagtatagccttggatatctttggccctcagaaaatggatccaatatatcacactcgagaattgcccacctcctcagcaatatcaagtgctttggaccgaatccgagagagacaaaagaaacttcaggttctgagggaagccatgaatgtagaagaaccagttcgaagatacaaaacttatcatggtgatgtctttagtacctccagtgaaagtccatctattatttcctctgaatcagatttcagacaagtgagaagaagtgaagcctcaaagaggtttgaatccagcagtggtctcccaggggtagatgaaaccttaagtcaaggccagtcacagagaccgagcagacaatatgaaacaccctttgaaggcaacttaattaatcaagagatcatgctaaaacggcaagaggaagaactgatgcagctacaagccaaaatggcccttagacagtctcggttgagcctatatccaggagacacaatcaaagcgtccatgcttgacatcaccagggatccgttaagagaaattgccctagaaacagccatgactcaaagaaaactgaggaatttctttggccctgagtttgtgaaaatgacaattgaaccatttatatctttggatttgccacggtctattcttactaagaaagggaagaatgaggataaccgaaggaaagtaaacataatgcttctgaacgggcaaagactggaactgacctgtgataccaaaactatatgtaaagatgtgtttgatatggttgtggcacatattggcttagtagagcatcatttgtttgctttagctaccctcaaagataatgaatatttctttgttgatcctgacttaaaattaaccaaagtggccccagagggatggaaagaagaaccaaagaaaaagaccaaagccactgttaattttactttgtttttcagaattaaattttttatggatgatgttagtctaatacaacatactctgacgtgtcatcagtattaccttcagcttcgaaaagatattttggaggaaaggatgcactgtgatgatgagacttccttattgctggcatccttggctctccaggctgagtatggagattatcaaccagaggttcatggtgtgtcttactttagaatggagcactatttgcccgccagagtgatggagaaacttgatttatcctatatcaaagaagagttacccaaattgcataatacctatgtgggagcttctgaaaaagagacagagttagaatttttaaaggtctgccaaagactgacagaatatggagttcattttcaccgagtgcaccctgagaagaagtcacaaacaggaatattgcttggagtctgttctaaaggtgtccttgtgtttgaagttcacaatggagtgcgcacattggtccttcgctttccatggagggaaaccaagaaaatatctttttctaaaaagaaaatcacattgcaaaatacatcagatggaataaaacatggcttccagacagacaacagtaagatatgccagtacctgctgcacctctgctcttaccagcataagttccagctacagatgagagcaagacagagcaaccaagatgcccaagatattgatgtgctacacaaaagatggagcatagtatcttcaccagaaagggagatcaccttagtgaacctgaaaaaagatgcaaagtatggcttgggatttcaaattattggtggggagaagatgggaagactggacctaggcatatttatcagttcagttgcccctggaggaccagctgacttggatggatgcttgaagccaggagaccgtttgatatctgtgaatagtgtgagtctggagggagtcagccaccatgctgcaattgaaattttgcaaaatgcacctgaagatgtgacacttgttatctctcagccaaaagaaaagatatccaaagtgccttctactcctgtgcatctcaccaatgagatgaaaaactacatgaagaaatcttcctacatgcaagacagtgctatagattcttcttccaaggatcaccactggtcacgtggtaccctgaggcacatctcggagaactcctttgggccatctgggggcctgcgggaaggaagcctgagttctcaagattccaggactgagagtgccagcttgtctcaaagccaggtcaatggtttctttgccagccatttaggtgaccaaacctggcaggaatcacagcatggcagcccttccccatctgtaatatccaaagccaccgagaaagagactttcactgatagtaaccaaagcaaaactaaaaagccaggcatttctgatgtaactgattactcagaccgtggagattcagacatggatgaagccacttactccagcagtcaggatcatcaaacaccaaaacaggaatcttcctcttcagtgaatacatccaacaagatgaattttaaaactttttcttcatcacctcctaagcctggagatatctttgaggttgaactggctaaaaatgataacagcttggggataagtgtcacgggaggtgtgaatacgagtgtcagacatggtggcatttatgtgaaagctgttattccccagggagcagcagagtctgatggtagaattcacaaaggtgatcgcgtcctagctgtcaatggagttagtctagaaggagccacccataagcaagctgtggaaacactgagaaatacaggacaggtggttcatctgttattagaaaagggacaatctccaacatctaaagaacatgtcccggtaaccccacagtgtaccctttcagatcagaatgcccaaggtcaaggcccagaaaaagtgaagaaaacaactcaggtcaaagactacagctttgtcactgaagaaaatacatttgaggtaaaattatttaaaaatagctcaggtctaggattcagtttttctcgagaagataatcttataccggagcaaattaatgccagcatagtaagggttaaaaagctctttcctggacagccagcagcagaaagtggaaaaattgatgtaggagatgttatcttgaaagtgaatggagcctctttgaaaggactatctcagcaggaagtcatatctgctctcaggggaactgctccagaagtattcttgcttctctgcagacctccacctggtgtgctaccggaaattgatactgcgcttttgaccccacttcagtctccagcacaagtacttccaaacagcagtaaagactcttctcagccatcatgtgtggagcaaagcaccagctcagatgaaaatgaaatgtcagacaaaagcaaaaaacagtgcaagtccccatccagaagagacagttacagtgacagcagtgggagtggagaagatgacttagtgacagctccagcaaacatatcaaattcgacctggagttcagctttgcatcagactctaagcaacatggtatcacaggcacagagtcatcatgaagcacccaagagtcaagaagataccatttgtaccatgttttactatcctcagaaaattcccaataaaccagagtttgaggacagtaatccttcccctctaccaccggatatggctcctgggcagagttatcaaccccaatcagaatctgcttcctctagttcgatggataagtatcatatacatcacatttctgaaccaactagacaagaaaactggacacctttgaaaaatgacttggaaaatcaccttgaagactttgaactggaagtagaactcctcattaccctaattaaatcagaaaaaggaagcctgggttttacagtaaccaaaggcaatcagagaattggttgttatgttcatgatgtcatacaggatccagccaaaagtgatggaaggctaaaacctggggaccggctcataaaggttaatgatacagatgttactaatatgactcatacagatgcagttaatctgctccgggctgcatccaaaacagtcagattagttattggacgagttctagaattacccagaataccaatgttgcctcatttgctaccggacataacactaacgtgcaacaaagaggagttgggtttttccttatgtggaggtcatgacagcctttatcaagtggtatatattagtgatattaatccaaggtccgtcgcagccattgagggtaatctccagctattagatgtcatccattatgtgaacggagtcagcacacaaggaatgaccttggaggaagttaacagagcattagacatgtcacttccttcattggtattgaaagcaacaagaaatgatcttccagtggtccccagctcaaagaggtctgctgtttcagctccaaagtcaaccaaaggcaatggttcctacagtgtggggtcttgcagccagcctgccctcactcctaatgattcattctccacggttgctggggaagaaataaatgaaatatcgtaccccaaaggaaaatgttctacttatcagataaagggatcaccaaacttgactctgcccaaagaatcttatatacaagaagatgacatttatgatgattcccaagaagctgaagttatccagtctctgctggatgttgtggatgaggaagcccagaatcttttaaacgaaaataatgcagcaggatactcctgtggtccaggtacattaaagatgaatgggaagttatcagaagagagaacagaagatacagactgcgatggttcacctttacctgagtattttactgaggccaccaaaatgaatggctgtgaagaatattgtgaagaaaaagtaaaaagtgaaagcttaattcagaagccacaagaaaagaagactgatgatgatgaaataacatggggaaatgatgagttgccaatagagagaacaaaccatgaagattctgataaagatcattcctttctgacaaacgatgagctcgctgtactccctgtcgtcaaagtgcttccctctggtaaatacacgggtgccaacttaaaatcagtcattcgagtcctgcggggtttgctagatcaaggaattccttctaaggagctggagaatcttcaagaattaaaacctttggatcagtgtctaattgggcaaactaaggaaaacagaaggaagaacagatataaaaatatacttccctatgatgctacaagagtgcctcttggagatgaaggtggctatatcaatgccagcttcattaagataccagttgggaaagaagagttcgtttacattgcctgccaaggaccactgcctacaactgttggagacttctggcagatgatttgggagcaaaaatccacagtgatagccatgatgactcaagaagtagaaggagaaaaaatcaaatgccagcgctattggcccaacatcctaggcaaaacaacaatggtcagcaacagacttcgactggctcttgtgagaatgcagcagctgaagggctttgtggtgagggcaatgacccttgaagatattcagaccagagaggtgcgccatatttctcatctgaatttcactgcctggccagaccatgatacaccttctcaaccagatgatctgcttacttttatctcctacatgagacacatccacagatcaggcccaatcattacgcactgcagtgctggcattggacgttcagggaccctgatttgcatagatgtggttctgggattaatcagtcaggatcttgattttgacatctctgatttggtgcgctgcatgagactacaaagacacggaatggttcagacagaggatcaatatattttctgctatcaagtcatcctttatgtcctgacacgtcttcaagcagaagaagagcaaaaacagcagcctcagcttctgaagtgacatgaaaagagcctctggatgcatttccatttctctccttaacctccagcagactcctgctctctatccaaaataaagatcacagagcagcaagttcatacaacatgcatgttctcctctatcttagaggggtattcttcttgaaaataaaaaatattgaaatgctgtatttttacagctactttaacctatgataattatttacaaaattttaacactaaccaaacaatgcagatcttagggatgattaaaggcagcatttgatgatagcagacattgttacaaggacatggtgagtctatttttaatgcaccaatcttgtttatagcaaaaatgttttccaatattttaataaagtagttattttataggggatacttgaaaccagtatttaagctttaaatgacagtaatattggcatagaaaaaagtagcaaatgtttactgtatcaatttctaatgtttactatatagaatttcctgtaatatatttatatactttttcatgaaaatggagttatcagttatctgtttgttactgcatcatctgtttgtaatcattatctcactttgtaaataaaaacacaccttaaaacatg

SEQ ID NO: 31091 - DNA, 4089 bp, Homo Sapiens
gcagagtgtgcagtatagattcagcgtttgtcgactgactgaatgatagcacaatccaggctgcttcctgttggctgggtttggttggactgggacccgtcagaggaaaaggcaacgccgctgacaaagaacattgccgaaaggttcatgggaggctccggctaacaggttgcacactgggccacagaggatccagcaaggatgaagaaatggagcagcacagacttgggggcagctgcggacccactccaaaaggacacctgcccagaccccctggatggagaccctaactccaggccacctccagccaagccccagctctccacggccaagagccgcacccggctctttgggaagggtgactcggaggaggctttcccggtggattgccctcacgaggaaggtgagctggactcctgcccgaccatcacagtcagccctgttatcaccatccagaggccaggagacggctccaccggtgccaggctgctgtcccaggactctgtcgccgccagcaccgagaagaccctcaggctctatgatcgcaggagtatctttgaagccgttgctcagaataactgccaggatctggagagcctgctgctcttcctgcagaagagcaagaagcacctcacagacaacgagttcaaagaccctgagacagggaagacctgtctgctgaaagccatgctcaacctgcatgacggacagaacaccaccatccccctgctcctggagatcgcgcggcaaacggacagcctgaaggagcttgtcaacgccagctacacggacagctactacaagggccagacagcactgcacatcgccatcgagagacgcaacatggccctggtgaccctcctggtggagaacggagcagacgtccaggctgcggcccatggggacttctttaagaaaaccaaagggcggcctggattctacttcggtgaactgcccctgtccctggccgcgtgcaccaaccagctgggcatcgtgaagttcctgctgcagaactcctggcagacggccgacatcagcgccagggactcggtgggcaacacggtgctgcacgccctggtggaggtggccgacaacacggccgacaacacgaagtttgtgacgagcatgtacaatgagattctgatcctgggggccaaactgcacccgacgctgaagctggaggagctcaccaacaagaagggaatgacgccgctggctctggcagctgggaccgggaagatcggggtcttggcctatattctccagcgggagatccaggagcccgagtgcaggcacctgtccaggaagttcaccgagtgggcctacgggcccgtgcactcctcgctgtacgacctgtcctgcatcgacacctgcgagaagaactcggtgctggaggtgatcgcctacagcagcagcgagacccctaatcgccacgacatgctcttggtggagccgctgaaccgactcctgcaggacaagtgggacagattcgtcaagcgcatcttctacttcaacttcctggtctactgcctgtacatgatcatcttcaccatggctgcctactacaggcccgtggatggcttgcctccctttaagatggaaaaaattggagactatttccgagttactggagagatcctgtctgtgttaggaggagtctacttctttttccgagggattcagtatttcctgcagaggcggccgtcgatgaagaccctgtttgtggacagctacagtgagatgcttttctttctgcagtcactgttcatgctggccaccgtggtgctgtacttcagccacctcaaggagtatgtggcttccatggtattctccctggccttgggctggaccaacatgctctactacacccgcggtttccagcagatgggcatctatgccgtcatgatagagaagatgatcctgagagacctgtgccgtttcatgtttgtctacatcgtcttcttgttcgggttttccacagcggtggtgacgctgattgaagacgggaagaatgactccctgccgtctgagtccacgtcgcacaggtggcgggggcctgcctgcaggccccccgatagctcctacaacagcctgtactccacctgcctggagctgttcaagttcaccatcggcatgggcgacctggagttcactgagaactatgacttcaaggctgtcttcatcatcctgctgctggcctatgtaattctcacctacatcctcctgctcaacatgctcatcgccctcatgggtgagactgtcaacaagatcgcacaggagagcaagaacatctggaagctgcagagagccatcaccatcctggacacggagaagagcttccttaagtgcatgaggaaggccttccgctcaggcaagctgctgcaggtggggtacacacctgatggcaaggacgactaccggtggtgcttcagggtggacgaggtgaactggaccacctggaacaccaacgtgggcatcatcaacgaagacccgggcaactgtgagggcgtcaagcgcaccctgagcttctccctgcggtcaagcagagtttcaggcagacactggaagaactttgccctggtcccccttttaagagaggcaagtgctcgagataggcagtctgctcagcccgaggaagtttatctgcgacagttttcagggtctctgaagccagaggacgctgaggtcttcaagagtcctgccgcttccggggagaagtgaggacgtcacgcagacagcactgtcaacactgggccttaggagaccccgttgccacggggggctgctgagggaacaccagtgctctgtcagcagcctggcctggtctgtgcctgcccagcatgttcccaaatctgtgctggacaagctgtgggaagcgttcttggaagcatggggagtgatgtacatccaaccgtcactgtccccaagtgaatctcctaacagactttcaggtttttactcactttactaaacagtttggatggtcagtctctactgggacatgttaggcccttgttttctttgattttattcttttttttgagacagaatttcactcttctcacccaggctggaatgcagtggcacaattttggctccctgcaacctccgcctcctggattccagcaattctcctgcctcggcttcccaagtagctgggattacaggcacgtgccaccatgtctggctaattttttgtatttttttaatagatatggggtttcgccatgttggccaggctggtctcgaactcctgacctcaggtgatccgcccacctcggcctcccaaagtgctgggattacaggtgtgagcctccacacctggctgttttctttgattttattctttttttttttttctgtgagacagagtttcactcttgttgcccaggctggagtgcagtggtgtgatcttggctcactgcaacctctgcctcccgggttcaagcgattcttctgcttcagtctcccaagtagcttggattacaggtgagcactaccacgcccggctaatttttgtatttttaatagagacggggtttcaccatgttggccaggctggtctcgaactcttgacctcaggtgatctgcccgccttggcctcccaaagtgctgggattacaggtgtgagccgctgcgctcggccttctttgattttatattattaggagcaaaagtaaatgaagcccaggaaaacacctttgggaacaaactcttcctttgatggaaaatgcagaggcccttcctctctgtgccgtgcttgctcctcttacctgcccgggtggtttgggggtgttggtgtttcctccctggagaagatgggggaggctgtcccactcccagctctggcagaatcaagctgttgcagcagtgccttcttcatccttccttacgatcaatcacagtctccagaagatcagctcaattgctgtgcaggttaaaactacagaaccacatcccaaaggtacctggtaagaatgtttgaaagatcttccatttctaggaaccccagtcctgcttctccgcaatggcacatgcttccactccatccatactggcatcctcaaataaacagatatgtatacatat

SEQ ID NO: 31092 - DNA, 2806 bp, Homo Sapiens
ttttctggggccgctccagctggtgccggccacctccactcccctttgcttcttgctgtccctaaggtcggatggggacaggctggggccaccagccagctccatggacagggactttgcctctgctcaccttccagctgtggaaagaaaagaagaaacgcctgtgttgatttccatttggaagatccttcctcctcctaaacttccaggggcagacaaagtgattcgatcttggattgactgtagaagaagggacagaaagagcccagaacattcccccagatgttccaactgtgacttctccctggcgccttgatgggagcatctgaaacacccttcaccatctagatgcacaaggaagcagagatgctaattggtccccagctggatgagaagcgctgggggtggaggttgggagatgggagtgctgcccctcccttcctcccccaagccctgtctttccttctcctcctgccactggccagcgccctacagcccactccactgccctttcaagagctgaggctggtggggggccccagccgctgccggggccgcctggaagtcatgcacggtggctcctggggcagcgtctgtgatgacgactgggacgtggtggacgccaacgtagtgtgtcgccagctgggctgtggcctggcactgcccgtgccacggccccttgcctttggccaaggccgaggccccatcctgctggacaacgtggagtgccgcgggcaggaagctgcgctgagcgagtgcggcagccgcggctggggcgtccacaattgctttcactacgaggatgtggctgtcctgtgtgatgaattcttgccaacgcagcccccaacaaggaagatgttaaccagtagagcacctcctacgacactgccgaatggaaaaagtgagggcagcgtacgcctggtagggggcgcgaacctgtgtcagggccgagtggagatcctgcacagtggcctgtggggcaccgtgtgtgacgacgactgggggctgccggatgccgctgtggtctgtcgtcagctgggctgcggggcggccatggccgccaccaccaacgccttcttcggctatggcaccggacacatcctgctggacaacgtgcactgcgaaggcggcgagccccgcctggcagcctgccagagcctgggctggggtgtgcacaactgcggccaccacgaggacgcgggcgcgctctgcgcaggcctgggtcccccaacgctcacagcactgccatcctcagccacaagagaggactgggcttggcagacagatccgtccgctacaggagttggcccccagccttcccgggagacagcactgctcaccaccgccgcctgggccgcggggaagaaaagtggacggctgcgactggtgggcggcccgggtccgtgccgcggccgcgtggaggtgttgcacgccgggggctggggcaccgtgtgcgacgatgactgggactttgcggacgcgcgcgtggcctgccgcgaagcgggctgcgggcctgcgctgggcgctacgggactgggccacttcggctacggccgcggccccgtgctgctggacaacgtgggctgcgccggcaccgaggctcgcctgagcgactgcttccacctgggctggggccagcacaactgcggccaccacgaggacgcgggagcgctctgcgcaggcccagaggagctgggactgcaagtccagcaggatggttctgagaccacgcgggtgcccactcctcggcccagggacgggcatctacgtctggtcaatggagcccaccgatgcgagggacgtgtagagctctacctagggcaacggtggggcactgtctgtgatgatgcttgggacctgcgggcagccggtgtcctgtgccgccagctgggctgtggccaggccctcgcagcccctggcgaggctcactttggcccaggccgaggccccattctcctggacaatgtcaagtgccgtggggaagaaagtgctctgctgctctgctctcatatccgctgggatgcccacaactgtgaccacagcgaggatgccagtgtcctgtgccagccttcatgacccagcccgctctgcagaccacctcttcttctgggagctgtgacctcccttcctcctccaggaagccctcctcttgtgatgactacagttcactttgcccctccttcccttgcctgggagagagcctacctagacagtgcagtcctgcttgggggagcctggctgtacccccgtccacttactgcgtgacctcagcctgtcatcgactgttgtgagcccaattcagtgaaagctcctgtggttttgctcagccaaaaccaaaacgaggggaagaggatgattcctaactcttctgtttggtggggctctttttatagcaccagactctgccttccttgacctagatccaggaggctcaggggctctttaaatggggtatctcctcttcccccaacccatcttgggatccccaagaagagggaaggcaggaggggcctacagctcctaccttgggccctcaggggctgcagaggaacctgggtccctgtcctgccctgctccgcgagggcctggactaactcagatggtgctcggctggacaaggggactgggggaggggccaaagcagggacagtggcccctccctgcagctggaaccagcatctctgatttatgccgtctccaccacagagcctccactttgcaggagtgaagaaccctgggggcctgtagccaccagttcataggtgccaagtcaataaagcattgtcccccgtctcttataactgca

SEQ ID NO: 31093 - DNA, 602 bp, Homo Sapiens
gacgcggggccggaacgcgaagagggtggtggagtcgggctacccactgattttccttcccttacttcccctgagcccttgggcccacttcccagcctaccgcttccgtccccgcccgactcttgggccagcgcctgggcccacactttcctatcccccgcagatgccggtggccgtgggtccctacggacagtcccagccaagctgcttcgaccgtgtcaaaatgggcttcgtgatgggttgcgccgtgggcatggcggccggggcgctcttcggcaccttttcctgtctcaggatcggaatgcggggtcgagagctgatgggcggcattgggaaaaccatgatgcagagtggcggcacctttggcacattcatggccattgggatgggcatccgatgctaaccatggttgccaactacatctgtcccttcccatcaatcccagcccatgtactaataaaagaaagtctttgagtaaaaaaaaaaaaaaaaaaaaaaaaaaaaaaaaaaaaaaaaaaaaaaaaaaaaaaaaaaaaaaaaaaaaaaaaaaaaaaaaaaaaaaaaaaaaaaaaaaaaaaaaaaaaaaaaaaaaaaaaaaaaaa

SEQ ID NO: 31094 - DNA, 2780 bp, Homo Sapiens
aagatagcaaatacacccccttcctcttgtaacccggtcaggcctagggttcctccctgagttccagaataggccacccagttggggcggacccttaaggcattctgggcccacgcctgcctataaaccctcatagtgtgacctttgacccctggtgtgatcttgggcccgggctgggaccagcccctagtgtgggttgtgggggcggccatggagctgggcagctgcttcaagacctatgaggacttcaaggagtgcttcagcgcctacaaaagggagaacaggtgctccttcattctcagggactgcgtctccgtccgcttccacaacctcaaccatggcacctccatccgcgaagacatcctgtatgtgcaggtgaaatttgtctgcattcggacccaatcaaacaggaagagaacgcgggaggcagacatgtgcccagcgtacttgctcctaaggtacaacgagagactagatagactatttatcagtgaactaaacacacagcacatacatggtgactctaaagtggctagtcctggaggagacaccactggcaaatctcaaaagacaatgtgcctgcagagactccagcctgtgcagcccacaaccaaaaaagaccttgacactgccgagaagtccctggttgagccatcgttttgcctagataaggtacaagtgtcctcaaagccagagcaggaaggcatcactccttctgacctggccaagatagcaaaagtgatgaagaactttcttaaggtagatgagggttccatggcttccttcagtgtgggtgacagccagcacctggaccggctcagcttccagagcagtaagatgaccgacctgttcatccgcttcccagagaatctcttgctacaccgggtggagaacacccagggccacatcctctatgctttcttggtggagaacaaggaacgagaaagtcgagtggtgcactttgctgtgctcaaggcggagacagccacctctgtggccaagatgctgagcatcttcacagagttcaactccgattggcccaaggtcaaggtggtctttgtggacccttcattccattaccgggctatcctgcaggagatctttcctgctgcccgcatcctcctttccatctaccacacaacccgactcttggagaagaagttgcatcgtagttcagcaaatccatcctttaaaagtctcatgaaggaagccctgcgggaggccgtgtttgtcacttctgaagccagcctgaaaaatctctgccagatgtcccaggccgtactggatgaggatctcttcaacttcctgcaggcccactggttcacctgtgaactgctgtggtacatgcatgttaggaagggcctgcttgcgtgtaacacctacatggacagcctagacattgtcaccagcaaggtgtcaagcctctttcgagaacagcagtcgctgctggactgcatcctctgctttgtggattacatagacttctttaataccaaaggcttgaagaacttgcccacacctcctcccaaattaaagagagctcggccggcaagcatgccactgaagtccaagaaggcttttggaatctgtggagagagccttaccagcctccctgcagaagagaccaagccagacgcacagcaggtacaggtacagcagcagtcacaagtgccgccctcgcaggttggcatgctggacaccttgcaccagagtggctctgaactagcctacaagctgtgccacaatgagtgggaggtggtacagaactccacccacctggtggacatggctggctcttcagtggacgttcagctgctggaggactctcaccaggttagcaaagatggctgtagctgcagctgttcctttcaacaatggtaccacctgccatgccgacacattttggctctgctgcacaccagccagcagccggttggtgaagccatggtgtgccgccggtggcagaagaagtaccagtacctccttgggcccaatggggagctccaggatcgtggtatggtcccaaacacaggccagcctgagaagcaaggacggaacgacatgattcaggacctaagcagggagttagcaaacctgctcatgcagaccgaggggccagagctggaggaacgctactccaccctgcgcaagattgtggatatctgggctggcccctcccagccatctgagctctttcagcagccaggagactttaaggacgtgggccgcctccctttcctctggggaaagcaagaggaaggggagggattccctcctgctacagctgtgatgcattattgaagcactttagctgaagcattggaccacaaacacttctccttggaagtgtgagagtttaaagtgggcaggacatactagggtttagcattttagccaatgtcttcctaggtggggctaggaatattgttacagtagagaggaagggaactccactgtgtgacagtcctttcaatctgccccttttcagccctacttttggcattccttgggagcctcagttgttgttcaaggccaaagttatctccgtgctgcaaggtcaccctcttcctcccccagcccctgagatcagatcttatttgctctgcaaatatgaatccctgcctcaggttagggtgagacaaaatcggtctggtaaaagggcctgttttcagggacaaagggaatgaggatgatctttggctgttgctgctctttatgaagaatcttatttgtaactttttattcatattaaagttgtttttaataaaattaaacaaggg

SEQ ID NO: 31095 - DNA, 4796 bp, Homo Sapiens
atctttgatcaatgtacttgccagggagagcccaagtccttcaaacctcctccttttcaccttcatccttaactttgtgctagagcgagacccacacaacaacagccgaccctccccgccccacccccacccccaaaccagccctcgatcccagcccccggagaggactcgcatttcgacttgcgggacacttttgtgcgttcctctccagagcgcctctcgtgctcgcccctcttgcgctcgctctttattaccttcacctccttttctcccccttctctccctttctccttctcgttctctcccggagttgttgttgcccccctcgctccttctccccccttttttccccttcccctcccgggggtgtgtggcaacttttcctctcgcttctcctccgtctgtttccccttatatgtgaccatggcagtgccggcggctttgatccctccgacccagctggtcccccctcaacccccaatctccacgtctgcttcctcctctggcaccaccacctccacctcttcggcgacttcgtctccggctccttccatcggacccccggcgtcctctgggccaactctgttccgcccggagcccatcgcttcggcggcggcggcggcggccacagtcacctctaccggcggcggcggcggcggcggcggcagcggaggcggcggcggcagcagcggcaacggaggcggcggtggcggcggcggcggtggcagcaactgcaaccccaacctggcggccgcgagcaacggcagcggcggcggcggcggcggcatcagcgctggcggcggcgtcgcttccagcacccccatcaacgccagcaccggcagcagcagcagcagcagtagcagcagcagcagcagcagcagtagtagcagcagcagcagtagcagcagcagctgcggccccctccccgggaaacccgtgtactcaaccccgtccccagtggaaaacacccctcagaataatgagtgcaaaatggtggatctgaggggggccaaagtggcttccttcacggtggagggctgcgagctgatctgcctgccccaggctttcgacctgttcctgaagcacttggtggggggcttgcatacggtctacaccaagctgaagcggctggagatcacgccggtggtgtgcaatgtggaacaagttcgcatcctgaggggactgggcgccatccagccaggagtgaaccgctgcaaactcatctccaggaaggacttcgagaccctctacaatgactgcaccaacgcaagttctagacctggaaggcctcctaagaggactcaaagtgtcacctccccagagaactctcacatcatgccgcattctgtccctggtctcatgtctcctgggataattccaccaacaggtctgacagcagccgctgcagcagctgctgctgctaccaatgcagctattgctgaagcaatgaaggtgaaaaaaatcaaattagaagccatgagcaactatcatgccagtaataaccaacatggagcagactctgaaaacggggacatgaattcaagtgtcgatgagaccccgctttctacaccaaccgcaagagacagccttgacaaactctctctaactgggcatggacaaccactgcctccaggttttccatctccttttctgtttcctgatggactgtcttccatcgagactcttctgactaacatacaggggctgttgaaagttgccatagataatgccagagctcaagagaaacaggtccaactggaaaaaactgagctgaagatggattttttaagggaaagagaactaagggaaacacttgagaagcagttggctatggaacaaaagaatagagccatagttcaaaagaggctaaagaaggagaagaaggcaaagagaaaattgcaggaagcacttgagtttgagacgaaacggcgtgaacaagcagaacagacgctaaaacaggcagcttcaacagatagtctcagggtcttaaatgactctctgaccccagagatagaggctgaccgcagtggcggcagaacagatgctgaaaggacaatacaagatggaagactgtatttgaaaactactgtcatgtactgaatctttcctgttgaagaaatccatgttatagaaaagaactttgcagtcagacattcgtcatgggaaagttcagaaaaaaataaagtccttttaagggaacttcctgaattttgtgtattaatgttctttaaaagtttaagtattctacaaaaaaaaaaaaagttttctccattgattttcacctgtggttcataccagagacctgagaatgtttgtaaatgtacaagtatcaaagttcttacagttaattactgcaacttgctgctggacaattgtatacagagttaaaggcaggtctgaataagacctagctttgtttttttctaatggaatgaaccattttcctcttctgaaaattctgtatctgagcacatcaagagactcttgtagcagtggttacccagacttacagaattatgtcctccagaaaccagcaagaacacttggaatgaacgaatgaacttgtagggggcatagaggattcttgaaaaaaaaaaatgcaagagtgattttctgttacattcaatttcaaactctctaattgtgggttttctcctgaagaattttttttcacatactttccaaaagaccaacaaatggatgttgacaacaacccaatgaaataacattttgcatatctgaaaagaagcattgaatataagccaaaagctttcactgaaggtttttttttcttaaaaaaaaaaaaaaatatataaatgtaacatgttttcattccaaactggtagtggtatatagaattaaagataataatgttgcttcttattcaaactgttggtcatatgtacagtatataaacataaaacacacaaggaaggtattatgtatgcagtagtatactagagtttaggaaaatgaaaattttagaaaatatgttttgtcaccctgttggtcagaaagatgtctttctggttttaacgcatgcaggcatgtaaatatttgtctggagtcacagtattaatgaatgagatcttaagcatctggtgacatcagaactctgtgtcagccacttttatttgtatattgaaccctagctagtgccccaagctgcactattgggaatggattgtggctgaacagcaaatcaaaacaccagaaatatttttatatgttaacgtcatattatgttaatgttgctgaaaacaaaacctaacaaaccttgatgtaccagtccaataccatgtagcgctgagtgataaagttaaaatgtgctgtgcttcccacccttgtcagagggaagggtggctatgtgttattttcactgtctttttgaaagttacagtatgtgttttcactttcgtgcagataactggaagtaaagcggcaaacagtgcttattacatgctaaagttaccttctctttgttttttgcatatctggaattacacctttaaagactgatatgaatcagtacggtcactatacattttatgatttttctgtcatcttaaaattgtatgatcgtaacattatttattaccacaaaacagcaaaatcttcaatgtctaagaaaactagcttaaaatgtttaaatatagttctgattgggtattaattacttgattaagaaaaaattaacattatagatactctggcattacgcttctataccttttaggtcttccttgcaatactggaacataattcttttgtgtagctcactattagccagctaagttcatctttttaataccataaaaaggttatatgtacagttcctattttagcttgcttacaaagggagcattatttttatttaaagtattgctagtaaatgatttgtagaaacttggttttctaagcatagttcttccataaccaccttttgttgtttgagcacaagggattcttttcctagttctatgtgtttgtttccctatatgcagtctttaaaggattacaacacttaaaattgaatggacttgtgtcaagctttttgcatcatacattttttgaaagatttttaaaaaagcctacaacttacatatgtagtagaatcagccattgctctgctcctggcatagagtcacctgtttgttatgtggattaaatagttttaaaatacatatttgaagacctttgagaatgctttagtgtttgatttgaaataaaaggaaattttagcaaggattaaagaaaaaagctatcagctgtatgttaagagagactcttactaacatgttgtaaatattacaattcatgaaatgttattgtaagtctgtaacttaattttttccctgttttagttatacaggttggtttggaaatttgtgttttggcataaacaagtaaaatgtgcccattttatggtttccatgcttttgtaatcctaaaaatattaatgtctagttgttctatattataaccacatttgcgctctatgcaagcccttggaacagaacatactcatcttcatgtaggacctatgaaaattgtctatttttatctatatatttaaagttttctaaaaatgataaaaggttattacgaattttgttgtacaaaatctgtacaaaaatctgtttttacatcataatgcaagaattggaaatttttctatggtagcctagttatttgagcctggtttcaatgtgagaaccacgtttactgttattgtatttaattttcttttccttttcaacaatctcctaataaaactgtctgaaatctcaaaaaaa

SEQ ID NO: 31096 - DNA, 5733 bp, Homo Sapiens
aattataacagctggccttctggtgggcaaaccatcccctgatggactggaagcctaccccccaccccaagccctggctgcgacagctctggaaccctgactgcctgggtgcccctcagctctggaaccctgactgcctggatgctcctcagctctggaaccctgactgcttggataccccctcagctctggaaccctgactgcctggaaccgtgatccggaacccaagatcctttcaaggcctcaggggtattgctgctgccctcctccttctcaatttaaccccgcgtccagccgtcgccaccaggggcgtcagagcgcgcgcatgctcctagctcggagccgcgccgatctcgcgccggcacctggcagccaatcgcaggtctccactggacgcgcgcgtgtggaggcgtgcgcgtcggcggcgccgggggcctgaggaggcgtagtcgccgccggctgtgccccgggagcgcctccggggctggtgcgtggccggcagctcgcgaacagcagctgatccggactggatgtgaccttctgcctggaatagctcaagttcttaaaagttgcgttgtaataaacctgaggctgggaagttcaagatcaagatgctggacgatttggttccttagtgaaggctctcttcctggctggtggatgacagccttcttgctgtgttctcacatgacagaaagaggaagcaaggtggcagtttatataaaggaagcattgggacttgtggccccaccattcaggaataaaaaaattagaaaatggaacaatcatgtgaggaagagaaagagcctgaaccacagaagaacatacaagaaaccaaacaagtagatgacgaagatgctgagctcatctttgttggtgtggaacatgtaaatgaagatgctgagctaatctttgttggggtgacttcaaattcaaaaccagtcgtttcaaacattttgaacagagtcaccccgggttcatggtcaaggagaaaaaagtatgatcaccttagaaaagatactgctcgcaaattgcagcctaaaagtcatgagaccgttacatcagaagcagtgaccgtcctgccagcttcccaacttgaatcgagatcaacagatagtcctattattattgagcctttgtctaaacctgattatagaaatagttcaccacaagttgtgcctaataactcttcagaattaccttctcctttgattacattcacagattcattgcatcatccagtaagtacagcactttcagtaggaggtataaatgaaagtcctcgtgtatcaaagcaactttccactttcgaagtaaacagcataaatcccaaaagggctaaactcagggatggaattatagaaggaaattcttcagcttcgttcccttcagatacctttcatacaatgaatactcagcaaagtacaccctcaaataatgttcatacctcattaagccatgttcagaatggagcaccttttccagcagcttttccaaaggacaatatccatttcaagcctataaatacaaatcttgatagggaaaatgaattggcaaaaacagacattttgagtctaacaagtcaaaacaagacctttgatcccaagaaagaaaatcccattgtgttacttagtgacttttactatggacagcataaaggagaagggcagccggaacagaagactcacaccacctttaaatgcctcagctgcgtgaaagttctaaaaaatgttaagtttatgaatcacgtgaagcatcatttggaatttgagaagcagaggaacgacagctgggaaaaccacaccacctgccagcactgccaccggcagtttcccactcccttccagctacagtgtcacatcgaaaatgtccacactgcccaggagccctctactgtctgtaaaatctgtgaattgtcatttgaaacagatcaggtcctcttacaacacatgaaggaccatcataagcctggcgaaatgccctatgtgtgccaggtttgccattatagatcgtcggtctttgctgatgtagaaacacattttagaacgtgccatgaaaacacaaagaatttgctttgtcccttttgtctcaaaattttcaaaacagcaacaccatacatgtgtcattataggggccactggggaaagagtgcacaccagtgttccaagtgccggctacagtttttaactttcaaggagaaaatggagcacaagacccagtgtcatcaaatgtttaagaagcctaagcaactagaaggattacctcctgaaacaaaagttactattcaagtgtcactggaacctcttcagccaggatcagtggatgtagcatccataactgtgagcacatctgactctgaaccatcactccccaggtctaaaagcaaaatttcaaaaaagtcccattaattctagtttcagtaaatctaaagcaagtatttcaaaccaaattaaaaaacctcataaaacaaaaaatacaaaccatacattattcagtagcaccaaaaatagtgaaactagtggattatatatgactttttaaacaagattcaggatatatattatttgatctgaattttgaggtattattttaaaacatctggttttcatgttaactgtatctggcttaacacataaaaggtgtttgtgtgtgtgtgtgtgagagagaaaggtattaatttatttttttaattttaattttttttttttttactttagagacagggtctcactgttacccaggctggagtgcagtggcgtgatcctagctcactgcaaccttgaacttccaggctcaagcattcctccgcctcagcctttggagagtagctaggactacaggcgcagccaccacacccagctagttttttattttaattttttgtagcgatggaatcttgttatgtcgcccagggtggtctcgaactcctgaccttaggggagcctcctgcctcagcctccccaagtgctgggttgtgtgagtcactgcccctggcacctatttattgttttggtatttcatgttactcctaagcttgaaagctcttttttctatatacagaattcatagaatttttgaaatacttagttttctttacagctttttccatgcattcagcatttcatggttaactctagtcagactggaatggctttgttatgccctggcccacttgctgccgaattcccagaagtgcctctgctgtgctggcataaaataacctgaaaagattctgaaaagccaggatgtggaattgaaagagaagctgctgcgtgagcagagaccaagaaggcggaggttagttgagggagagcagtggttctttgttctagttgaaggataggcacacattcattctagtcttggggccaggtcaaaaggaacactgcttcagagtatctttacctacctgaaaacatccaaggaagccaaaccattcaaagtaaaatggttttgtttggtgaagggcccctgcagacatcaaacagccgtcatgtatcattggtttgaggtgaaatagcaataaaattaatagaatggtgcctggtactagctgacttcctgttctgtgatctaaaggtgaatttgattcattccctctcctctcccttctggctagccgttagtggagaatgaactggccatattctcagccacagctgtaaagcaagtttcccaaggggaagaagccctaatatctataatttgaactgtactggacccatagttttaactgaaaagggccaaacaagtggtgtctgtccagttcctggactgggctaaatttagttttcccactgttaagctggaatgaggactgtcccaacaacagtaggtacagtggacaaaaatagcccagggtgactgactgaatttaaacccataatggctttatatttttctgtgcatatatatcttaccctaattgaacatgtgaagcttgcaactttatgtcttgctttggacatgaatgtattacagcttgcagctattctgttaaatgtatagtttcccagttttttgacactaatgctgtttgggtcttacctgacacacaccagtgtgcaagaaatgtctctctaattcaataagttttaagacttagagttaatgtccttcatctgatctatcctatctaatctgtactatgggtgaatctttttcccttgctctccccaggggctgtttcacagtattctggagtaccttttgagtattggttcctgaacatcagcagtcttggctgcctctgtggactcccggagttgtctccctgcttgtgttctggtgccatcctttgttcctccacccctgaccaaggtgcccagcagcctgtcttcaccagtcaaggaatccgccatcttggctgtagacataggtctggagaaatctctccctttttccttgatttctttttaaaggtaccttatctctccccactcctttcttccctcctcaatctagttaaatttcctaagctttcacaaaaatccgggaagagataattaagagcttagcatccctcttagagtagaaggcagtacagataacaaagaagttgtgagtatattatctacattttagaaaattttctgactctagatccatagattctgttgtatttatttgccggacactcatttgattgatttgcaccttgaacactatactaggtcttttcagttacgttgcttgggttaagacactttgctaaaattacagcctgaatcctttctttagttgaagaaagggtatgtgtgtgcaagtgggtgtgtgtgtgccagtttttcttgtctcaggtagatactcccactgtgtataaatagatctacagacttttcatacttacctcccgtattctgtttctgtggtaaaaatatgaagtgttttagttgtatgttgagtgattggttggtattatcaacactgttgtttgcagtttcattaaagcatgctcttaaggagtacatatggtcattaattgccaactgtagattccagtgatctggcccctgcctacctccttcctctctttttcattctctgtcatgcttctccactgttttccccaatgacgcactattttgacacactggccttgctattccttaagcaaatcacattcttcccaatccaaagactttgcacatgctgttgtctttcttagaatgcccttcccctaggcctgcatggcttgctacctcacttaattgtttgacacttcctttggttcattgagcttcaaggctcttaaaatgccactgacaatgagatctccctttaaaaaaaaaaaaaaacttctacttttcctcttaaaggcactttactctctccccactcttttcttcctcttcaaagtatttaaatttcctaggttttcatgaaaaagctggaaagcgatcagcatcaagggctttgcttctgtcttagaattgagctagcttgagtcaatttctgtgcctgcaaccaaatgaaaattaatatagtgagttctttcaggagctttctctgtttttctattgatacctctatatatttttaaggcaatgtcactttgttttgtttacaaatatattgaatatgtcaagattactattttgttattgccctttgtgaatttccttgtctattttgctcgcttgttctttcaggtgaaatttattattttattaatgttgccaaaaattataagtaaaatatcaattatagtaataaaatgttttgtgaaaaaaa

SEQ ID NO: 31097 - DNA, 2387 bp, Homo Sapiens
ggagcttactccacgggaacagcctctagataatctgagttgttgaaaatacgaagcctgttactcgtgaacagtggctgacaacagtgttgttgtgagcctggctgtctgcttggacccagaggtttcgtctgccagggtttttggttgtatttaggatttcagggaaaagtgtccaagctttcagtgttggagcaggtatggacgacaaaggcgacccgagcaatgaggaggcacctaaggccatcaaacccaccagcaaagagttcaggaaaacatggggttttcgaaggaccactatcgccaagcgagagggcgcaggggacgcggaggctgacccactggagccgccacccccacagcagcagctgggcctgtccctgcggcgcagtgggaggcagcccaagcgcactgagcgcgtggagcagttcctgaccattgcgcggcgccgcggcaggaggagcatgcctgtctccctggaggattctggtgagcccacgtcctgccccgccacagacgccgagacagcctccgagggcagcgtggaaagcgcttctgagaccagaagcggcccccagtctgcttccacagctgtgaaggaacgaccagcctcttctgaaaaggtgaaaggaggggatgaccacgatgacacctccgatagtgacagcgatggcctgaccttgaaagagcttcagaatcgccttcgcaggaagcgggaacaggagcccactgagaggcccctgaaagggatccagagtcgcctgcggaagaagcgccgggaggagggtcccgccgagactgtgggctccgaggccagtgacactgtggagggcgtcctgcccagtaagcaggagcccgagaacgatcagggggttgtgtcccaggctgggaaagatgacagagagagtaagttggagggaaaggcggctcaggacatcaaagatgaggagcctggagacttgggccgaccgaagcctgaatgtgagggttacgaccccaacgccctgtattgcatttgccgccagcctcacaacaacaggtttatgatttgctgtgaccgctgtgaagaatggtttcatggcgattgtgtgggcatttctgaggctcgagggaggcttttggaaaggaatggggaagactatatctgcccaaactgcaccattctgcaagtgcaggatgagactcattcagaaacggcagatcagcaggaagctaaatggagacctggagatgctgatggcaccgattgtacaagtataggaacaatagagcagaagtctagcgaagaccaagggataaagggtagaattgagaaagctgcaaatccaagtggcaagaagaaactcaagatcttccagcctgtgatagaggcgcctggtgcctcaaaatgtattggccccgggtgctgtcacgtggcgcagcccgactcggtgtactgcagtaatgactgtatcctcaaacacgccgcagcgacaatgaagtttctaagctcaggtaaagaacagaagccaaagcctaaagaaaagatgaagatgaagccagagaagcccagtcttccgaaatgcggtgctcaggcaggtattaaaatctcttctgtgcacaagagaccagctccagaaaaaaaagagaccacagtgaagaaggcagtggtggtccctgcgcggagtgaagcactcgggaaggaagcagcttgtgagagcagcacgccgtcgtgggcgagcgatcacaattacaatgcagtaaagccagaaaagactgctgctccctcgccgtcactgttgtataaatgctctggtaagtattcgtattctcttcatcccagtctgattgcatagccacactgcccggcacgccacatccacccctgtctgcacatgagttgttctgacaacagcgctgtatacgcttcagtttttccacattgtccacggccagcacatgaaagcatcacttcttttttatgttgtgggaatctttgcaagttagtgttgcatctgattttcaggtgtacatttatttttgactgggcagataggggatttttttttttccatgtccgattcacacgctacacacccacatgaacacattcgaacttcgaaggccacacactcctgcttcataggccccacggtaagtgagttcacacctagaacactgtcctgaccgcaggacgcgtgccttggacttggtattctacatgtgactggctttcttgccctcgtctcttgaatgtttagactcttaagatcatatcctgccccaaatttcaaattaatgaaatgaagatatttcaaacagatctttgaaacctcagattctgtggtgcaattttaatgttttcttgtttctcagttttctgctataaaactattttcaattcagtc

SEQ ID NO: 31098 - DNA, 1441 bp, Homo Sapiens
agttggtgtcatgcaagaatctattcacactgactaaagatattggaagagtgaagatcagagaattttaagtctgaaatttggcatcactgccctgaacaatataaccttagttggcataaactactcatacagacaaaggcattatccatcacaataagtaactttttgtctttatttcaaccggacaatcgtgattagaaaagctcctgtgacaaaattcaagaaaacctgacataaatgaacaacaatacaacatgtattcaaccatctatgatctcttccatggctttaccaatcatttacatcctcctttgtattgttggtgtttttggaaacactctctctcaatggatatttttaacaaaaataggtaaaaaaacatcaacgcacatctacctgtcacaccttgtgactgcaaacttacttgtgtgcagtgccatgcctttcatgagtatctatttcctgaaaggtttccaatgggaatatcaatctgctcaatgcagagtggtcaattttctgggaactctatccatgcatgcaagtatgtttgtcagtctcttaattttaagttggattgccataagccgctatgctaccttaatgcaaaaggattcctcgcaagagactacttcatgctatgagaaaatattttatggccatttactgaaaaaatttcgccagcccaactttgctagaaaactatgcatttacatatggggagttgtactgggcataatcattccagttaccgtatactactcagtcatagaggctacagaaggagaagagagcctatgctacaatcggcagatggaactaggagccatgatctctcagattgcaggtctcattggaaccacatttattggattttcctttttagtagtactaacatcatactactcttttgtaagccatctgagaaaaataagaacctgtacgtccattatggagaaagatttgacttacagttctgtgaaaagacatcttttggtcatccagattctactaatagtttgcttccttccttatagtatttttaaacccattttttatgttctacaccaaagagataactgtcagcaattgaattatttaatagaaacaaaaaacattctcacctgtcttgcttcggccagaagtagcacagaccccattatatttcttttattagacaaaacattcaagaagacactatataatctctttacaaagtctaattcagcacatatgcaatcatatggttgacttttgaatggaaaaccccacaatattaagaaaagcattcatgtgactttattagggacactaaactacatcattaacatgtcacagcttggttgacaataatcaccaagaaaatctctttggtttttaaaaataaataaacatatattcataaaactcgaaaaaaaaaaaaaaaaaaaaaaaaaaaaaa

SEQ ID NO: 31099 - DNA, 2698 bp, Homo Sapiens
aacgttaaatttagatgttttacctctaaatgaggtgaaattgcaggttccctctggctggcggtggggaggagacgcagggcagctttggccagcagtgagcggacagacttagcgggagtagactctgcttcctccagccacaccttggggacggaggcccaggacagtccccagtgtctgggagcatctggcttcctctccctgcacacaccagccgggtctgaacggcatcagttctaagtgccaggccagagagaggcagcgagggacacggagtagaagaggctgtcctgtctgccaccaaaggtgaccaccatgtcggtgaggttgcggttcctgtcccctggggacacaggggccgtgggggtcgtgggccggagcgcctccttcgcaggcttcagcagtgcacagagccggaggatcgcaaagtccatcaacaggaactccgtgagatcgcgaatgcctgcaaaatcctccaagatgtacggcacgctgcggaaggggtcggtctgtgcagacccgaagccccagcaggtgaagaagatcttcgaagcattgaaaagaggcctcaaggagtatctgtgtgtgcagcaggctgagctggaccacctgtctggacgccacaaagacaccaggaggaattccaggctggctttctattatgacctggacaagcaaacgcgctgtgtggaaaggcacattcggaagatggagtttcacatcagcaaggtggatgagctgtacgaggactactgcatccagtgccgcctgcgcgacggcgcctccagcatgcagcgggccttcgcccggtgccccccgagccgcgcagcccgagagagcctgcaggagctgggccgcagcctgcacgagtgcgccgaggacatgtggctcatcgagggggccctggaggttcacctgggcgagttccacatcaggatgaaaggcttggtgggctacgcacgcctctgtcccggagaccactatgaggtgctcatgcgtctgggccgccagcgttggaagctcaagggtcggatcgagtcagatgacagccagacctgggacgaagaggagaaggccttcatccccacgctgcatgagaacctggacatcaaggtgacggagttgcggggcctgggctcgctggctgtgggtgcagtgacgtgtgacatcgccgacttcttcacgacgcggccgcaggtcatcgtggtggacatcacggagttgggtaccatcaagctgcagctggaggtgcagtggaacccgtttgatactgagagcttcctggtgtcacccagccccacgggcaagttttctatgggcagcaggaagggctccttgtacaactggacacccccgagcacccccagcttccgggagagatactacctgtctgtcctacagcagccaacacagcaggccttgctgctgggtggcccaagggccacctccatcctcagctacctgtctgacagcgacctccggggtcccagcctaagaagccagagtcaggagctgcctgagatggactccttcagctctgaggacccccgagacacggagaccagcacgtcggcgtccacctcagatgtgggcttcctgcccttgaccttcggtccccacgcctccattgaagaggaggctcgggaggaccccctgcccccaggtctcctgccagagatggcccacctctctggaggcccgtttgcagagcagcctggctggaggaacttaggaggggagagccccagcctgccacagggctccctgttccacagcggcacagcctcgagtagccagaacggccacgaggaaggggcaaccggggacagagaggacgggcctggcgtggccctcgaggggcctctgcaggaggtcctggagttgctgaggcccacggactccacccagccccagctccgggagctggagtaccaggtcctcggcttccgggaccggctgaagccctgcagagcacggcaggagctcacctcggccgagagcctgatagagtgcatcctggagagcttcgccttcctcaatgccgacttcgccccggatgagctgtccctgtttgggggctcccagggtctccggtgagtgcacctccttccagcagtgacccagtggccaccactcccaccgggtgacccgagctccacgtttcctgccagcctccccgtctgtttctcccactgtccttggctcagctcttgtcactctatcgtgcacccttccccatgccatccccgcacatcccccacttgcctcagagccggtcctcagagaccacgaagtgggtgagatcaccccagcctgcccctgagccttctgctccaaggaaccagcttttagtattattttttaaaccttaaaaataatcaccaagtatatagtagaagttctttgaggccaggcacagtggctcacgcctgtaatcccaacactttgggaggccgaggcaggcggattacctgaggtcaggagttcaagaccagcctggccaacatgatgaaaccccgtctctactaaaaatacaaaaattagctgggcatggtggcaagagcctgtaatctcagctactcaggaggctgaggcaggagaatcactcggacccgggaggcggaggttgcagtgagccaagatggcaccactacatttcagcctgggcgaaagtaagactctgtctcaaaaaaag

SEQ ID NO: 31100 - DNA, 6033 bp, Homo Sapiens
atggaaacggggaaggacggcgcccgcagaggtacacaaagcccggagcggaaaaggcgaagcccagtgccgcgggcgcccagcacgaagctgaggccggcggcggcggcccgggccatggatccggtggcggccgaggccccgggcgaggccttcctggcgcggcgacggcctgagggcggtggcgggtccgcgcggccgcgttacagcctgttggcggagatcgggcgcggcagctacggcgtggtttatgaggcagtggccgggcgcagcggggcccgggtggcggtcaagaagatccgctgcgacgcccccgagaacgtggagctggcgctggctgaattctgggccctcaccagcctcaagcggcgccaccagaacgtcgtgcagtttgaggagtgcgtcctgcagcgcaatgggttagcccagcgcatgagtcacggcaacaagagctcgcagctttacctgcgcctggtggagacctcgctgaaaggagaaaggatcctgggttatgctgaggagccctgctatctctggtttgtcatggagttctgtgaaggtggagacctgaatcagtatgtcctgtcccggaggccagacccagccaccaacaaaagtttcatgctacagctgacgagcgccattgccttcctgcacaaaaaccatattgtgcacagggacctgaagccagacaacatcctcatcacagagcggtctggcacccccatcctcaaagtggccgactttggactaagcaaggtctgtgctgggctggcaccccgaggcaaagagggcaatcaagacaacaaaaatgtgaatgtgaataagtactggctgtcctcagcctgcggttcggacttctacatggctcctgaagtctgggagggacactacacagccaaggcggacatctttgccctgggcattatcatctgggcaatgatagaaagaatcacttttattgactctgagaccaagaaggagctcctggggacctacattaaacaggggactgagatcgtccctgttggtgaggcgctgctagaaaacccaaagatggagttgcacatcccccaaaaacgcaggacttccatgtctgaggggatcaagcagctcttgaaagatatgttagctgctaacccacaggaccggcctgatgcctttgaacttgaaaccagaatggaccaggtcacatgtgctgcttaaaattcagggctaagcattttgggtgattttaaactaggtcgattcctcgggacccacagtctcaccacgtctcctccagaggacggcagagggtacaggtggtggcctggccggttggcgatctcccgacagctggatccggcaatgtgaagcttttgtttgggtttccccgcttctttttagttttgctttatttttttccttttcttttcttttttttttttcctctttcctttttttaaatttaaaccattgagacttcagaagagcaggacacaatgctgtggacaggcaccaatttctttaaagaaattcaatgtgggcaaggcatatgtgtaaatttcacttttactttttataaggggttagggagctatttttggttttgtccttcactttccctctgtcttccttctttatacttttctcagttctacttatgacacctcacttccctagagaaggcctgcctccccatagggaatctgggggtttcttctggaacggggcgtgaggacacaaggaggcctctgggccacgcctccctaccagatgcaggaactcctggactccttggtgggctggccctggctagcccttgggcctcggagatgatcagaggtgaagaaccgcctggaagaggaaggccagggtttggccaggagaactaagaaggtctcaactccaggctttgttgtgtttaagctattgagagccccaggccacaccaggacttgcagtggtgggaatccattcctcttctgccctgtgttgcagggaactaggaggtaagggtggagggcgaccatctcgctcttgctggcggtggagcagccatccctgcctttctgttgggaaaaactgttgtgccaaactcttgtgtggaacacagctgggtcttcagcaggcatctgtcactgccgtgaggtcagcgcttctcacctaactgcctcctggattgtcatcttcccagatgtgtcccatagtgtccaggtgtcacagagacggcctgaggccctaagatctggttgtgactttgccatgataacagggtgtcctgaactggctgccgttgtcgtgttctcacagtgaagggcgtgccctgtgtgccggggtccatggtgtcatatgcagtgacacacactgtcaagcgccatttccctcacccctggagacttactgttaggtgcctgccctcagtatagacgtatccaatgggaaaacagcggacctgcccagagcagggaggtgtcgtggaactgggtagaccccctgcagcgttaggggcccatttgtgggctcgccaccttcaggcttccccagccatgacacttcagccccgccacccatgcctgtctgctgcagccatccttgcactctccagcgacactctcgcacctccctaggggaagcttccctccccctgggctgctgctctgagcccatctgttctccccctgcaagaaggggcaatgctcttgtgttgtccctctgtctggacgcgcctggccactccgaaggcttttcaccccattatggccaaatagtatagggccactggggagggggaagggaatcattttgtgttcatttttgttttctgtttcacctaaaccagcataggattgataggggagacggttggcgggcatttccgtttctatgtgaccaaggcagcaggggcttttacctgctaagcggcaatcctttggccctgagaatttgggagagaacagtgcatcaggccaggctcagcaatatgtttgctcacattctttcagccttctgtcacccccctcaacaccaaactttcttccttgtgagcagaaggttggctgctgttagcaggatcccacagtgataaccaggcccttcccttcctaagccaaaacccattgtgactgcctgtctctcctgtctctgacttctcaggcagcctcctgagtgcactgagttgtatccgagagggtgggaacagcagcatcccctaattgcagtacacggttccttttccgcccgccaccctgcctttccttgggggcagctgtctctctgtacatgagcaaatgggcaaaaacagtccccaaacccagcacccccctctccctggctgcagcccacactgtaacatccctagtgaggctccagcctaatgagccccttattttcttttttttccctccccaggtctagtagctctaactaaaaagttcttggagccatcgtgctccccctttgttatttttcttgctatcagagtagcaagaaacagcacccctgtaggtgacaggtgggcagcctggtaggggtcgccagcctccatgccccctcatcttccagttcttgcttagtggcacgacctctttccatagcataaatgcaggccagcgttttagccccaagtgcctgcccttgcttcttacccctcccctgctttctcaaacacttgcccacctcaggcactcagcgggctccgccgtggtgagagaactggccgtggctcagccccgggtagcacctgtagtttcagtgccactctccactgtccccttgtggaccagcttccactcactgtcacgtcccccctcctgcgtcttcactgggtctcaggctgccagcagctctctggtgcatcgtctcaacaccaccaagtttgtaggacctgcccaagttctagtagtattcaaaacttcaaacggcagtcatttgttctcctcggctctgtggcaaggatagccctttggagggggactcttgacctcggctgttagggatctgaacttggttttcccgtcagaagaatcagcaggacagatcgtagtgccttattccattgtcctcccctggccaggcctcctggctcagctggaagtgcatggcttctttctccctatctgtgtcctctgtcacttgctctttcactctctctctcattcccagagagccacgggggagggatcaccctcacccccaacaccctcttcctgagggctgtagccaggtccgcatctccccaccaccaccagggcactcactcgcagctatagcccaggacagaaaaactgtgctttggacaggtgcacactctctgcctcttacctctagccaggaggatgcctcagtctgttcattcgagactggccccgtctgaaccttctctgggcactggggactaaggttgcaggccttagcctcgtctcgtcccagaggcattggatcaggagaatgggaatttttttcctcccacctggacatagtttgcccctgtggctgcctttctgagggagtatactaaatgtttacttaagaaacaccctgtttacagccagaggagaaacacccaacactgagtggagatttgactctggacagggcctggcctccttagtggcactgccggggggccccagagcgaatgagggcagagatgcccggggcaggggcaaacgccctccgctccctctgctcccaaccctgtggtgctaggaccactccccgccttccctacggcctcctcgccctgcacattccccacctccacattcccctcctccaagatctcagctccttaacatatcagttgtctcctagcctagaaaaccagtgtttggagcaataagatgattatttttgcttgaatctttttctaagagaaggaaaagagctggcattgtgggaattttctttttatgctgttagctgtttaccttcttagaagacatcctaataggatggatgtctgggttttagccttggggtatcttttggaaacttagaaaagcaggagtcaggctgccaccccctaaggagggaccctaacgttctgcccttgcctggttccatatggctccttccagccctgcccaccaagtgcagctcccactttccatcctgcccatacgcccctcttcccccgacatctgggggcgctggtggcacttactctaggttggtctcagactatccctccccttggctggttttccctcctaggcctgtctggcagcccccagacagacgtagctcctgggagtctcggccctggcaaccttggaagagccaagctgacattgtttagctcttcaggccactgggttttggaggcagaagtccagagatactggctctgccaagctgtcgtactgggctgtggcacagccttcgagacaacacgggtgtatctctgatcctgccctacctaggcttcaaggggcttctgtctggagaaatgccctcaaagggtaaccagtaggtgtggcattgaattggccagtgttagcatctacagccatcaccgagatgagtccactgccgttgcctgcccgagggccccctaaggttatagacggtatcagcagggaggccgtcccgctggttttctaggagagcccacaggaggaagggagcctcttcaggggcactggaatcttttgtgccaggggcttcttttcatcagagccggggagtacattgcagtgacttcttaaacatttgtgtgggacagacgagcgtgagggaggttttaagccaggcacaaagttagtttccaatactagttaataaatctatttttcttcatttcctttttttgcacagaagctggtaatctaggacctacgtgtgaacaactttatatgaatattttttgtacttggtttacttgggttggtatgatacattatatttaagttccttgaacactgtggatcccctaatgtgtatgaatgactgaggctttgtaaattaagggacgtttgtgtgaataaagttatttgatggggtcaaagaagccatatgtgatttgaaaaaaaaaaaaaaaaaaaaaaa

SEQ ID NO: 31101 - DNA, 6900 bp, Homo Sapiens
agcgcaggtcccgacagaggtcgccgggtggtggcgtcagctgcggcgccctccgcgtggaaattagccggttgcccgggcaaatcagggaggaagggagggagctgaacacggaagtggtggcggcgcccagggaaccggcggaggcgatgaccgtgacggctgggttgggaccggaacgccgaagcggggttgggggtggcagaaaagcatctgctttgtaagacctacacgaggtgcaggagtggttgggcctcccctctccacttaagcaagcgcccagactgatggcgatggtgatggcagcagttactcgcacaaccccagttaagctgcgctccgggagatacatccagaaagtgcccagaagaaacttcctgctggaaaaaatgaaaaagcagtatttataacattagaatctggataatttgttaacatggcagaaaataatgaaaatattagtaaaaatgtagatgtaaggcccaaaactagtcggagcagaagtgccgacagaaaagacggttatgtgtggagtggaaagaagttatcttggtcaaaaaagagtgagagttattcagatgctgagacagtgaatggtatagagaaaaccgaagtgtctttaaggaaccaagaaaggaagcacagctgttcatccattgagttggacttagatcattcctgtgggcatcgatttttaggccgatctcttaaacagaaactgcaagatgccgtggggcagtgttttccaataaagaattgtagtagtcggcactcttcagggcttccgtctaaaaggaaaattcatatcagtgaactcatgttagataagtgtcctttcccacctcgatcagatttagcctttaggtggcattttattaaacgacacactgctcctataaattccaaatcagatgaatgggtaagcacagacttgtctcagactgaattgagggatggtcagctaaaacgaagaaatatggaagaaaatataaactgtttctcacataccaatgttcagccctgtgtcataaccaccgacaatgctttgtgtagagaaggtcctatgactggctctgtgatgaacctggtttcaaataacagtatagaagatagtgatatggattccgatgatgaaattctaacactttgcacaagttccagaaaaagaaacaaacccaaatgggatttggatgatgaaatcctgcagttggaaacacctcctaaataccacacgcagattgattatgtccactgtcttgtaccagacctccttcagatcaataacaacccatgttactggggagtgatggataaatacgcagccgaagcactactggaaggaaaaccagagggtacctttttacttcgagactcagcacaggaagactatttattctctgttagttttagacgctatagtcgttctcttcatgctagaattgaacagtggaatcacaactttagctttgatgcacatgacccctgtgtcttccattctcctgacattactgggctcctagaacattataaggacccaagcgcctgtatgttctttgaaccacttctatccactcccttaattcggactttccctttttccctgcagcatatatgcagaacagttatttgtaactgtacaacttatgatggcatcgatgcccttccaattccttcttctatgaaattatatctgaaggaatatcattataaatcaaaagttagagtactcaggattgatgcaccagaacagcaatgctagtaacaggatgggaacatgggaatgataatatatattttttcttttaatattttatttttctttttatgccactttggatttttctacaaaggcagtggtgtccaaaataaaatctctgccctaaattttactaataaatccatttttctagtgatacacaaattgtttaaggttatacactcgagcttaaatagatatttttaaccaggtgtttggtttttgtttttaccgtgtaggttgtatacttacattttttctttccttaatttatacatgatcctttttccttaatttatacatgatccaggcacatttgaaatttggtaggcattgcaaacacatttgaatattgtgtatttcatactattctttaaaagtaatcttatgtcctttcctacatgtaaaatattttgttaatctatgccattagtagtattatatataaaatatagttccccgtcccccttttcattgagtttgatattcttcagtaaagctgaatgttgtaattcaccattcatactaatgttattgacttttgtaacttactaatagggatgttaaaagtaacaaaaccaagtcaaacttggtgtatttttattttaaatattaactctaaagcaggattactaaatttgattaatctggtcaatgagaatcaaatggaaacatatcattctggaggtgcacttactcttctacaatgtggccggatcatttgtcattcctgaataggtctttctctcaacctgcaagagctaaaccatcttcaaaacataaatcttgttcctttctcattggaagctttgaaaataatgataacactattagtagctagtagttactaaagtgctaaagtaattgtggggtttttctgtattagcttatgaactgttgcttctacttagcccttttatagaaactctgagctgttactttggggaaattccacaatgtattagcagccacaaatttccactggtaaccaaagagtacctaagtagtttttcattattttaagttgaatttgaataaagattccagaaataaacatggagctcagtattcaggaagcttaatactgtttttgatctacaagatccaaataattatccctatcttcagaattaacttagtctgtaatgtggcttcaaaaaaagaaagccttttgacagctacatgacttacaccatacagaacagtactggacaaaaggggtgatattttaaatttactatcccagaaacagggcaacgtttttagaaacatctttagcccaaagtaactagtaaaaataaatggagtggtatcctatcttctttttttaaggaatcaatgaataataaatgtagatagacaattttcttctggtgagctgtctaaccctttgtacacattgacatttttaatatcgtaactgatttcttgatgctagtttagctatattaggaaactgcttctacctagattgaaagaaatttgactcataaacttccaagttagaacaaatatttcttcattattgttgcttttatgtgagtagcatttccctatcttgcagttctgttaacatgaaaatggcatttttccataatagctttaaaataattttttagtaattattacaaaattaaggaaaatctctattaccgttatcttttagcattttttttttcctcagtgatctcaagattgtcttagtctcaatgagatgtagctacaaaaatggcacctcttagcagtgatgaggctcaggatatcggatatcataacaccaatgtcaggataaatatctcttctaaagacgatatttaccttttacaaggttagaaaagtctcatactacctcatctttattgtggcgcttttgtagatcactgagaagcttatcttattaaccaatataccacttcctaaatatccatctttggtgaaagaaaatagtgtggtaagagtacccatgattatagttttttatcagaatttgataagattttctgtttctgtgaaacaattattttaaatatttttcttttaaaaataactttttatcagtacagaaaaacctaagggatgactagcttacaaatattctgttaaggggtagttttataaagaaaaatgatatatagttatgttgtcttttatagtgttaaaattagtatttatatgaaagtcaagatctaagtaccttttcatataattcaaactgattgcttgtgatatgttttctctggcttttttattttttcaacttcaaggtattaacagctgttaacacttaaaaagtactgccacatatgtagccttgaagtagttgatctaataaatgagagcagggaggagattcattgactctgaaatgatttttatttttcctttggtatttgctacagtgaaaagaagtttggaaagtagatacataaagacttgagaagggaattgtttaagggaaaagaaaagagtaataattttttttaaaacattaaggaattggaattcagaaaggttacccccttcctctgtgtctttgtaaggatacatttggaagaacatacagtattcagaaactaacctatataaaatgtaaacaatatattgattgcactatataaatgagtaaattttgagaggaacaatgtgggaatgtataaatttgtctaaaattttataactgttgaacaaagggaagatttgaacagtgtaaattccagagttgagaaagcatttagcatggtggaaatgtggagagcttattggtgagagaggatggagctaagagaaataagatcaaatattaaaattaggaatttaggcattacctcagggaaaagccttgacagtgaaaagaaactacttaatcgctaatagctagtctggaccagacacttaactgcgctttgggaatcatcctgggctaatcaggaaataaacttgacttttctatttttctctgaagctttacaggacatactcccactcccatttttttctaagcctacagcatcttgattcatagtataattcctgaagtatgctgaatggactttttaaggttcctttagcatttttgtatagagttatatgtgatctttctataaccatgccattcacttaaataattcatgaagggaatggtttaatttaaaggaagacctaataggaagaagattaaaggaagcttttagtcagcctgtggctagatttattgatttggtgatcaaacctgtgctatttcctgaatttcagctaatggccaactgtggtcaaagaatggctttcagttaaagttttgacttcttattataaataatataaagaatgtctcagtaattagaaatcccttaataagtagaacaaatgtggcaagtaggactcctatcggtatacaaattccatttctttttataagaaaaacacataaaccattatcatttattcatgagccaaagccattaagaagataaatccagttatcagcttcctgtctctgaagtttggatcattttatagatccacgcaatagagagcttccttcctatgaaacaaaaaccttgagatctctttttttttgagacagagtctcgctgttgtcagcccaggctggagtgcaatggcgcaatctcggttcactgcaacctctgccttccaggttccagcaattctcctacctcagctcccaagtagctgagatgacaggcgtgtgccaccacgcccagctaatttttgtatttttagtagcgatggtgtttcactacattggccaggctggtctcgaactcctgacctcaggtgaccacccgcctcagcctcccaaagtgctgggattacaggcatgagccactgtgcccggccaagatctaactcacgcttacttttcattaaaatatttcttgtcgcttttagctattgtcagaatccaataaacagcttacgcattcattttggtaaagcaaatttcacaggaaaatagacaaaattataagagattcctggagacaacacaaggaaaacaatgtttaaaagcaaaatagcctgtgtaatgttaggtaatgtaatgcccaagtgaataaaagatttttcgtcaagcaaactactgtttctactttgggggaaaaaagtcagttttacatttgtaatttaaggaaagaacagaaagcacaaaggtttttcttttctttattaatggcctactagaaatgagcagtgcaagagtctacctgtactattctaatacagtaagatattggacacaaaatggaggtaactttttaaaatagattggcttggaagttgaaatgtagattaatggatataacccaatagaaagggattttcaaataaaaccaaagtctatttttttatttactttctaattttgaacagatgactcagtcctaaatctttgcctttatttcctataaaatgtaggtgatacttgtaactcgacttcctggagttaattcttcagcaagaggtgaccctgggagcgtactttaaaataattgctgtacagccattgagtactaacatgatgataggttttcaaaatatctttgtagtggatgctgcataattacattcacttctcttagactgtaaaagactttcttgacttgttttaacagtagagatagcagtacaatttgaatttatggtttaggctctgcaattagaggaacaattgcagtttcctcctacccttcatatggtctgtgtaaaactgatgtttgcttaacttattttaaaagttgattacgttttcagaaaataaagataatcacttttgccatggttataatcaaatctaagctttcagacttgagagccatggtgtaaaactcaaggaggtttatttaaattatgctgactttgctagaattggataaattctgtataagccaagtatgagttcacatgtactcgaatatacagttttcacaaagctattactctcatcagtcaggcttgtatgatctattccttaccacaaaagaagtagacaattgccacttttatttctaatccttaagttgaatgtttcttcttggatgtaagttcaaataaattgatctggataaattttcatttctacttaattaaaacttcctatgtaaaatccaaaaaaaaaaaaaaaaaaa

SEQ ID NO: 31102 - DNA, 7002 bp, Homo Sapiens
ttaaataagtagggattgtttaaaaaaaaagctgtaatatgttatctgggggtggatgatcctggtgttagttaaagctctcagtgatgtctgtgctgggacttccgggttcctgttggacttttcctcccaaacttcaccaggaactgacaatggcgaagcccttcccgaatccatcccatcagctcctgggacactgcctcatttcatagaggagccagatgatgcttatattatcaagagcaaccctattgcactcaggtgcaaagcgaggccagccatgcagatattcttcaaatgcaacggcgagtgggtccatcagaacgagcacgtctctgaagagactctggacgagagctcaggtttgaaggtccgcgaagtgttcatcaatgttactaggcaacaggtggaggacttccatgggcccgaggactattggtgccagtgtgtggcgtggagccacctgggtacctccaagagcaggaaggcctctgtgcgcatagcctatttacggaaaaactttgaacaagacccacaaggaagggaagttcccattgaaggcatgattgtactgcactgccgcccaccagagggagtccctgctgccgaggtggaatggctgaaaaatgaagagcccattgactctgaacaagacgagaacattgacaccagggctgaccataacctgatcatcaggcaggcacggctctcggactcaggaaattacacctgcatggcagccaacatcgtggctaagaggagaagcctgtcggccactgttgtggtctacgtgaatggaggctggtcttcctggacagagtggtcagcctgcaatgttcgctgtggtagaggatggcagaaacgttcccggacctgcaccaacccagctcctctcaatggtggggccttttgtgagggaatgtcagtgcagaaaataacctgcacttctctttgtcctgtggatgggagctgggaagtgtggagcgaatggtccgtctgcagtccagagtgtgaacatttgcggatccgggagtgcacagcaccacccccgagaaatgggggcaaattctgtgaaggtctaagccaggaatctgaaaactgcacagatggtctttgcatcctagataaaaaacctcttcatgaaataaaaccccaaagcattgagaatgccagcgacattgctttgtactcgggcttgggtgctgccgtcgtggccgttgcagtcctggtcattggtgtcaccctttacagacggagccagagtgactatggcgtggacgtcattgactcttctgcattgacaggtggcttccagaccttcaacttcaaaacagtccgtcaaggtaactccctgctcctgaattctgccatgcagccagatctgacagtgagccggacatacagcggacccatctgtctgcaggaccctctggacaaggagctcatgacagagtcctcactctttaaccctttgtcggacatcaaagtgaaagtccagagctcgttcatggtttccctgggagtgtctgagagagctgagtaccacggcaagaatcattccaggacttttccccatggaaacaaccacagctttagtacaatgcatcccagaaataaaatgccctacatccaaaatctgtcatcactccccacaaggacagaactgaggacaactggtgtctttggccatttaggggggcgcttagtaatgccaaatacaggggtgagcttactcataccacacggtgccatcccagaggagaattcttgggagatttatatgtccatcaaccaaggtgaacccagcctccagtcagatggctctgaggtgctcctgagtcctgaagtcacctgtggtcctccagacatgatcgtcaccactccctttgcattgaccatcccgcactgtgcagatgtcagttctgagcattggaatatccatttaaagaagaggacacagcagggcaaatgggaggaagtgatgtcagtggaagatgaatctacatcctgttactgccttttggacccctttgcgtgtcatgtgctcctggacagctttgggacctatgcgctcactggagagccaatcacagactgtgccgtgaagcaactgaaggtggcggtttttggctgcatgtcctgtaactccctggattacaacttgagagtttactgtgtggacaataccccttgtgcatttcaggaagtggtttcagatgaaaggcatcaaggtggacagctcctggaagaaccaaaattgctgcatttcaaagggaatacctttagtcttcagatttctgtccttgatattcccccattcctctggagaattaaaccattcactgcctgccaggaagtcccgttctcccgcgtgtggtgcagtaaccggcagcccctgcactgtgccttctccctggagcgttatacgcccactaccacccagctgtcctgcaaaatctgcattcggcagctcaaaggccatgaacagatcctccaagtgcagacatcaatcctagagagtgaacgagaaaccatcactttcttcgcacaagaggacagcactttccctgcacagactggccccaaagccttcaaaattccctactccatcagacagcggatttgtgctacatttgatacccccaatgccaaaggcaaggactggcagatgttagcacagaaaaacagcatcaacaggaatttatcttatttcgctacacaaagtagcccatctgctgtcattttgaacctgtgggaagctcgtcatcagcatgatggtgatcttgactccctggcctgtgcccttgaagagattgggaggacacacacgaaactctcaaacatttcagaatcccagcttgatgaagccgacttcaactacagcaggcaaaatggactctagtccacttcctcccatgagacagagtgatggccagcttggggacatttgctttaaatgggaaagaggccgctttctgcccagtggcgttgggggaattcagccttcatttataatcagtgagattcccctgttgaagaaactaaattttatataggtaaaacatgttaatagggaagagtacaagctctcttacatataagagggctctactatctccttggaatccacatttgggttaactcctcagatttggagtggcaaggataaaagtgagggcagaagtagctgtgggaaaagatgagctatgataatgctgggaaggcagagattgattaagtgcatgctttgaaataggtttttaatgatgtgccccaaagggccagctgattctggtactagattgtcagagttttctaccaactggcatctgtgatgtcagagatcattgtaaaaatggcttttagacgtgaaacagggttgccaacccatttgtatgacttcaacaacgtcaaggagggcatttagaatttagaatctgagcacatcacaccagcaccagctccctgtctcttctagccacttaatggagacacaatggagaggtaagacagaccacaaactagttcttatagtgtactccaccttttacttttttcctgagacaaatctacccttattctttcttcctcttccttaccccttgcagtagggaggtatcaaggagcataattaaacttgtcaatacggaaagttgttttttctaacacaacaaagtgggaccatctctattcccatctaagccactcaaattgctgagtgctattagaacacagcttattacatggatatggggacaggagagattaaagcaggttcaaaaacacatgaactgcagatgccataggcctcaaatcagctgtaattctaggagacacgtgttgatctagttatctaacattgttgttataagaaaatgagtttactgcatttttcaatccagattcttgaaattgtctaacatgtgggtactgtgtcatcacaaaatctctcagtaaggctatatgtgatcctcattttgcctcttgggaaattagcagatagtctttgctctaaatgatatctgagtaaatagacttgaggaatcctctaccacagtgtccctgaaaccacatgcatcattcaggaagccttcaccctgtgactattcagcctccctgaatatgctttctctatagaaccactaacatatggctattgctctatgattttttttttttacattaggaggcagtgatattgtggaagattgaaatccacagataattcatgaccctcatcttatcactttactccatctttttatcctattaaattatttttgacaagatgtcctggtagactaaaggtgaacagatttgctcttgctcatcttctggtggatattttaacttgctattcacaatcaggacaaccaaagtcaaggacccagatgaaccacaaggcagctagtcagctacttagaggttggttacattcgaataaaaagtagtcagggaatgggggaggtggggagttggggagtacttggcagttgggatatgatccatttttttaaacaagttttttgtagatcccttgtaaaataataataataatgttgtgaatctccatgccaagtgaaaaaggcctaaagatgagttgaatttgtgataccatgggtaaggcatggaagaactcttgaatgtgttggccattttctctaactaacatgtggtatgtatggtcccctatattagatagaagtctttgctacatgtaattcaaaagcatctcgcttttctcaggaaccaaaggcttatgatgtaggacaaagaaatcatcttagaactgtcaagcatattttcacaataccatgtcaagatcaggaaaacacccttttgctagtgtgcttaacttatttatttcttctaggaaacaatagataaacagcatgaaaatgtaaatcatctggcatcactgatagaatttctgaaagagaaagagaagtagatggtcaaccagtcactagttggttggcatgaggtggtgtgcagaggaaagctgcattcactattgagtaaaaacttgtagaaagcacattatagagcttatgttggaatccatcttggaggatttttgttttaaactgtctttagcattttccctcttcccttctaatgggcattataattgtttcatctactctgtgaatctacataggtctttttttttagatgtttgatacattttaagtatttttaaatagatgaaaattctaaatgattttccctcaaatctatctagattattttaagatgagacaagattattgtcaatccctgaatgtctggagttacctcccatggatttttttttcctttggcctgggttttataaacaacttgaacatcatatcatataggataacaaaggaggaagttaacttaattcacctcagacttcagcctaagattcaatcaaattcatccttcagcctgtcttgtttcttctttatgtttcttttacttattgctgctaggatcctacataggatttctatagaaatgtatgaaattctgtggtcactgcatgtcaggattgcacagtatgttacaatacaatttcaaagagaacccacatttgtgagatttacagaccaaggtgtggtggaggaggtagaattgcagatcagataaaaagtgagcttacacttgaacttagttattcactgtgacctaaatttagtcctattgtaatatgtgcctgtcacaacacaaatacccctcttgaaagagatttactcatctatccaagcacttaatttggaaattttattgtcctattgcaaaatgaaacaaaattaaaagtggcctcgagtacttggtaagttacttaaaatttttacaaaaatatcccactcaatgccaaatctttcagtcctcaaaggcatttaagtccaatagtcatgctttaaatatggctttaaattatgccaccaaaatggtgcacttcacagattcaccagactgtagcatcataaagttaatttacagtttttacaacattgcttctacattcttactggtttacattaaaatcctttaagccaaaaggaagcttgctctatggatttaaatgcaaacttcatttaccagtgcaggaagtctcataaaactcagatgtactcccacaaaaattttattggcctttttgtaagagatgaaaaagaattgacacagttctctttaaagagaagaacttttttattattatttttatctccaactgcaggtggtgtcttttgccaaggtctctgtatttttctttcagttgtctttgggaggggatgttaagtcaaatcactaaaacagggttctctttggattaaaagttctggatttattgcaactattttccttgagaaacattctcagcatcaggattgataaacaaatgtagatgattaaaataggataattggttttagataatatcttctactgccaaacttctggcaaatttacctgtgaatttcaaaatgttataaaatctcttgatatgcttttgtttttccttttagccattttctcttcaatttcttagtccctctgccctctgtaaatgtgttgagtgatatagctatcagatgtattgaaggcaaagttctcgcagaggtctctgttccagctctgtaaaggtcacaggaatcgtgaaggagctgagaaatcttcctctccggcccactgtctgtggcccattgtcattgtttcctcatgaaacattgcagagtttgaatcctcagtaactctcattgactggattagaggtgatggccacagcaaatgggagagcaaaatgttggcctacagagaatgacacaattttattcgcctttggtgttagttgccatagtgctgtatttgaaaatcgatgctttagccaaaagctgaatgaccaccgtttccgtagtttccactgttttgtctgcatagaattttcctgaactacaagcaaaaatgtattttgtccaatgtcacaaaagtgaaaatgttactaatctt

SEQ ID NO: 31103 - DNA, 1493 bp, Homo Sapiens
gcaggccttgcccggaccagcccctcctccactctcctctcccctgtgagctccacctgccccagttctcctggctttaacccctccttggccaaggccagggttgcctgcgggagccaggcgtccgctctccacacctttcacagatcctacccaggccaccaccccgaacccctccgaccctgcgttccatcccaccatcaacctccacgtgaatctgcacctctgccccagccccagccctcagagcaacctcagcccagcccagcccagctccagctccagctccagcccgggccccatcatggccaaggactttcaagatatccagcagctgagctcggaggaaaatgaccatcctttccatcaaggtgaggggccaggcactcgcaggctgaatcccaggagaggaaatccatttttgaaagggccacctcctgcccagcccctggcacagcgtctctgctccatggtctgcttcagtctgcttgccctgagcttcaacatcctgctgctggtggtcatctgtgtgactgggtcccaaagtgagggtcacagaggtgcacagctgcaagccgagctgcggagcctgaaggaagctttcagcaacttctcctcgagcaccctgacggaggtccaggcaatcagcacccacggaggcagcgtgggtgacaagatcacatccctaggagccaagctggagaaacagcagcaggacctgaaagcagatcacgatgccctgctcttccatctgaagcacttccccgtggacctgcgcttcgtggcctgccagatggagctcctccacagcaacggctcccaaaggacctgctgccccgtcaactgggtggagcaccaaggcagctgctactggttctctcactccgggaaggcctgggctgaggcggagaagtactgccagctggagaacgcacacctggtggtcatcaactcctgggaggagcagaaattcattgtacaacacacgaaccccttcaatacctggataggtctcacggacagtgatggctcttggaaatgggtggatggcacagactataggcacaactacaagaactgggctgtcactcagccagataattggcacgggcacgagctgggtggaagtgaagactgtgttgaagtccagccggatggccgctggaacgatgacttctgcctgcaggtgtaccgctgggtgtgtgagaaaaggcggaatgccaccggcgaggtggcctgaccccagcacacctctggctaacccataccccacacctgcccagctctggcttctctgttgaggattttgaggaaaggaagaaacactgagacaggggtatggggaagagctgagcaaagagagaaaggaggtagtttaagagtccctgaccctggaggactgagatcccacctccttctgtaattcattgtaattattataatcgtcagcctcttcaatggcgtaggaaagaagaaacaaatgcttgaatctc

SEQ ID NO: 31104 - DNA, 3088 bp, Homo Sapiens
ccttatttagtccgcgatggcttccctcgcgccccaccgtcctcttccggaaggcggctccctccctgcgcagcccggagcccctgagatcagcctcgagcaggcgcccgagcgagactatccctaaacgggaacggcggtggccgactcgcgagtgaggaaaagaaggaaagggcagactggtcgcgaagagaagatccaggcctcagaggaggagaaaggccggagccagccgagctgtcacgaccggaggggggactcgcagccttaccaggcacttaagtattcatcgaagagtcaccccagtagcggtgatcacagacatgaaaagatgcgagacgccggagatccttcaccaccaaataaaatgttgcggagatctgatagtcctgaaaacaaatacagtgacagcacaggtcacagtaaggccaaaaatgtgcatactcacagagttagagagagggatggtgggaccagttactctccacaagaaaattcacacaaccacagtgctcttcatagttcaaattcacattcttctaatccaagcaataacccaagcaaaacttcagatgcaccttatgattctgcagatgactggtctgagcatattagctcttctgggaaaaagtactactacaattgtcgaacagaagtttcacaatgggaaaaaccaaaagagtggcttgaaagagaacagagacaaaaagaagcaaacaagatggcagtcaacagcttcccaaaagatagggattacagaagagaggtgatgcaagcaacagccactagtgggtttgccagtggaatggaagacaagcattccagtgatgccagtagtttgctcccacagaatattttgtctcaaacaagcagacacaatgacagagactacagactgccaagagcagagactcacagtagttctacgccagtacagcaccccatcaaaccagtggttcatccaactgctaccccaagcactgttccttctagtccatttacgctacagtctgatcaccagccaaagaaatcatttgatgctaatggagcatctactttatcaaaactgcctacacccacatcttctgtccctgcacagaaaacagaaagaaaagaatctacatcaggagacaaacccgtatcacattcttgcacaactccttccacgtcttctgcctctggactgaaccccacatctgcacctccaacatctgcttcagcggtccctgtttctcctgttccacagtcgccaatacctcccttacttcaggacccaaatcttcttagacaattgcttcctgctttgcaagccacgctgcagcttaataattctaatgtggacatatctaaaataaatgaagttcttacagcagctgtgacacaagcctcactgcagtctataattcataagtttcttactgctggaccatctgctttcaacataacgtctctgatttctcaagctgctcagctctctacacaagcccagccatctaatcagtctccgatgtctttaacatctgatgcgtcatccccaagatcatatgtttctccaagaataagcacacctcaaactaacacagtccctatcaaacctttgatcagtactcctcctgtttcatcacagccaaaggttagtactccagtagttaagcaaggaccagtgtcacagtcagccacacagcagcctgtaactgctgacaagcagcaaggtcatgaacctgtctctcctcgaagtcttcagcgctcaagtagccagagaagtccatcacctggtcccaatcatacttctaatagtagtaatgcatcaaatgcaacagttgtaccacagaattcttctgcccgatccacgtgttcattaacgcctgcactagcagcacacttcagtgaaaatctcataaaacacgttcaaggatggcctgcagatcatgcagagaagcaggcatcaagattacgcgaagaagcgcataacatgggaactattcacatgtccgaaatttgtactgaattaaaaaatttaagatctttagtccgagtatgtgaaattcaagcaactttgcgagagcaaaggatactatttttgagacaacaaattaaggaacttgaaaagctaaaaaatcagaattccttcatggtgtgaagatgtgaataattgcacatggttttgagaacaggaactgtaaatctgttgcccaatcttaacatttttgagctgcatttaagtagactttggaccgttaagctgggcaaaggaaatgacaaggggacggggtctgtgagagtcaattcaggggaaagatacaagattgatttgtaaaacccttgaaatgtagatttcttgtagatgtatccttcacgttgtaaatatgttttgtagagtgaagccatgggaagccatgtgtaacagagcttagacatccaaaactaatcaatgctgaggtggctaaatacctagccttttacatgtaaacctgtctgcaaaattagcttttttaaaaaaaaaaaaaaaaaaattgggggggttaatttatcattcagaaatcttgcattttcaaaaattcagtgcaagcgccaggcgatttgtgtctaaggatacgattttgaaccatatgggcagtgtacaaaatatgaaacaactgtttccacacttgcacctgatcaagagcagtgcttctccatttgttttgcagagaaatgtttttcatttcccgtgtgtttccatttccttctgaaattctgattttatccatttttttaaggctcctctttatctcctttcttaaggcactgttgctatggcacttttctataaccttttcattcctgtgtacagtagcttaaaattgcagtgattgagcataacctacttgtttgtataaattattgaaatccatttgcaccctgtaagaatggacttaaaagtactgctggacaggcatgtgtgctcaaagtacattgattgctcaaatataaggaaatggcccaatgaacgtggttgtgggaggggaaagaggaaacagagctagtcagatgtgaattgtatctgttgtaataaacatgttaaaacaaacaaaaaaaaaaaaaaaaa

SEQ ID NO: 31105 - DNA, 2665 bp, Homo Sapiens
cgccgcctgcgcgcccgcccgcctttcgcggccgctctcccccctccccgacacacactcacaggccgggcattgatggtaatgtatgcgaggaaacagcagagactcagtgatggctgtcacgaccggaggggggactcgcagccttaccaggcacttaagtattcatcgaagagtcaccccagtagcggtgatcacagacatgaaaagatgcgagacgccggagatccttcaccaccaaataaaatgttgcggagatctgatagtcctgaaaacaaatacagtgacagcacaggtcacagtaaggccaaaaatgtgcatactcacagagttagagagagggatggtgggaccagttactctccacaagaaaattcacacaaccacagtgctcttcatagttcaaattcacattcttctaatccaagcaataacccaagcaaaacttcagatgcaccttatgattctgcagatgactggtctgagcatattagctcttctgggaaaaagtactactacaattgtcgaacagaagtttcacaatgggaaaaaccaaaagagtggcttgaaagagaacagagacaaaaagaagcaaacaagatggcagtcaacagcttcccaaaagatagggattacagaagagaggtgatgcaagcaacagccactagtgggtttgccagtggaaaatctacatcaggagacaaacccgtatcacattcttgcacaactccttccacgtcttctgcctctggactgaaccccacatctgcacctccaacatctgcttcagcggtccctgtttctcctgttccacagtcgccaatacctcccttacttcaggacccaaatcttcttagacaattgcttcctgctttgcaagccacgctgcagcttaataattctaatgtggacatatctaaaataaatgaagttcttacagcagctgtgacacaagcctcactgcagtctataattcataagtttcttactgctggaccatctgctttcaacataacgtctctgatttctcaagctgctcagctctctacacaagcccagccatctaatcagtctccgatgtctttaacatctgatgcgtcatccccaagatcatatgtttctccaagaataagcacacctcaaactaacacagtccctatcaaacctttgatcagtactcctcctgtttcatcacagccaaaggttagtactccagtagttaagcaaggaccagtgtcacagtcagccacacagcagcctgtaactgctgacaagcagcaaggtcatgaacctgtctctcctcgaagtcttcagcgctcaagtagccagagaagtccatcacctggtcccaatcatacttctaatagtagtaatgcatcaaatgcaacagttgtaccacagaattcttctgcccgatccacgtgttcattaacgcctgcactagcagcacacttcagtgaaaatctcataaaacacgttcaaggatggcctgcagatcatgcagagaagcaggcatcaagattacgcgaagaagcgcataacatgggaactattcacatgtccgaaatttgtactgaattaaaaaatttaagatctttagtccgagtatgtgaaattcaagcaactttgcgagagcaaaggatactatttttgagacaacaaattaaggaacttgaaaagctaaaaaatcagaattccttcatggtgtgaagatgtgaataattgcacatggttttgagaacaggaactgtaaatctgttgcccaatcttaacatttttgagctgcatttaagtagactttggaccgttaagctgggcaaaggaaatgacaaggggacggggtctgtgagagtcaattcaggggaaagatacaagattgatttgtaaaacccttgaaatgtagatttcttgtagatgtatccttcacgttgtaaatatgttttgtagagtgaagccatgggaagccatgtgtaacagagcttagacatccaaaactaatcaatgctgaggtggctaaatacctagccttttacatgtaaacctgtctgcaaaattagcttttttaaaaaaaaaaaaaaaaaaattgggggggttaatttatcattcagaaatcttgcattttcaaaaattcagtgcaagcgccaggcgatttgtgtctaaggatacgattttgaaccatatgggcagtgtacaaaatatgaaacaactgtttccacacttgcacctgatcaagagcagtgcttctccatttgttttgcagagaaatgtttttcatttcccgtgtgtttccatttccttctgaaattctgattttatccatttttttaaggctcctctttatctcctttcttaaggcactgttgctatggcacttttctataaccttttcattcctgtgtacagtagcttaaaattgcagtgattgagcataacctacttgtttgtataaattattgaaatccatttgcaccctgtaagaatggacttaaaagtactgctggacaggcatgtgtgctcaaagtacattgattgctcaaatataaggaaatggcccaatgaacgtggttgtgggaggggaaagaggaaacagagctagtcagatgtgaattgtatctgttgtaataaacatgttaaaacaaaaaaaaaaaaaaaaaaaaaaaaaaaa

SEQ ID NO: 31106 - DNA, 6224 bp, Homo Sapiens
gctaactcaagggagacgtctggtgaacacccgtgggatctaaagaacaagctctgaaagtgttccagctgaaatttcagatcggacagactcgctgcggctccggaggcagtgattccaagctgctcgcgcacgctgctgccaagctgcaggatggtgcacgtagccaggctgctgctgctgctcctcactttcttcctccgcacggatgctgagacacctccaaggtttacacgaacacccgttgatcagacaggggtctctggcggagttgcctctttcatctgccaagctacgggagacccaagacctaaaattgtctggaacaaaaaaggaaagaaagtcagcaatcagagatttgaggtaatagagtttgacgatgggtctggatcagttctcagaatacaacccttacggactccgagggatgaggccatttatgaatgtgtggcctcaaataatgtgggagaaataagtgtatccaccagactcacagttttgcgggaagatcaaattcccaggggcttccctaccattgacatgggcccacagttgaaggtggttgagcgtactcgcacggccaccatgctttgtgcagccagtggtaatccggatccagaaatcacttggtttaaagatttcttacctgtggacacaagcaacaacaatggtcgtattaagcagttacgatcaggagcccttcagattgagcagagtgaagagtctgaccaaggaaaatatgagtgtgttgccaccaacagcgcgggcactcgctattccgctcctgccaatttatatgtcagagttcgccgtgtcccaccaagattctctatcccacccactaatcatgaaatcatgccaggcggaagcgttaatatcacctgtgtggccgtggggtcaccaatgccttatgtaaagtggatgttgggggcagaagatctgacacctgaagatgatatgccaataggaagaaatgtgctagaactgaatgatgtaagacagtcagcaaattacacctgtgttgctatgtcaacactgggtgtcattgaagcaatagcacagatcactgtcaaagccttacccaaacctccaggaactcctgtagtgaccgagagcacagctacaagcatcacactgacgtgggactctgggaaccctgagcctgtttcttattacataattcagcataaacctaaaaactctgaggaactttacaaagaaattgatggggtggcgaccacacgctacagtgtcgctggactaagtccctactcggattatgaattcagggttgttgctgtcaataacattgggcgggggcctcccagcgaacctgtgctaacacaaacctcagagcaagcaccatccagtgccccgagggatgtccaggcacgaatgttgagttcgaccaccattttggtacagtggaaggaacctgaagagccaaatggacagatccaaggatatagagtttattatacaatggatcccactcaacatgtcaacaactggatgaaacacaatgtagctgacagccaaatcactactattggcaacttagtgccccagaaaacatattctgtcaaagtcctggcttttacctcaattggagatggtcccctttcaagtgacatacaagtcatcactcagacaggagtaccagggcagccactaaacttcaaagcagaacctgagtctgaaacaagtattttgctctcttggacacctccacgttcagataccattgccaactatgaactggtctacaaagatggggagcatggagaggagcaacgaattaccattgagccagggacatcatataggctgcaaggactgaaaccaaacagcttatactatttccgtctggctgcacgctcccctcaaggcctgggtgcttctactgcagaaatatcagctagaaccatgcagtcaaagccgtcagctcctcctcaagacattagttgcaccagcccaagttccactagtattttggtaagttggcaacctccaccagtggaaaaacagaatggcattatcactgaatactccatcaagtacactgcagtggatggggaagatgacaagcctcacgagattttgggaattccttcggacactaccaaataccttttggaacagctggaaaaatggactgaataccggatcactgtgacagcccatacagatgtcggccctggccctgagagcttgtccgtgttgattcgaaccaatgaagatgttcctagtggtcctcctcgcaaagtcgaggtagaggctgtcaactcaacatctgttaaagtctcatggcgctcacccgtgcccaataaacagcatggccagataagaggatatcaggtgcattatgtgaggatggaaaatggtgagcccaagggccagcccatgctgaaagatgtcatgctggctgatgcacagtgggaatttgatgatactactgaacatgacatgatcatttctgggctccagcctgaaacttcctactccctcaccgtcacagcctacacaaccaaaggagatggtgctcgcagcaagcccaaactggtgtccaccactggggcagttccagggaaacctcggcttgtgattaaccacactcagatgaatactgctcttattcagtggcaccctccggtggacacatttggacctcttcagggctaccgtctaaaatttggccgcaaggatatggagccacttactactcttgagttctctgaaaaagaagatcactttacagctacagacatccacaagggagcatcatacgtcttcaggctctcagccagaaacaaagtgggctttggggaggagatggtgaaggagatttccattccagaagaagtaccaactggattccctcaaaaccttcactcagaaggcaccacttcaacctccgtccagttatcttggcaaccacctgtcctggcagagagaaatggcattatcaccaagtatacccttctttatagggatatcaacatcccccttctcccgatggagcagcttattgttccagctgacaccactatgacactcactggcttaaaaccagataccacatacgatgtaaaagtacgtgctcatacgagcaaagggcccgggccatatagtcccagtgtccagttcaggacactgcctgtggatcaagtgtttgcaaaaaattttcatgtcaaagcagtaatgaagacttccgtgttgctgtcttgggagattccagagaattataactccgccatgcctttcaaaattctttatgatgatgggaaaatggtagaagaagtggatggccgagccacacagaagttaattgtcaacctgaagcctgagaaatcatattcatttgtgctgacaaatcgtggaaacagtgctggtgggctgcagcacagggtcacggcaaagactgcaccagatgtattacgtaccaagcctgccttcattgggaagaccaacttggatggcatgattactgtgcaactgcctgaagtacctgcaaatgagaatataaaaggttactacataataattgtgcctttgaagaaatctcgcgggaaatttatcaagccatgggagagtccagatgaaatggaattagatgagctgcttaaggagatatctaggaagcgcagaagcatccgttatgggagagaagttgaattaaagccatatattgccgctcactttgatgtccttcccactgagttcaccctgggggatgacaagcattatggtggatttacaaacaagcaactccaaagtggtcaagaatatgtcttctttgtgttagcagtaatggaacatgcagagtctaagatgtatgcaaccagcccttactccgaccccgtggtgtcaatggatctggatccgcagccaatcacggatgaagaagaaggcttgatctgggttgtaggtcctgtccttgcagtggtctttatcatctgcattgtcattgctattcttctttataaaaggaagagggcagagtccgactctagaaaaagcagcataccgaacaataaggagatcccttcacaccacccaacagaccctgtagaactgaggcgccttaactttcaaacaccgggtatggctagccatcctccaatacccatcttggaacttgcagaccacattgaaagattgaaagcaaatgacaacttgaagttttcccaggaatatgagtcaattgaccctggccagcagttcacttgggaacattcaaacttggaagtaaacaaaccaaagaatagatacgcgaatgtaatcgcatatgatcattcccgggttctcctatcagctatagaagggatcccaggaagtgactatgtgaatgccaactacatagatgggtataggaagcaaaatgcctatattgcaacacagggatctctccccgaaacatttggggacttttggagaatgatatgggaacaacggagtgccacagttgtcatgatgacaaaactagaagaaagatcaagggtgaagtgtgaccagtattggcctagcagaggcacagaaacccacggactcgttcaagtaacgctgcttgatactgtggagctggccacatattgtgttcgaacatttgcactttacaagaatggttcaagtgagaagagagaagtgagacaattccagttcaccgcctggcctgatcatggtgttccagaacaccctacaccttttctagctttcttacgtagagtcaaaacctgtaaccctcccgatgctggtccgatggttgtgcactgcagtgcgggagttggccggactggttgcttcatcgtcatagatgccatgttagaaagaataaagcatgaaaaaactgtagatatttatggccatgtaactttaatgagagcccagaggaactatatggttcaaacagaagaccaatacatctttatccatgatgcactgttagaagcagtgacttgtggaaataccgaagtgccagctagaaacttgtatgcctacattcagaagctgacacaaatagaaacgggagagaatgtcacaggaatggagctcgaatttaagcgtctagccagctcaaaagctcacacctcaaggtttatcagtgccaatcttccatgtaataaattcaaaaatcgccttgttaatattatgccatatgaatccacaagggtatgcctgcagcctatccgtggagtagaaggatctgattacatcaatgccagttttattgatggatacagacaacagaaagcctacatcgctacccaggggcccttggcagagaccactgaagacttctggcggatgctctgggaacacaattccaccatagttgtgatgctcaccaagctgcgtgaaatgggcagagagaaatgtcaccaatactggccagcagaacggtctgcaagataccagtactttgttgtagatcccatggctgagtacaacatgccacagtatatcctaagggaattcaaggtcacagatgccagggacggccagtcccgaacagtaaggcagttccagttcactgactggccagagcaaggagtgccaaagtccggagaaggatttattgacttcatcggccaagtccataaaacaaaagaacagtttggccaagatggacccatttcagtccattgcagcgcgggcgttggaagaactggagtcttcataacgctaagcattgttttggaaagaatgagatatgaaggagttgtagatatcttccagactgtcaaaatgttaagaacacaacgaccagctatggtacagacagaggatcaatatcagttttcctatcgtgccgcactagagtacctgggcagctttgaccactatgcaacgtagaaacccctgacccattctggatttttactacaggcccttcaatatccatggagtctcttctgagccatacagggcacttgagaagtccttcttaacttctagctaacaactacttagtgggactattacacacaaaacaaattaaaaacaaattattccaggtggaccaagaattctttgacatcgccccttcccaccatactgctcataataacattttaggggccaaggggagggaatgtttaaaaagaaagtccttgatttagttttttagtattgtaaagatactgctgacctgtgcttcatttctaactgtgtaaacttttttttaacaaaatgtatcattcgataaagtgaattttaaaaaagtt

SEQ ID NO: 31107 - DNA, 5002 bp, Homo Sapiens
gtgcagcagagggcagctgagaggctgggtggctgggcctgggagacacacagaggccaggccttagcgcggctcagccatgagcaacaggagtagcttttcccggctcacctggttcaggaagcagaggaaagctgtggtcagcaccagcgacaagaagatgcccaacggaatcttggaggagcaagagcagcaaagggtgatgctgctcagcaggtcaccctcagggcccaagaagtattttcccatccccgtggagcacctggaggaggagatccgtatcagatccgccgacgactgcaagcagtttcgggaggagttcaactcattgccatctggacacatacaaggaacttttgaactggcaaataaagaagaaaacagagaaaaaaacagatatcccaacatccttcccaatgaccattctagggtgattctgagccaactggatggaattccctgttcagactacatcaatgcttcctacatagatggttacaaagagaagaataaattcatagcagctcaaggtcccaaacaggaaacggttaacgacttctggagaatggtctgggagcaaaagtctgcgaccatcgtcatgttaacaaacttgaaagaaaggaaagaggaaaagtgccatcagtactggcccgaccaaggctgctggacctatggaaacatccgggtgtgcgtggaggactgcgtggttttggtcgactacaccatccggaagttctgcatacagccacagctccccgacggctgcaaagcccccaggctggtctcacagctgcacttcaccagctggcccgacttcggagtgccttttacccccattgggatgctgaagttcctcaagaaagtaaagacgctcaaccccgtgcacgctgggcccatcgtggtccactgtagcgcgggcgtgggccggacgggcaccttcattgtgatcgatgccatgatggccatgatgcacgcggagcagaaggtggatgtgtttgaatttgtgtctcgaatccgtaatcagcgccctcagatggttcaaacggatatgcagtacacgttcatctaccaagccttactcgagtactacctctacggggacacagagctggacgtgtcctccctggagaagcacctgcagaccatgcacggcaccaccacccacttcgacaagatcgggctggaggaggagttcaggaaattgacaaatgtccggatcatgaaggagaacatgaggacgggcaacttgccggcaaacatgaagaaggccagggtcatccagatcatcccgtatgacttcaaccgagtgatcctttccatgaaaaggggtcaagaatacacagactacatcaacgcatccttcatagacggctaccgacagaaggactatttcatcgccacccaggggccactggcacacacggttgaggacttctggaggatgatctgggaatggaaatcccacactatcgtgatgctgacggaggtgcaggagagagagcaggataaatgctaccagtattggccaaccgagggctcagttactcatggagaaataacgattgagataaagaatgataccctttcagaagccatcagtatacgagactttctggtcactctcaatcagccccaggcccgccaggaggagcaggtccgagtagtgcgccagtttcacttccacggctggcctgagatcgggattcccgccgagggcaaaggcatgattgacctcatcgcagccgtgcagaagcagcagcagcagacaggcaaccaccccatcaccgtgcactgcagtgccggagctgggcgaacaggtacattcatagccctcagcaacattttggagcgagtaaaagccgagggacttttagatgtatttcaagctgtgaagagtttacgacttcagagaccacatatggtgcaaaccctggaacagtatgaattctgctacaaagtggtacaagattttattgatatattttctgattatgctaatttcaaatgaagattcctgccttaaaatattttttaatttaatggtcagtatattttgtaaaaatcatgttaatttatttcatagttgacattaatatcttccctaatttctttgtatatattttgttatgccttaaaggccacctgctatacagttgttaaatcttaaatatgctttttaaaaattggaataatgtattaaggtcaaataatatcccataaaatatatatttctgctaatattagtaaatatcttaatttttcattagattcatatcatttaatttcacatattcaacacctttaaatgttgtaatcttaatatgcgaagtgtgcctctgcaagatactaacacaaagctcatgttaagaaaacagttgaggactcagaagtcagttgaaaatgcactttcctaacagtgaattcacaaccctgaacagcagcatttttggaaggcaaactgttcgtgatggtacaatgtaaatggggacttctgtaaagttctcagtttcggtccatgtggtttatctttacattttaaagatcaaagaagtctttacaacctgaatccaggtctaaaacacactagagtagctggtgactataaataatattttaaaatgctgtgtctacaccatcaagactgtgtctacactatcttggctgaacgagaagagatgtaaatgctgggtggtcccgttgacccacggcgttgggtacaacaaaaccagccatcggagttacaccccaaagcaccatttgctgtccagctgcctgtcgtttggcccagaccaccctcagaaaaaaaccagctgcctctcccattctcccctcccgttctgccacagcggcctgggctggtccagtgctatgcctggaggctcaacacaaaacttcccatccaaacattcagatgaactgagcgtcttacacacgcagtacagaggagcacacattaggatagaaacagtagaataaccacgggcaattaaactttaaattttctgagcagcattttggtatttaaacatttcttgtaaaaagctgagacagtttgtaagaaaagaatccttaaaatctagatttataccattttttaaagtcccacctttcaatgtttaataaaacaaaaagagaaatccttaatctaaaagctaaattatttttgaatggaaatactactgagaccattgacactggataacagtaatgatcccattaccagataagattgactgacggggaaaaaaaaaaaaaaagaatggggtgtgaatgtaccaacactgaatcttacagcagttatctttctatggccattaggtacctagcagatgtgcacaatataaacaaaaagatatctggcctaccttactactaaaagcatttaacacgtgcatttttggtacttttttttttgttttctaaaagctacataaaggccttatttgacattttcactgataactgatcgcaccctcatgttgcagtgttcgtcccctattcattaacagtgtgtgcaaatgcaaccccaggacacattattgttctgatagatgctcacagggaatcaagcttctcgcccactccacggctctgagccccatccaagggcaagacttggtgcccagctggaaggacgaaagcacactttgtgaccgccatcctcaccagctgcatgcctgggctgcacactgctgaacgtgctcctctctccttctctgtacaatgattcagcatctcggcggaagaggaaaatggagctttttgaggctcgccaggtcccttttgttttcaccattaaaattccaaacccaaagcctttgtttgactgaaggagaagagagggaagtaagcttctgttcagcacctgaaccctagaaaaagagccagtttgctacgatgaaggtgacatttctctggtcatttatttgagagttcgaagtcaaagtcgaggggcaccggctttggttcatgtctaggagccctctgtcagaatccttgaagccctttaatggtctaactggcatctcttgtatcaagaagtacctttaaggtagaccttttcagggtgccctcaggaaagggccctgctcatgtttttttcctgtccccttagaccaaccccaggtgtccactgcaggggttctgcctgttcccaaactttttccattccaggaacaaaggagaagccactttccccaggacgcaagactctcccctccactgtccgggacagcgttcgccctttagcggggaggtcattacagcctcatggcctctaccaaggccccagatcacaggatctcctgggccttggagcacctcacgctgggggaatcaatccctgagggactcagaatcttctccgtgcaacctggaaagttcatctcttgtttccttcagtcaaagaaagtccattgtacataacaaaacagcccccaaacagcccagtgccgacaccattgttcctttcacactttcctttgttgcatgcagttgggttcaaatgccaaatagtgattagaagacgaccattctgatctgtgtgtgatctggtcactatgtgactgcctttacggtttctctccatgtgctatatgaatgaagaatgcataccagtgttttaaaaggtatttttatgtgtttttaaacacttttttaaatgagcctgacacctgtgtttcagcatttggagacatccccatgttattcttttaagtgtataattactgatacttttttgtttgtttgtttaactaagttgtgtttaacttatgtgcagtctttataatgtatgtatgttattacagtttcaactatcatattttctttgattacatttataatttgatcttgctctgattataatgccagtgaatgttgctgaactctttgtatatgcaaattgcaagatttaaaccattctgatgcaaggataaacctttactttgactaccagcctgtgtttttgtctttaaatctcttaatttcattcctctgcaaa

SEQ ID NO: 31108 - DNA, 3472 bp, Homo Sapiens
atacacacagactcacagcgagaccgacacacactcccatacactcacacacacaactgcaggcagcgaggctcgggaagtcaggccggcttttcgccccggcgccttctctgctccagccggccgggtctccctgggggcccggagctcggccgggccgcgcagccccgttagaggacgagctcggcggacccccgctcctccatgggcaaacgcgggcggccgcgcaaggaggcgcgctgcgagggcgcggggctggcccccgccgcgcccccggctgtgccccccgccgtggccgcgccccagcccccggccctgcccgaggaccccgctggggccaagcccaggtgccccttctcagacattttcaacaccagcgagaactcgatggagaagcacatcaacacttttctgcagaacgtgcagattctgctcgaggccgccagctacctggagcagatcgagaaagaaaacaaaaagtgtgaacatggctacgcctcttcattcccgtccatgccgagcccccgactgcagcattcaaagcccccacggaggttgagccgggcacagaaacacagcagcgggagcagcaacaccagcactgccaacagatctacacacaatgagctggaaaagaatcgacgagctcatctgcgcctttgtttagaacgcttaaaagttctgattccactaggaccagactgcacccggcacacaacacttggtttgctcaacaaagccaaagcacacatcaagaaacttgaagaagctgaaagaaaaagccagcaccagctcgagaatttggaacgagaacagagatttttaaagtggcgactggaacagctgcagggtcctcaggagatggaacgaatacgaatggacagcattggatcaactatttcttcagatcgttctgattcagagcgagaggagattgaagtggatgttgaaagcacagagttctcccatggagaagtggacaatataagtaccaccagcatcagtgacattgatgaccacagcagcctgccgagtattgggagtgacgagggttactccagtgccagtgtcaaactttcattcacttcatagaacccagcatgacataacagtgcagggcaaaatattcactgggccaattcaatacaaacaatctcttaaattgggttcatgatgcagtctcctctttaaaacaaaacaaaacaaaacaaaactatacttgaacaaaagggtcagaggacctgtatttaagcaaatacttagcaaaaagtggggcagagcctcccaaggagaacaaatattcagaatattcatattggaaaaatcacaatttttaatggcagcagaaaacttgtgtgaaattttcttgatttgagttgattgagaagaggacattggagatgccatcctctttctcttttctagtttgctcatactacattgagtagacacatttaaggatggggttatgaacccttcctgagctttatggtcctaaaagcaaaataaaaactattcgaatgaaaagacaagaaaatcaggtattaatcttggatagctaataatgagctattaaaactcagcctgggacagtttatcatgaagcctgtggatgatcaatcctttattattattttttttttttgaaaaaagctcatttcatgctctgcaaaaggagagactcccatgaagccttttgaaagggatcatcatgcagctcaactttctgttggattccatgctaagcaagctaaccttatcctgcattgttagcactaggcacccagctgccacctctccatcctgctgcccttaggccacatgggagcagtccatgcatgacagcctctatcctacaaggcctatgagtatggattgggggggccaaaaggaaaaagctccatgtgcctctttgtctgcgtgggtcagaagagttgtgcacgcagattagcaggccaaggtctgagccacagcagcatttttatttcagattttgataactgtttatatgtgttgaaaaccaaaatgacatctttttaaagcttatccataaaaaaaaatagatgtcttttatagtggaaaaacacatggggaaaaaaatcatctattttgatgcagcatttgataatgataaaacacctcacacctcactctttatagtgcacaaaatgaatgaggtctgggctaggtagaaaaagggtcaatgctatttttgtttttagaatcattaccttttaccagcttttaaccatctgatatctatagtagacacactatcatagttaacatagtaagttcagcacttgtctcattttaatgtaaagatttgcttccattttcctacaggcagtctctctcttcctcacagtcccactgtgcaggtgctattgttactcttacgaatattttcagtaatgttattttcttctaagtgaaatttctagcctgcactttgatgtcatgtgttccctttgtctttcaaactccaaggttcccttgtggccctctcccttaccctgggaaggcctcttggagaccttacccctggctgtttggactttgtatactttaaataatttaactacccttaattacttaaaaaaaaaaaaaagctttatgattttcataacttattgctgattttaatggattgttaatttcagtcctgtagttttattttatgtttagatagggctgggcaaggaaaaagaaaataaagacaaccatatttagcagtgcagttgagttgtgtgttaatgttagactatccctttgtgagtgacactttaacagcattcactgcttctatatatagtgtaccatcttggtcatacattacgcctcaacatatacttgtgctcttcctttgcctccagaagaagtttttccttgattgtgctatgtttcagtggaagaaattctttgaagtagatgtgagtgaaaaactgcatgcctttagaagcccagtatcagaacttgctacgtttcaggtgctagggacttaatgaaaaacaggacaaaacaattcctttttgtggcccaggtaaattatttctggtttcacttataattactaatggctgagtcaagatgttgtctctgtgtttgcttactcttgatcaagtgtgagacagtttgaagactgtgctaccatacaaagtgaatgaagccagtgactaagcttctgtttgttttgttattctcatggccttcgcttgcattatttgggccttcattcagatgaacttgaggtgccattttgttgcatatgtacaggattatgggctggaaagcatttgttataaacctatagtgcacattttaactgccccctaaattacccttccctgggtttgttttccttggggtggtgtagattgtatgagtaagaagtattaattttttaaaagacaaatcaactttgaagacacaaaagttaattggaagaaataaaaactgtgaacgaagaaaa

SEQ ID NO: 31109 - DNA, 5781 bp, Homo Sapiens
agctccagccgcactgccccgatggctccctacccctgtggctgccacatcctgctgctgctcttctgctgcctggcggctgcccgggccaacctgctgaacctgaactggctttggttcaataatgaggacaccagccacgcagctaccacgatccctgagccccaggggcccctgcctgtgcagcccacagcagataccaccacacacgtgaccccccggaatggttccacagagccagcgacagcccctggcagccctgagccaccctcagagctgctggaagatggccaggacacccccacttctgccgagagcccggacgcgccagaggagaacattgccggtgtcggagccgagatcctgaacgtggccaaaggcatccggagcttcgtccagctgtggaatgacactgtccccactgagagcttggccagggcggaaaccctggtcctggagactcctgtgggcccccttgccctcgctgggccttccagcaccccccaggagaatgggaccactctctggcccagccgtggcattcctagctctccgggcgcccacacaaccgaggctggcaccttgcctgcacccaccccatcgcctccgtccctgggcaggccctgggcaccactcacggggccctcagtgccaccaccatcttcagagcgcatcagcgaggaggtggggctgctgcagctccttggggaccccccgccccagcaggtcacccagacggatgaccccgacgtcgggctggcctacgtctttgggccagatgccaacagtggccaagtggcccggtaccacttccccagcctcttcttccgtgacttctcactgctgttccacatccggccagccacagagggcccaggggtgctgttcgccatcacggactcggcgcaggccatggtcttgctgggcgtgaagctctctggggtgcaggacgggcaccaggacatctccctgctctacacagaacctggtgcaggccagacccacacagccgccagcttccggctccccgccttcgtcggccagtggacacacttagccctcagtgtggcaggtggctttgtggccctctacgtggactgtgaggagttccagagaatgccgcttgctcggtcctcacggggcctggagctggagcctggcgccgggctcttcgtggctcaggcggggggagcggaccctgacaagttccagggggtgatcgctgagctgaaggtgcgcagggacccccaggtgagccccatgcactgcctggacgaggaaggcgatgactcagatggggcattcggagactctggcagcgggctcggggacgcccgggagcttctcagggaggagacgggcgcggccctaaaacccaggctccccgcgccaccccccgtcaccacgccacccttggctggaggcagcagcacggaagattccagaagtgaagaagtcgaggagcagaccacggtggcttcgttaggagctcagacacttcctggctcagattctgtctccacgtgggacgggagtgtccggacccctgggggccgcgtgaaagagggcggcctgaaggggcagaaaggggagccaggtgttccggcagggcctccggggagggacggcacccctggaagggacggcgagccgggcgaccccggtgaagacggaaagccgggcgacaccgggccacaaggcttccctgggactccaggggatgtaggtcccaagggagacaagggagaccctggggttggagagagagggcccccaggaccccaagggcctccagggcccccaggaccctccttcagacacgacaagctgaccttcattgacatggagggatctggctttgggggcgatctggaggccctgcggggtcctcgaggcttccctggacctcccggaccccccggtgtcccaggcctgcccggcgagccaggccgctttggggtgaacagctccgacgtcccaggacccgccggccttcctggtgtgcctgggcgcgagggtccccccgggtttcctggcctcccgggacccccaggccctccgggaagagaggggcccccaggaaggactgggcagaaaggcagcctgggtgaagcaggcgccccaggacataaggggagcaagggagcccccggtcctgctggtgctcgtggggagagcggcctggcaggagcccccggacctgctggaccaccaggcccccctgggccccctgggcccccaggaccaggactccccgctggatttgatgacatggaaggctccggggggcccttctggtcaacagcccgaagcgctgatgggccacagggacctcccggcctgccgggacttaagggggatcctggcgtgcctgggctgccgggggcgaagggagaagttggagcagatggaatccccgggttccccggcctccctggcagagagggcattgctgggccccaggggccaaagggagacagaggcagccggggagaaaagggagatccagggaaggacggagtcgggcagccgggcctccctggcccccccggacccccgggacctgtggtctacgtgtcggagcaggacggatccgtcctgagcgtgccgggacctgagggccggccgggtttcgcaggctttcccggacctgcaggacccaagggcaacctgggctctaagggcgaacgaggctccccgggacccaagggtgagaagggtgaaccgggcagcatcttcagccccgacggcggtgccctgggccctgcccagaaaggagccaagggagagccgggcttccgaggacccccgggtccatacggacggccggggtacaagggagagattggctttcctggacggccgggtcgccccgggatgaacggattgaaaggagagaaaggggagccgggagatgccagccttggatttggcatgaggggaatgcccggccccccaggacctccagggcccccaggccctccagggactcctgtttacgacagcaatgtgtttgctgagtccagccgccccgggcctccaggattgccagggaatcagggccctccaggacccaagggcgccaaaggagaagtgggcccccccggaccaccagggcagtttccgtttgactttcttcagttggaggctgaaatgaagggggagaagggagaccgaggtgatgcaggacagaaaggcgaaaggggggagcccgggggcggcggtttcttcggctccagcctgcccggcccccccggccccccaggcccacgtggctaccctgggattccaggtcccaagggagagagcatccggggccagcccggcccacctggacctcagggaccccccggcatcggctacgaggggcgccagggccctcccggccccccaggccccccagggcccccttcatttcctggccctcacaggcagactatcagcgttcccggccctccgggcccccctgggccccctgggccccctggaaccatgggcgcctcctcaggggtgaggctctgggctacacgccaggccatgctgggccaggtgcacgaggttcccgagggctggctcatcttcgtggccgagcaggaggagctctacgtccgcgtgcagaacgggttccggaaggtccagctggaggcccggacaccactcccacgagggacggacaatgaagtggccgccttgcagccccccgtggtgcagctgcacgacagcaacccctacccgcggcgggagcacccccaccccaccgcgcggccctggcgggcagatgacatcctggccagcccccctcgcctgcccgagccccagccctaccccggagccccgcaccacagctcctacgtgcacctgcggccggcgcgacccacaagcccacccgcccacagccaccgcgacttccagccggtgctccacctggttgcgctcaacagccccctgtcaggcggcatgcggggcatccgcggggccgacttccagtgcttccagcaggcgcgggccgtggggctggcgggcaccttccgcgccttcctgtcctcgcgcctgcaggacctgtacagcatcgtgcgccgtgccgaccgcgcagccgtgcccatcgtcaacctcaaggacgagctgctgtttcccagctgggaggctctgttctcaggctctgagggtccgctgaagcccggggcacgcatcttctcctttgacggcaaggacgtcctgaggcaccccacctggccccagaagagcgtgtggcatggctcggaccccaacgggcgcaggctgaccgagagctactgtgagacgtggcggacggaggctccctcggccacgggccaggcctcctcgctgctggggggcaggctcctggggcagagtgccgcgagctgccatcacgcctacatcgtgctctgcattgagaacagcttcatgactgcctccaagtagccaccgcctggatgcggatggccggagaggaccggcggctcggaggaagcccccaccgtgggcagggagcggccggccagcccctggccccaggacctggctgccatactttcctgtatagttcacgtttcatgtaatcctcaagaaataaaaggaagccaaagagtgtatttttttaaaagtttaaaacagaagcctgatgctgacattcacctgccccaactctcccctgacctgtgagcccagctgggtcaggcagggtgcagtatcatgccctgtgcaacctcttggcctgatcagaccacggctcgatttctccaggatttcctgctttgggaagccgtgctcgccccagcaggtgctgacttcatctcccacctagcagcaccgttctgtgcacaaaacccagacctgttagcagacaggccccgtgaggcaatgggagctgaggccacactcagcacaaggccatctgggctcctccagggtgtgtgctcgccctgcggtagatgggagggaggctcaggtccctggggctagggggagccccttctgctcagctctgggccattctccacagcaaccccaggctgaagcaggttcccaagctcagaggcgcactgtgacccccagctccggcctgtcctccaacaccaagcacagcagcctggggctggcctcccaaatgagccatgagatgatacatccaaagcagacagctccaccctggccgagtccaagctgggagattcaagggacccatgagttggggtctggcagcctcccatccagggcccccatctcatgcccctggctgggacgtggctcagccagcacttgtccagctgagcgccaggatggaacacggccacatcaaagaggctgaggctggcacaggacatgcggtagccagcacacagggcagtgagggagggctgtcatctgtgcactgcccatggacaggctggctccagatgcagggcagtcattggctgtctcctaggaaacccatatccttaccctccttgggactgaaggggaaccccggggtgcccacaggccgccctgcgggtgaacaaagcagccacgaggtgcaacaaggtcctctgtcagtcacagccacccctgagatccggcaacatcaacccgagtcattcgttctgtggagggacaagtggactcagggcagcgccaggctgaccacagcacagccaacacgcacctgcctcaggactgcgacgaaaccggtggggctggttctgtaattgtgtgtgatgtgaagccaattcagacaggcaaataaaagtgaccttttacactgaaaaaaaaaaaaaaaaa

SEQ ID NO: 31110 - DNA, 1594 bp, Homo Sapiens
ggctaacctgttgtaagcccgcagctttgggcctggtctctgctgctcccaggcggcccctttgggtactgcctgagcaagaagtgctggagaggaggaccagtcatcaataggaggatgagattgggagagacactcggtgcaggaggctgagtgagcaggggagcactaagacccaggggtagtggaggactgcagcaacgagctggaggaggagaagtaagcggtggggggtgggagccatctggtactttgacagcattcaaaacagcatcggccataacaacagaaatggccagtcagtcccaaggtatccagcagcttctgcaagctgagaagcgggcagctgagaaggtggcagatgccagaaagaggaaggcccggcgactgaagcaggcaaaggaggaggcacagatggaggtggagcaataccgcagagagcgagagcacgaattccagagcaagcagcaggcggccatgggctcccaggggaacctgtctgctgaggtggagcaggctacaaggcgccaggtgcagggcatgcagagctcccagcagagaaaccgagagcgtgtcctggcccagcttcttggcatggtctgcgacgtcaggccccaggtccaccccaactaccggatttctgcctagggccaccgtagggcctgactccttctgccagttccctccctcaaagaaatcctccaatcaaaatcacctcccaccataatccctgtcttctttccatcccctagaaatcctgggaggcaggatccaataattttcctgtgacacttataaatatcctgctcacatctgaatctccttgttgttctttaaccctcactgggactttgtaaacttccaagtcattctcacctaaaccctctgtgaaatttgtaatatggggaagtaggaatgtggaaaacatcctgacttcagtgtctggccgatgtgggtccctctcttgaccctgtcacttgctggctgtgaaaccaggacaagctacttaacttggtagcctcgatgtcctcctctgtgaaactgggatgataataatgcctaccttgtgagggttgcttcaatgattaggaatcattctgtaaagtctagcacagttccttgcatgttgtagcagtgattcagtaagtagcaaccctgtgatactattaccaccacctgctcactggtcaaaacctacacagctgtttcctcacgtccatcactggctctctaattccacttgttcattctgtgaccctagttattttctgaaaaattggttcttctcttttcccagagaccttctgatctccaaaaagaggagatgactacatttagcccctctcttataattccaggtagataactgcattttgtagcctctctttgtttttcttttgctgatctttgtctttattagattttcctcctttcctatttccccaaagacttatcagatgctcattgctttctaagatctaaaatgatactgtgttccctcatatgcatgcccttcctttctatatccttgacaccttactttcccattgtaacaataaaaaaagtatcaataaaataattattggcaaataaa

SEQ ID NO: 31111 - DNA, 2544 bp, Homo Sapiens
cgggcaaggaggtctggatgctgagggcggtccctgaggggcgggcggggcccgaccggcgctctgtgtggccgaggccatgaagccgcagccgcccggctaggccccgggcggctctagcccagggcggcccgcggggcgctgggcctggctcccggctccggtttccgggccggcgggtggccgctcaccatgcccggcaagcaccagcatttccaggaacctgaggtcggctgctgcgggaaatacttcctgtttggcttcaacattgtcttctgggtgctgggagccctgttcctggctatcggcctctgggcctggggtgagaagggcgttctctcgaacatctcagcgctgacagatctgggaggccttgaccccgtgtggctgtttgtggtagttggaggcgtcatgtcggtgctgggctttgctggctgcattggggccctccgggagaacaccttcctgctcaagtttttctccgtgttcctcggtctcatcttcttcctggagctggcaacagggatcctggcctttgtcttcaaggactggattcgagaccagctcaacctcttcatcaacaacaacgtcaaggcctaccgggacgacattgacctccagaacctcattgactttgctcaggaatactggtcttgctgcggagcccgaggccccaatgactggaacctcaatatctacttcaactgcactgacttgaaccccagccgggagcgctgcggggtgcccttctcctgctgcgtcagggaccctgcggaggatgtcctcaacacccagtgtggctacgacgtccggctcaaactggagctggagcagcagggcttcatccacaccaaaggctgcgtgggccagtttgagaagtggctgcaggacaacctgattgtggtggcgggagtcttcatgggcatcgccctcctccagatctttggcatctgcctggcccagaacctcgtgagtgacatcaaggcagtgaaagccaactggagcaaatggaatgatgactttgaaaaccactggcttacgcccaccatttccgaggtcctgtccacggcggggcctcagcagaactctctgactggggcccctggcccggccccacccagccgacatgttttctttggcctgggtggtttataccctgagccaacctttaaaaattggtagatttcacataaaagtccagatccacagcttctcttgaagaatgaccacctggctacgccggctcttcggtggcaacactacctgggacactgcctccccagtcaccaagggccccagctggcccgttctactcacctaagtgccgcctgacccttgtacactaggagctggcctcccacctctgcagggttatttcctgcacctcgaggccgctgcgggccaatctggagtgaaacacggggacctgaaggatggagaggctggaccccgctttgaagagggtgcagcctgggaagggcggccttgctggggactgcggtgggagtagagtgcccaggagagggtctgaggggtgggatgggggtcaggacaattttgcaaaagaagtagctggaagccatgggactggcgggagcctgtttgggggatctggatggttgactcctaggagtcaagttcagcatcttcaccgtggctgcagagctgcctgatgggcactagagggcatgccagccccacactccctgggtctggcttcctcccgcaacctcactctagtagagcctgtgcctgcctactagcgctctggggttcggagagtttgggaatttctcagagccaactggctcaggcttgggaaggctggctgctgccctcagctccgcctcatcagctatgtgaaggggtgtgtgtggagtgatcctgccgccccctccctgggctcgtccagagatctcaaactccgatgcccctggggccacgtatgttgtgtaaatggatgaaacaggcccttgagttgggagcctgcttcactttgactttcccactgttgctggagacaaagacatcgtgatgagagaaagttcgcacaatctagtcggtaacagccactttccttgagaccaagagagtgcggtggggatgggggggagagcacgggtccccgtctgacagtggccgctgccatattcaggtgtagctaattgctctggtgtgggaatgcaggcctaatgacagaaatctggagaagccagaaatacagatttgtatgtgagatgtcctgattttttaagttgttggcagaaattaattcagaaatcaaatctgcaggccaaacaaggtgcaggacccagctttggccccatgcccctgtaggtccctctgggacagtcaccgctggggtcctggctgctctgtcattgagggatgctgggcactgctgccgggtggccagggtatggggcatgtgcccagcaatgtggctccttggccccgctggccagtgtcctgggcccctgacaggcgctggctgtgagtggtttgtacatgctacaataaatgcagctggcagcattgaaaaaa

SEQ ID NO: 31112 - DNA, 5957 bp, Homo Sapiens
agtgcagacgcggaactggcgcccgctcggagcggcgccgcgctggggagcgactgacgccccgctgccgggggacgtcgggctgggcctggccagtcccccagagcttgggagacttcgattttcagaattcctcctgggaatgctgactccttgcttggtgccctgatgcttctctgagataaactgatgaattggaaccatggtgcaaaagaagaagttctgtcctcggttacttgactatctagtgatcgtaggggccaggcacccgagcagtgatagcgtggcccagactcctgaattgctacggcgataccccttggaggatcacactgagtttcccctgcccccagatgtagtgttcttctgccagcccgagggctgcctgagcgtgcggcagcggcgcatgagccttcgggatgatacctcttttgtcttcaccctcactgacaaggacactggagtcacgcgatatggcatctgtgttaacttctaccgctccttccaaaagcgaatctctaaggagaagggggaaggtggggcagggtcccgtgggaaggaaggaacccatgccacctgtgcctcagaagagggtggcactgagagctcagagagtggctcatccctgcagcctctcagtgctgactctacccctgatgtgaaccagtctcctcggggcaaacgccgggccaaggcggggagccgctcccgcaacagtactctcacgtccctgtgcgtgctcagccactaccctttcttctccaccttccgagagtgtttgtatactctcaagcgcctggtggactgctgtagtgagcgccttctgggcaagaaactgggcatccctcgaggcgtacaaagggacaccatgtggcggatctttactggatcgctgctggtagaggagaagtcaagtgcccttctgcatgaccttcgagagattgaggcctggatctatcgattgctgcgctccccagtacccgtctctgggcagaagcgagtagacatcgaggtcctaccccaagagctccagccagctctgacctttgctcttccagacccatctcgattcaccctagtggatttcccactgcaccttcccttggaacttctaggtgtggacgcctgtctccaggtgctaacctgcattctgttagagcacaaggtggtgctacagtcccgagactacaatgcactctccatgtctgtgatggcattcgtggcaatgatctacccactggaatatatgtttcctgtcatcccgctgctacccacctgcatggcatcagcagagcagctgctgttggctccaaccccgtacatcattggggttcctgccagcttcttcctctacaaactggacttcaaaatgcctgatgatgtatggctagtggatctggacagcaatagggtgattgcccccaccaatgcagaagtgctgcctatcctgccagaaccagaatcactagagctgaaaaagcatttaaagcaggccttggccagcatgagtctcaacacccagcccatcctcaatctggagaaatttcatgagggccaggagatcccccttctcttgggaaggccttctaatgacctgcagtccacaccgtccactgaattcaacccactcatctatggcaacgatgtggattctgtggatgttgcaaccagggttgccatggtacggttcttcaattccgccaacgtgctgcagggatttcagatgcacacgcgtaccctgcgcctctttcctcggcctgtggtagcttttcaagctggctcctttctagcctcacgtccccggcagactccttttgccgagaaattggccaggactcaggctgtggagtactttggggaatggatccttaaccccaccaactatgcctttcagcgaattcacaacaatatgtttgatccagccctgattggtgacaagccaaagtggtatgctcatcagctgcagcctatccactatcgcgtctatgacagcaattcccagctggctgaggccctgagtgtaccaccagagcgggactctgactccgaacctactgatgatagtggcagtgatagtatggattatgacgattcaagctcttcttactcctcccttggtgactttgtcagtgaaatgatgaaatgtgacattaatggtgatactcccaatgtggaccctctgacacatgcagcactgggggatgccagcgaggtggagattgacgagctgcagaatcagaaggaagcagaagagcctggcccagacagtgagaactctcaggaaaaccccccactgcgctccagctctagcaccacagccagcagcagccccagcactgtcatccacggagccaactctgaacctgctgactctacggagatggatgataaggcagcagtaggcgtctccaagcccctcccttccgtgcctcccagcattggcaaatcgaacgtggacagacgtcaggcagaaattggagaggggtcagtgcgccggcgaatctatgacaatccatacttcgagccccaatatggctttccccctgaggaagatgaggatgagcagggggaaagttacactccccgattcagccaacatgtcagtggcaatcgggctcaaaagctgctgcggcccaacagcttgagactggcaagtgactcagatgcagagtcagactctcgggcaagctctcccaactccaccgtctccaacaccagcaccgagggcttcgggggcatcatgtcttttgccagcagcctctatcggaaccacagtaccagcttcagtctttcaaacctcacactgcccaccaaaggtgcccgagagaaggccacgcccttccccagtctgaaagtatttgggctaaatactctaatggagattgttactgaagccggccccgggagtggtgaaggaaacaggagggcgttagtggatcagaagtcatctgtcattaaacacagcccaacagtgaaaagagaacctccatcaccccagggtcgatccagcaattctagtgagaaccagcagttcctgaaggaggtggtgcacagcgtgctggacggccagggagttggctggctcaacatgaaaaaggtgcgccggctgctggagagcgagcagctgcgagtctttgtcctgagcaagctgaaccgcatggtgcagtcagaggacgatgcccggcaggacatcatcccggatgtggagatcagtcggaaggtgtacaagggaatgttagacctcctcaagtgtacagtcctcagcttggagcagtcctatgcccacgcgggtctgggtggcatggccagcatctttgggcttttggagattgcccagacccactactatagtaaagaaccagacaagcggaagagaagtccaacagaaagtgtaaataccccagttggcaaggatcctggcctagctgggcggggggacccaaaggctatggcacaactgagagttccacaactgggacctcgggcaccaagtgccacaggaaagggtcctaaggaactggacaccagaagtttaaaggaagaaaattttatagcatctattgaattgtggaacaagcaccaggaagtgaaaaagcaaaaagctttggaaaaacagaggcctgaagtaatcaaacctgtctttgaccttggtgagacagaggagaaaaagtcccagatcagcgcagacagtggtgtgagcctgacgtctagttcccagaggactgatcaagactctgtcatcggcgtgagtccagctgttatgatccgcagctcaagtcaggattctgaagttagcaccgtggtgagtaatagctctggagagacccttggagctgacagtgacttgagcagcaatgcaggtgatggaccaggtggcgagggcagtgttcacctggcaagctctcggggcactttgtctgatagtgaaattgagaccaactctgccacaagcaccatctttggtaaagcccacagcttgaagccaagcataaaggagaagctggcaggcagccccattcgtacttctgaagatgtgagccagcgagtctatctctatgagggactcctaggaagggacaaaggatccatgtgggaccagttagaggatgcagctatggagaccttttctataagcaaagagcgttctactttatgggaccaaatgcaattctgggaagatgccttcttagatgctgtgatgttggagagagaagggatgggtatggaccagggtccccaggaaatgatcgacaggtacctgtcccttggagaacatgaccggaagcgcctggaagatgatgaagatcgcttgctggccacacttctgcacaacctcatctcctacatgctgctgatgaaggtaaataagaatgacatccgcaagaaggtgaggcgcctaatgggaaagtcgcacattgggcttgtgtacagccagcaaatcaatgaggtgcttgatcagctggcgaacctgaatggacgcgatctctctatctggtccagtggcagccggcacatgaagaagcagacatttgtggtacatgcagggacagatacaaacggagatatctttttcatggaggtgtgcgatgactgtgtggtgttgcgtagtaacatcggaacagtgtatgagcgctggtggtacgagaagctcatcaacatgacctactgtcccaagacgaaggtgttgtgcttgtggcgtagaaatggctctgagacccagctcaacaagttctatactaaaaagtgtcgggagctgtactactgtgtgaaggacagcatggagcgcgctgccgcccgacagcaaagcatcaaacccggacctgaattgggtggcgagttccctgtgcaggacctgaagactggtgagggtggcctgctgcaggtgaccctggaagggatcaacctcaaattcatgcacaatcagttcctgaaattaaagaagtggtgagccacaagtacaagacaccaatggcccacgaaatctgctactccgtattatgtctcttctcgtacgtggctgcagttcatagcagtgaggaagatctcagaaccccgccccggcctgtctctagctgatggagaggggctacgcagctgccccagcccagggcacgcccctggccccttgctgttcccaagtgcacgatgctgctgtgactgaggagtggatgatgctcgtgtgtcctctgcaagccccctgctgtggcttggttggttaccggttatgtgtccctctgagtgtgtcttgagcgtgtccaccttctccctctccactcccagaagaccaaactgccttcccctcagggctcaagaatgtgtacagtctgtggggccggtgtgaacccactattttgtgtccttgagacatttgtgttgtggttccttgtccttgtccctggcgttataactgtccactgcaagagtctggctctcccttctctgtgacccggcatgactgggcgcctggagcagtttcactctgtgaggagtgagggaaccctggggctcaccctctcagaggaagggcacagagaggaagggaagaattggggggcagccggagtgagtggcagcctccctgcttccttctgcattcccaagccggcagctactgcccagggcccgcagtgttggctgctgcctgccacagcctctgtgactgcagtggagcggcgaattccctgtggcctgccacgccttcggcatcagaggatggagtggtcgaggctagtggagtcccagggaccgctggctgctctgcctgagcatcagggagggggcaggaaagaccaagctgggtttgcacatctgtctgcaggctgtctctccaggcacggggtgtcaggagggagagacagcctgggtatgggcaagaaatgactgtaaatatttcagccccacattatttatagaaaatgtacagttgtgtgaatgtgaaataaatgtcctcaactccc

SEQ ID NO: 31113 - DNA, 5000 bp, Homo Sapiens
aacatttttgaaagatcactcagctttaacacaccttggctgggtctggataaaaaaaaagtgagcactgcaaatttctagaagaaaacatcaggagaagaaagagagagggggatttattcaaagttgtttccaattccttcaaaacctcaaaccaggtggctatggtatggatgtaaccaagaaaaacaaacgagatggaactgaagtcactgagagaattgtcactgaaacagtaaccacaagacttacatccttaccaccaaaaggcgggaccagcaatggctatgctaaaacagcctctcttggtggagggagccggctggagaaacaaagcctgactcatggcagcagcggctacataaactcaactggaagcacacgaggccatgcctccacctctagttacaggagggctcactcacctgcctccactctgcccaactccccaggctcaacctttgaaaggaaaactcacgttacccgccatgcgtatgaagggagctccagtggcaactcttctccggagtaccctcggaaggaatttgcatcttcttcaaccagaggacggagtcaaacacgagagagtgaaattcgagttcgactgcagagtgcgtccccatccacccgatggacagaattggatgatgttaagcgtttgctcaaggggagtcgatcggcaagtgtgagccccacccggaattcctccaacacactccccatccccaagaaaggcactgtggagaccaaaattgtgacagcgagctcccagtcggtgtcaggcacctacgatgcaacgatcctggatgccaaccttccctcccatgtgtggtcctccaccctgcccgcggggtcctccatggggacctatcacaacaacatgacaacccagagctcatccctcctcaacaccaatgcctactctgcgggatcagtcttcggagttccaaacaacatggcgtcctgctcacccactttgcaccctggactcagcacatcctcctcagtgtttggcatgcagaacaatctggcccccagcttgaccaccctgtcccatggcaccaccaccacttccacagcatatggggtgaagaaaaacatgccccagagtcctgcggctgtgaacactggcgtttccacctccgccgcctgcaccacaagtgtgcagagcgatgaccttttgcacaaggactgcaagttcctgatcctagagaaagacaacacacctgctaagaaggagatggagctgctcatcatgaccaaggacagcgggaaggtctttacagcctcccctgccagcatcgctgcaacttctttttcagaagacaccctaaaaaaagaaaagcaagctgcctacaatgctgactcaggcctaaaagccgaagctaatggagacctgaagactgtgtccacaaagggcaagaccaccactgcagatatccacagctacagcagcagtggtggtggtggcagtggaggaggtggcggtgttggtggcgctggcggcggcccttggggaccagcgccagcctggtgcccctgcggctcctgctgcagctggtggaagtggctgctgggcctgctgctcacctggctgctactcctggggctgctcttcggcctcattgctctggcggaggaggtgaggaagctgaaggcgcgtgtggatgagctggagaggatcaggaggagcatactgccctatggggacagcatggatagaatagaaaaggaccgcctccagggcatggcacccgcggcgggagcagacctggacaaaattgggctgcacagtgacagccaggaggagctctggatgttcgtgaggaagaagctaatgatggaacaggaaaatggaaatctccgaggaagccctggccctaaaggtgacatgggaagtccaggccctaaaggagatcgagggttccctgggactccaggtatccctgggcccttgggccacccaggtccacaaggaccaaagggtcaaaaaggcagcgtgggagatcctggcatggaaggccccatgggccagagagggcgagaaggccccatgggacctcgtggtgaggcagggcctcctggatctggagagaaaggggaaagaggggctgctggtgaaccaggtcctcatggcccacctggtgtcccaggttctgtgggtcccaaaggttccagcggctctcctggcccacagggccctccaggtcctgtaggtctccaagggctccgaggtgaagtaggacttcctggtgtcaaaggtgacaaaggaccaatgggaccaccaggacccaaaggtgaccagggtgagaaaggacctcgaggcctcacaggcgagcctggcatgagaggtttgcctggtgctgttggtgagcccggggctaaaggagcaatgggtcctgctggcccagacggacaccaaggcccaagaggtgaacaaggtcttactgggatgcctggaatccgtggcccaccaggaccttctggagacccaggaaagccaggtctcacaggaccccagggacctcagggacttcccggtacccctggccgaccaggaataaaaggtgaaccaggagctccaggcaagatcgtgacttcggaggggtcatcgatgctcactgtcccaggccccccaggacctcctggagccatgggacccccaggacctccaggtgccccaggccctgccggcccagctggtctcccaggacatcaagaagttcttaatttacaaggtcccccaggcccacccggcccacgtgggccaccagggccttccattccaggcccaccaggaccccgaggcccaccaggggagggtttgccaggcccaccaggcccaccaggatcgttcctgtccaactcagaaaccttcctcttcggccccccaggcccacctggccccccaggtcccaagggagaccaaggtcccccaggccccagaggacaccaaggcgagcaaggcctcccaggtttctcaacctcagggtccagttctttcggactcaaccttcagggaccaccaggcccacctggcccccagggaccaaaaggtgacaaaggtgatccgggtgttccaggggctcttggcattcctagtggtccttctgaagggggatcatcaagtaccatgtacgtgtcaggcccgccagggccccctgggccccctgggcctccgggctctatcagcagctctggccaggagattcagcagtacatctctgagtacatgcagagtgacagtattagatcttacctatccggagttcagggtcccccaggcccacctggtcccccaggacctgtcaccaccatcacaggcgagactttcgactactcagagctggcaagccacgttgtgagctacttacggacttcggggtacggtgtcagcttgttctcgtcctccatctcttctgaagacatcctggctgtgctgcagcgggatgacgtgcgtcagtacctacgtcagtacttgatgggccctcggggtccgccagggccaccaggagccagtggagatgggtccctcctgtctttggactatgcagagctgagtagtcgcattctcagctacatgtcgagttctgggatcagcattgggcttcctggtcccccggggccccctggcttgccgggaacctcctatgaggagctcctctccttgctgcgagggtctgaattcagaggcatcgttggacccccaggtcccccgggtccaccagggatcccaggcaatgtgtggtccagcatcagcgtggaggacctctcgtcttacttacatactgccggcttgtcattcatcccaggccctccaggacctcctggtcccccagggcctcgagggcccccgggtgtctcaggagccctggcaacctatgcagctgaaaacagcgacagcttccggagcgagctgatcagctacctcacaagtcctgatgtgcgcagcttcattgttggccccccaggccctcctgggccgcagggaccccctggggacagccgcctcctgtccacggatgcctcccacagtcggggtagcagctcctcctcacacagctcatctgtcaggcggggcagctcctacagctcttccatgagcacaggaggaggtggtgcaggctccctgggtgcaggcggtgcctttggtgaagctgcaggagacaggggtccctatggcactgacatcggcccaggcggaggctatggggcagcagcagaaggcggcatgtatgctggcaatggcggactattgggagctgactttgctggagatctggattacaatgagctggctgtgagggtgtcagagagcatgcagcgtcagggcctactgcaagggatggcctacactgtccagggcccaccaggccagcctgggccacaggggccacccggcatcagcaaggtcttctctgcctacagcaacgtgactgcggacctcatggacttcttccaaacttatggagccattcaaggaccccctgggcaaaaaggagagatgggcactccaggacccaaaggtgacaggggccctgctgggccaccaggtcatcctgggccacctggccctcgaggacacaagggagaaaaaggagacaaaggtgaccaagtctatgctgggcggagaaggagaagaagtattgctgtcaagccgtgagctagccatggcaggacagctcctggaccaggcccatactagagttcatggatatgttatactgaaccaggccagagcaaacagaaaaagaaggttgagggcaatggacaaggaaggaataaagggagaagagggaaaacagaaaacctgatgctggggacacagcatcagctcaagacgtcaccctccattctgcactcagaaaatggcacttgggggactgggcgcagttggtctttaaccacttttcaatgtctaaaaacatttgtttgtggtctataagatgaaacatcatttcaatcgtaaaatttcccattaaagaagtttttttttctaa

SEQ ID NO: 31114 - DNA, 2164 bp, Homo Sapiens
atttctgcagagacagaaagaaacgcagctcttgacttcttttttgtaaacattactgtaagagttgtgataactttttattctactatgtatatgtatggaatagtattaataaatgaactagggaaggatgtaataaattagacatctcttcattttagagagaagatggaaacaacattgcttttcttttctcaaataaatatgtgtgaatcaaaagaaaaaacttttttcaagttaatacatggttcaggaaaagaagaaacaagcaaagaagccaaaatcagagctaaggaaaaaagaaatagactaagtcttcttgtgcagaaacctgagtttcatgaagacacccgctccagtagatctgggcacttggccaaagaaacaagagtctcccctgaagaggcagtgaaatggggtgaatcatttgacaaactgctttcccatagagatggactagaggcttttaccagatttcttaaaactgaattcagtgaagaaaatattgaattttggatagcctgtgaagatttcaagaaaagcaagggacctcaacaaattcaccttaaagcaaaagcaatatatgagaaatttatacagactgatgccccaaaagaggttaaccttgattttcacacaaaagaagtcattacaaacagcatcactcaacctaccctccacagttttgatgctgcacaaagcagagtgtatcagctcatggaacaagacagttatacacgttttctgaaatctgacatctatttagacttgatggaaggaagacctcagagaccaacaaatcttaggagacgatcacgctcatttacctgcaatgaattccaagatgtacaatcagacgttgccatttggttataaagaaaattgattttgctcatttttatgacaaacttatacatctgcttctaacatatcgcatgtttatgttaagatttggtcccatcctttaaactgaaatatgtcatgtgaaattattttaaaaatgtaaaaacaaaactttctgctaacaaaatacatacagtatctgccagtatattctgtaaaaccttctatttgatgtcattccatttataatcagaaaaaaaacttatttcttaatcaaaaggcagtacaaaaaaagtaataatgttttataagattgtagagttaagtaaaagttaagcttttgcaaagttgtcaaaagttcaaacaaaagtctagttgggattttttaccaaagcagcataatatgtgttatataaacataataatactcagatatccaaatgttcagatagcatttttcataatgaatgttctcttttttttggtaatagtgtagaagtgatctggttcttacaatgggagatgaagaacatttattattgggttactactaaccctgtcccaagaatagtaatatcacctctagttataagccagcaacaggaacttttgtgaagacacattcatctctacggaacttcagattaaatataatctagattaatgactgagaataagatccacatttgaactcattcctaagtgaacatggacgtacccagttatacaaagtacttctgttggtcacagaaacatgaccagattttgcatatctccaggtagggaactaagtagactaccttatcaccggctaagaaaacttgctactaaactattaggccatcaatggcttgaataaaaaccagagaaggtttttcccaggacgtctcatgtttggccctttagaattggggtagaaatcagaaatgagatgaggggaagaagcaaggagtctaaggccctagcgatttgggcatctgccacattggttcatattcagaaagtgttatctcattgattatattcttgttaagcaaatctccttaagtaattattattcaaataagattatactcatacatctatatgtcactgttttaaagagatatttaatttttaatgtgtgttacatggtctgtaaatatttgtatttaaaaatgccatgcattaggctttggaaatttaatgttagttgaaatgtaaaatgtgaaaactttagatcatttgtagtaataaatatttttaacttcattcatacagttaagtttatctgacaataaaagctctgactaaaaaaaaaaaaaaaaaaaaaaaaaaaaaa

SEQ ID NO: 31115 - DNA, 1993 bp, Homo Sapiens
tcctctcctattatgcaaacccacaccatggatccagcagactactctggccccagcatgctgctccttgggatgatgggagaagggggaaacctgtgttttctcttggttttagggtatgggtctacttctttgaacattcgctcagatcgtaaggtaaccccaagaatcggcatcactctctggtctgggcgcctggatagtcacgcatggagtccgcgaggtgctggcgccggagcacgctgggaacgccgggctcccggccggcctgacccggaagggctggcgcatggtaaccccagcttccctagcaaccaagcaggcgcaagaagcaaccagccgcgctatccgctcccgttgctaccggaatgcctcttcaggttagcgattacagctggcagcagacgaagactgcggtctttctgtctctgcccctcaaaggcgtgtgcgtcagagacacggacgtgttctgcacggaaaactatctgaaggtcaactttcctccatttttatttgaggcatttctttatgctcccatagacgatgagagcagcaaagcaaagattgggaatgacaccattgtcttcaccttgtataaaaaagaagcggccatgtgggagaccctttctgtgacgggtgttgacaaagagatgatgcaaagaattagagaaaaatctattttacaagcacaagagagagcaaaagaagctacagaagcaaaagctgcagcaaagcgggaagatcaaaaatacgcactaagtgtcatgatgaagattgaagaagaagagaggaaaaaaatagaagatatgaaagaaaatgaacggataaaagccactaaagcattggaagcctggaaagaatatcaaagaaaagctgaggagcaaaaaaaaattcagagagaagagaaattatgtcaaaaagaaaagcaaattaaagaaggaagaaaaaaaataaaatataagagtcttactagaaatttggcatctagaaatcttgctccaaaagggagaaattcagaaaatatatttactgagaagttaaaggaagacagtattcctgctcctcgctctgttggcagtattaaaatcaactttacccctcgagtattcccaacagctcttcgtgaatcacaagtagcagaagaggaggagtggctacacaaacaagctgaggcacgaagagcaatgaatactgacatagctgaactttgcgatttaaaagaagaagaaaagaacccagaatggttgaaggataaaggaaacaaattgtttgcaacggaaaactatttggcagctatcaatgcatataatttagccataagactaaataataagatgccactattgtatttgaaccgggctgcttgccacctaaaactaaaaaacttacacaaggctattgaagattcttctaaggcactggaattattgatgccacctgttacagacaatgctaatgcaagaatgaaggcacatgtacgacgtggaacagcattctgtcaactagaattgtatgtagaaggcctacaggattatgaagcggcacttaagattgatccatccaacaaaattgtacaaattgatgctgagaagattcggaatgtaattcaaggaacagaactaaaatcttaatgactattagaagtaactaagtattgttataagttttttaaaaacaactggaggcatctttgtacatattatggccagttgtacagaatcgctttctgtttagtactttagttctgttgagggcaaaatattataaatctatagaaaataaactgtttgacttgaatcatttctgaataagtaaatctaaataagaatctattttaattccttatttcttcatattaatacatatgtatacttttttgtgttactgaattaagcttgcccttgtaacaaaatatgttttggtatagttaccaggacacttactgattaatttttaacaaggtagaattttaaaataaaagatttataaataa

SEQ ID NO: 31116 - DNA, 5921 bp, Homo Sapiens
cacgggggctcccgcgtggccgtctcggcgcctgcgtgacctccccgccggcgggatgtggcgactacgtcgggccgctgtggcctgtgaggtctgccagtctttagtgaaacacagctctggaataaaaggaagtttaccactacaaaaactacatctggtttcacgaagcatttatcattcacatcatcctaccttaaagcttcaacgaccccaattaaggacatcctttcagcagttctcttctctgacaaaccttcctttacgtaaactgaaattctctccaattaaatatggctaccagcctcgcaggaatttttggccagcaagattagctacgagactcttaaaacttcgctatctcatactaggatcggctgttgggggtggctacacagccaaaaagacttttgatcagtggaaagatatgataccggaccttagtgaatataaatggattgtgcctgacattgtgtgggaaattgatgagtatatcgattttggtcacaaattggttagtgaagtcataggagcttctgacctacttctcttgttaggttctccggaagaaacggcgtttagagcaacagatcgtggatctgaaagtgacaagcattttagaaagggtctgcttggtgagctcattctcttacaacaacaaattcaagagcatgaagaggaagcgcgcagagccgctggccaatatagcacgagctatgcccaacagaagcgcaaggtgtcagacaaagagaaaattgaccaacttcaggaagaacttctgcacactcagttgaagtatcagagaatcttggaacgattagaaaaggagaacaaagaattgagaaaattagtattgcagaaagatgacaaaggcattcatcatagaaagcttaagaaatctttgattgacatgtattctgaagttcttgatgttctctctgattatgatgccagttataatacgcaagatcatctgccacgggttgttgtggttggagatcagagtgctggaaagactagtgtgttggaaatgattgcccaagctcgaatattcccaagaggatctggggagatgatgacacgttctccagttaaggtgactctgagtgaaggtcctcaccatgtggccctatttaaagatagttctcgggagtttgatcttaccaaagaagaagatcttgcagcattaagacatgaaatagaacttcgaatgaggaaaaatgtgaaagaaggctgtaccgttagccctgagaccatatccttaaatgtaaaaggccctggactacagaggatggtgcttgttgacttaccaggtgtgattaatactgtgacatcaggcatggctcctgacacaaaggaaactattttcagtatcagcaaagcttacatgcagaatcctaatgccatcatactgtgtattcaagatggatctgtggatgctgaacgcagtattgttacagacttggtcagtcaaatggaccctcatggaaggagaaccatattcgttttgaccaaagtagacctggcagagaaaaatgtagccagtccaagcaggattcagcagataattgaaggaaagctcttcccaatgaaagctttaggttattttgctgttgtaacaggaaaagggaacagctctgaaagcattgaagctataagagaatatgaagaagagttttttcagaattcaaagctcctaaagacaagcatgctaaaggcacaccaagtgactacaagaaatttaagccttgcagtatcagactgcttttggaaaatggtacgagagtctgttgaacaacaggctgatagtttcaaagcaacacgttttaaccttgaaactgaatggaagaataactatcctcgcctgcgggaacttgaccggaatgaactatttgaaaaagctaaaaatgaaatccttgatgaagttatcagtctgagccaggttacaccaaaacattgggaggaaatccttcaacaatctttgtgggaaagagtatcaactcatgtgattgaaaacatctaccttccagctgcgcagaccatgaattcaggaacttttaacaccacagtggatatcaagcttaaacagtggactgataaacaacttcctaataaagcagtagaggttgcttgggagaccctacaagaagaattttcccgctttatgacagaaccgaaagggaaagagcatgatgacatatttgataaacttaaagaggccgttaaggaagaaagtattaaacgacacaagtggaatgactttgcggaggacagcttgagggttattcaacacaatgctttggaagaccgatccatatctgataaacagcaatgggatgcagctatttattttatggaagaggctctgcaggctcgtctcaaggatactgaaaatgcaattgaaaacatggtgggtccagactggaaaaagaggtggttatactggaagaatcggacccaagaacagtgtgttcacaatgaaaccaagaatgaattggagaagatgttgaaatgtaatgaggagcacccagcttatcttgcaagtgatgaaataaccacagtccggaagaaccttgaatcccgaggagtagaagtagatccaagcttgattaaggatacttggcatcaagtttatagaagacattttttaaaaacagctctaaaccattgtaacctttgtcgaagaggtttttattactaccaaaggcattttgtagattctgagttggaatgcaatgatgtggtcttgttttggcgtatacagcgcatgcttgctatcaccgcaaatactttaaggcaacaacttacaaatactgaagttaggcgattagagaaaaatgttaaagaggtattggaagattttgctgaagatggtgagaagaagattaaattgcttactggtaaacgcgttcaactggcggaagacctcaagaaagttagagaaattcaagaaaaacttgatgctttcattgaagctcttcatcaggagaaataaattaaaatcgtactcataatcagctctgcatacatctgaagaacaaaaacatcaacgtcttttgtccagcctctttttcttctgctgttccacctttctaaacatacaataaagtcatgggataaaaataatcgatgtatgttacgggcgctttaaccatcagctgcctctcgaatggaagaacagtggtaatggattaacatcctattttgttgtactaaagtgacaaatcggaataatataattggtatggccattaggttcagtccttgaagataagaagcttgttctctgtttgttgtcttatttgtggtggcactcgtttaatggattaactgaggttgctcaatgttcagtttcttttccagaaatacaatgctaggtgttttgaaataaaacttatatagcaattgtttaaagttatcaattgtatataaaatcacagtagcctgctaaatcattgtatgtgtctgtagtattctattcccagaaactatttgaccatgataattcagtttatattcaccacatgaaagaaaaatgggtaacagaagaacccctaaaacaggttaatttggattgtaacgttcagtgaaagaaatttcaacccttcatagccagcgaagaaatttgccttggaagccaagtcagtaccagcttacctatttgattcagttgctgttttctcactctctatatccatttgaaattgatttattttagatgttgtatacttacgttaggctttctgttaatagtggtttttctcctgttgacagagccaccggattatgacacaggatgaggaagattaaggataatcaattgactaatttcatttagaatattatcaaacatttcaactaggtatcagaaaaaggctttctttcataagactattttaaatagaaattatttcaacaattaaagtaatgttgaccatccccctctcagctgaataaagaaaaatttagttcaatttattgcaatttaattacaatactaccttcacaacattttcatgtgttttaaataaatattttttaattggctaaaggacattcaagcaaagaaatgctttctttacttaaaatgtctatctcatttgctgccttttcactaagcctttactttgttaataaaagtgtccattgtgtgatgtttttgattttacagtttgctaaatcttattttcttggagttgctttttggtaacagccccattgctactccccattttattgttttacatcaatgcatgcttcgttgtgatccctcaagatgtaacacttggtatgctcggttgaggatatgaaaaaatacttccgaaaccaggaattcagtgtatgtttgttttatactgtttgataagaaaagtaggtccagccttaagcagcacagatgcgctggtagatgcatagtcaggaactttttttatttcttttaggtctagggacaggagtgaatagaaagggaggagagctctattatgttctatacacagattaggagatgaccttactgggtacacccctctaaccagtgcttacaggttaatgcatgttaatgaatatttttgcagttgtaaagcataacaattacaactacacatctatttctaaagaataaaacaggaccatatttatttacttctgtcaactatagaaagaaagaccttcagctgtatttccacagatttctcccaaggaaaaggctaatattagtcactactgttatcacatccctttgtataagttttaaaaagagatggagggagatcttcatttctttgaggagatcagtattgtaacgtatgtgaatagatgataacaattaatattactaaaagtcccacatgagagtcctgacgccctctccatgccccacagtaatgtggcttctttcatgggtttttttttcttctttttagctgatctcatcctaagcatgctttatttttccttgaaagctaggtatttatcaactgcagatgttattgaaagaaaataaaattcagtctcaagagtaaaccctgtgtcttgtgtctgtagttcaaaagtcagaaatgattctaatttaaacaaaaagatattaaatatacagaagttaaattcgaactagccacagaatcatttgtttttatgtcagaatttgcaaagagtggagtggacaaagctctgtatggaagactgaacaactgtaaatagatgatatccaaacttaatttggctaggacttcaattttaaaaatcagtgtacctaggcagtgcacagcacgaaataagtggcccttgcagcttccccgtttaacccactgtgctatagttgcgggtggaacagtcaacctttctagtagtttatgatattgccctctttgtattcccattttccacagttttttccgcagacttctttctgcaaattattcagcctccaaatgcaaatgaatgatataaaaataagtagggaacatggcagagagtggtgcttcccagcctcacaatgtgggaatttgacataggatgagagtcagagtataggtttaaaagataaaatctttagttaataattttgtatttatttattctagatgtatgtatctgaggaaagaaatctggtatttttgctttccaataaaggggatcaaagtaatggtttttctctcagttctctaagctggtctatgttatagctctagcagtatggaaatgtgctttaaaatatgcttaccttttgaatgatcatggctatatgttgttgagatatttgaaacttaccttgttttcacttgtgcactgtgaatgaactttgtattatttttttaaaaccttcacattacgtgtagatattattgcaacttatattttgcctgtgcttgatcaaaggtcatttgtgtagatgagtaattaaaaaatatttaaatcac

SEQ ID NO: 31117 - DNA, 6386 bp, Homo Sapiens
attccatcccatcaccccatgatccttccccattgtcccatgaacagcccctgcaggaccctcccctgctccatgtgaccctccctctgcctcctccatgaaggtctcctggatttccccactcgcctctcacagccctccattgtctctgcagacgttgccccatctgacgctcggctcgaggcctctctgtgagggaccggggggccatccccctccagggcggagatcggaggtcgctgccaagcatggcgcccacctggggccctggcatggtgtctgtggttggtcccatgggcctccttgtggtcctgctcgttggaggctgtgcagcagaagagccccccaggtttatcaaagaacccaaggaccagatcggcgtgtcggggggtgtggcctctttcgtgtgtcaggccacgggtgaccccaagccacgagtgacctggaacaagaagggcaagaaggtcaactctcagcgctttgagacgattgagtttgatgagagtgcaggggcagtgctgaggatccagccgctgaggacaccgcgggatgaaaacgtgtacgagtgtgtggcccagaactcggttggggagatcacagtccatgccaagcttactgtcctccgagaggaccagctgccctctggcttccccaacatcgacatgggcccacagttgaaggtggtggagcggacacggacagccaccatgctctgtgcagccagcggcaaccctgaccctgagatcacctggttcaaggacttcctgcctgtggatcctagtgccagcaatggacgcatcaaacagctgcgatcaggagccctgcagattgaaagcagtgaggaaaccgaccagggcaaatatgagtgtgtggccaccaacagcgccggcgtgcgctactcctcacctgccaacctctacgtgcgagtccgccgcgtggccccgcgcttctccatcctgcccatgagccacgagatcatgccagggggcaacgtgaacatcacctgcgtggccgtgggctcgcccatgccatacgtgaagtggatgcagggggccgaggacctgacccccgaggatgacatgcccgtgggtcggaacgtgctggaactcacagatgtcaaggactcggccaactacacctgcgtggccatgtccagcctgggcgtcattgaggcggttgctcagatcacggtgaaatctctccccaaagctcccgggactcccatggtgactgagaacacagccaccagcatcaccatcacgtgggactcgggcaacccagatcctgtgtcctattacgtcatcgaatataaatccaagagccaagacgggccgtatcagattaaagaggacatcaccaccacacgttacagcatcggcggcctgagccccaactcggagtacgagatctgggtgtcggccgtcaactccatcggccaggggccccccagcgagtccgtggtcacccgcacaggcgagcaggccccggccagcgcgccgcggaacgtgcaagcccggatgctcagcgcgaccaccatgattgtgcagtgggaggagccggtggagcccaacggcctgatccgcggctaccgcgtctactacaccatggaaccggagcaccccgtgggcaactggcagaagcacaacgtggacgacagcctgctgaccaccgtgggcagcctgctggaggacgagacctacaccgtgcgggtgctcgccttcacctccgtcggcgacgggcccctctcggaccccatccaggtcaagacgcagcagggagtgccgggccagcccatgaacctgcgggccgaggccaggtcggagaccagcatcacgctgtcctggagccccccgcggcaggagagtatcatcaagtacgagctcctcttccgggaaggcgaccatggccgggaggtgggaaggaccttcgacccgacgacttcctacgtggtggaggacctgaagcccaacacggagtacgccttccgcctggcggcccgctcgccgcagggcctgggcgccttcacccccgtggtgcggcagcgcacgctgcagtccaaaccgtcagccccccctcaagacgttaaatgtgtcagcgtgcgctccacggccattttggtaagttggcgcccgccgccgccggaaacgcacaacggggccctggtgggctacagcgtccgctaccgaccgctgggctcagaggacccggaacccaaggaggtgaacggcatccccccgaccaccactcagatcctgctggaggccttggagaagtggacccagtaccgcatcacgactgtcgctcacacagaggtgggaccagggcccgagagctcgcccgtggtcgtccgcaccgacgaggatgtgcccagcgcgccgccgcggaaggtggaggcggaggcgctcaacgccacggccatccgcgtgctgtggcgctcgcccgcgcccggccggcagcacggccagatccgcggctaccaggtccactacgtgcgcatggagggcgccgaggcccgcgggccgccgcgcatcaaggacgtcatgctggccgatgcccaggagatggtcatcacaaacttgcagcctgagaccgcgtactccatcacggtagccgcctacaccatgaagggcgatggcgctcgcagcaaacccaaggtggttgtgaccaagggagcagtgctgggccgcccaaccctgtcggtgcagcagacccccgagggcagcctgctggcacgctgggagcccccggctggcaccgcggaggaccaggtgctgggctaccgcctgcagtttggccgtgaggactcgacgcccctggccaccctggagttcccgccctccgaggaccgctacacggcatcaggcgtgcacaagggggccacgtatgtgttccggcttgcggcccggagccgcggcggcctgggcgaggaggcagccgaggtcctgagcatcccggaggacacgccccgtggccacccgcagattctggaggcggccggcaacgcctcggccgggaccgtccttctccgctggctgccacccgtgcccgccgagcgcaacggggccatcgtcaaatacacggtggccgtgcgggaggccggtgccctgggccctgcccgagagactgagctgccggcagcggctgagccgggcgcggagaacgcgctcacgctgcagggcctgaagcccgacacggcctatgacctccaagtgcgagcccacacgcgccggggccctggccccttcagcccccccgtccgctaccggacgttcctgcgggaccaagtctcgcccaagaacttcaaggtgaaaatgatcatgaagacatcagttctgctcagctgggagttccctgacaactacaactcacccacaccctacaagatccagtacaatgggctcacactggatgtggatggccgtaccaccaagaagctcatcacgcacctcaagccccacaccttctacaactttgtgctgaccaatcgcggcagcagcctgggcggcctccagcagacggtcaccgcctggactgccttcaacctgctcaacggcaagcccagcgtcgcccccaagcctgatgctgacggcttcatcatggtgtatcttcctgacggccagagccccgtgcctgtccagagctatttcattgtgatggtgccactgcgcaagtctcgtggaggccaattcctgaccccgctgggtagcccagaggacatggatctggaagagctcatccaggacatctcacggctacagaggcgcagcctgcggcactcgcgtcagctggaggtgccccggccctatattgcagctcgcttctctgtgctgccacccacgttccatcccggcgaccagaagcagtatggcggcttcgataaccggggcctggagcccggccaccgctatgtcctcttcgtgcttgccgtgcttcagaagagcgagcctacctttgcagccagtcccttctcagaccccttccagctggataacccggacccccagcccatcgtggatggcgaggaggggcttatctgggtgatcgggcctgtgctggccgtggtcttcataatctgcattgtcattgctatcctgctctacaagaacaaacccgacagtaaacgcaaggactcagaaccccgcaccaaatgcctcctgaacaatgccgacctcgcccctcaccaccccaaggaccctgtggaaatgagacgcattaacttccagactccaggcatgcttagccacccgccaattcccatcgcagacatggcggagcacacggagcggctcaaggccaacgacagcctcaagctctcccaggagtatgagtccatcgaccctggacagcagttcacatgggaacattccaacctggaagtgaacaagccgaagaaccgctatgccaacgtcatcgcctatgaccactcccgtgtcatcctccagcccattgaaggcatcatgggcagtgattacatcaatgccaactacgtggacggctaccggcgtcagaacgcgtacattgccacgcaggggccgctgcctgagacctttggggacttctggcgtatggtgtgggagcagcggtcggcgaccatcgtcatgatgacgcggctggaggagaagtcacggatcaagtgtgatcagtattggcccaacagaggcacggagacctacggcttcatccaggtcacgttgctagataccatcgagctggccacattctgcgtcaggacattctctctgcacaagaatggctccagtgagaaacgcgaggtccgccagttccagtttacggcgtggccggaccatggcgtgcccgaatacccaacgcccttcctggctttcctgcggagagtcaagacctgcaacccaccagatgccggccccatcgtggttcactgcagtgccggtgtgggccgcacaggctgctttatcgtcatcgacgccatgcttgagcggatcaagccagagaagacagtcgatgtctatggccacgtgacgctcatgaggtcccagcgcaactacatggtgcagacggaggaccagtacagcttcatccacgaggccctgctggaggccgtgggctgtggcaacacagaagtgcccgcacgcagcctctatgcctacatccagaagctggcccaggtggagcctggcgaacacgtcactggcatggaactcgagttcaagcggctggctaactccaaggcccacacgtcacgcttcatcagtgccaatctgccttgtaacaagttcaagaaccgcctggtgaacatcatgccctatgagagcacacgggtctgtctgcaacccatccggggtgtggagggctctgactacatcaacgccagcttcattgatggctacaggcagcagaaggcctacatcgcgacacaggggccgctggcggagaccacggaagacttctggcgcatgctgtgggagaacaattcgacgatcgtggtgatgctgaccaagctgcgggagatgggccgggagaagtgtcaccagtactggccggccgagcgctctgcccgctaccagtactttgtggtagatccgatggcagaatacaacatgcctcagtatatcctgcgagagttcaaggtcacagatgcccgggatggccagtcccggactgtccggcagttccagttcacagactggccggaacagggtgtgccaaagtcgggggagggcttcatcgacttcattggccaagtgcataagactaaggagcagtttggccaggacggccccatctctgtccactgcagtgccggcgtgggcaggacgggcgtcttcatcacgcttagcatcgtgctggagcggatgcggtatgaaggcgtggtggacatctttcagacggtgaagatgctacgaacccagcggccggccatggtgcagacagaggatgagtaccagttctgttaccaggcggcactggagtacctcggaagctttgaccactatgcaacctaaagccatggtcccccccaggcccgacaccactggccccggatgcctctgcccctcccgggcggacctcctgaggcctggacccccagtgggcagggcaggaggtggcagcggcagcagctgtgtttctgcaccatttccgaggacgacgcagcccctcgagcccccccaccggccccggccgccccagcgacctccctggcacggccgccgccttcaaatacttggcacattcctcctttccttccaattccaaaaccagattccggggtggggggtggggggatggtgagcaaataggagtgctccccagaaccagaggagggtggggcacagaccatagacggacccctcgtcctcccccagcggtggtagggggacccggggggctcctccccgctctgcacc

SEQ ID NO: 31118 - DNA, 6888 bp, Homo Sapiens
ccaggagctgccttggcagtcacgccccttccttccgaggagctttctggctgcctaaactggtagaccccctgaattactcctccatctccgctctctttcgcctcctcttctcttagttctctccgcctccccctcaactaccaccacctccagtcagtctcgcctccggctatccgctgctccaccctctggcccggtatcctgcctgtccgctgccaccaaggagagcccggacggagcagcgaggaggggagcagccgggagttggggcttcccccctgcccatccctggccgctggcccgggaccgaagccacttgagcgagcagagagtcgtcaccttgtcttctttgccttcagggagctgctaagaaggacaaataagatagcagagtgaaagagcttttgtctccttagaaggaaggctgagaaactaaaggccagcgcaggacatctcattgccattgtcagccaggaactcgcagcctcacagccctacttcttctctgacctctggggggtccttgcccttgctacaatctccaccatccactagattgtctcctgcccgacaccccttggtcccaaaccagggagaccattcagctcacctgcctaggccgcagcagcatttccttcctaatcaggctcaccagggggatcattaccgtctctcccaacctggcctgagtcagcagcagcagcaacagcagcagcagcaccatcatcaccatcaccaccaacaacagcagcagcagcagccacagcagcagccaggagaagcctattcagctatgcctcgggctcagccatcctctgcttcttatcagccagtgccagcagacccttttgccattgtttccagagcccagcagatggttgagatcctctcagacgagaaccggaacttgaggcaagagttggaaggatgctatgagaaggtggcaagactgcagaaggtggagacagaaatccagcgcgtctcggaggcatatgagaacctcgtgaagtcatcctccaaaagagaggccctagagaaagccatgagaaacaagctagagggcgagattcggaggatgcatgatttcaacagggatctgagagagcgtctagagactgccaacaagcagcttgcagagaaggaatatgaggggtcagaggacaccagaaaaaccatctcgcagctctttgcaaaaaataaagaaagccagcgtgagaaggagaagctggaagcggagctggccactgcccgttctaccaatgaggaccaaagacgacacatcgaaatccgagatcaggccctgagtaatgcccaggccaaggtggtaaagctggaagaagagctgaaaaagaagcaagtgtacgttgacaaggtggagaagatgcagcaggcccttgtacagctccaggcagcatgtgaaaaacgtgagcagctagagcaccgtctccggacacgactggagagggaactggaatccctgagaatccagcagcgtcagggcaactgtcagcccaccaacgtttcagaatacaatgctgccgcactgatggagctccttcgggagaaagaggagaggattctggctctggaagctgatatgacaaagtgggagcagaaatatttggaggagaatgtgatgagacattttgctctggatgctgctgcaactgtggctgctcagagggacacaacagtcatcagtcactctcctaacaccagctatgacacagctctagaagctcgcatccagaaagaggaggaagaaatcttgatggccaataagcgttgccttgacatggagggcaggattaagaccctccatgcccagattattgagaaggatgccatgatcaaagtactccagcagcgttcccggaaggagccgagcaagacagagcagctgtcgtgcatgcggccagcgaagtctctgatgtccatttccaatgctggatcaggcttgctctcccactcatccaccctgactggctcccccatcatggaagaaaagcgagacgacaagagctggaaggggagcctaggcattctcctgggtggagactaccgtgctgaatatgtcccttccacaccctcgcctgtgccaccctcgactcccctgctctcggctcactccaagacaggcagccgagactgcagtacccaaactgaacgtgggacggaatcgaacaaaactgcagctgttgctcccatctctgttcctgctccagttgctgctgccgccactgctgccgccatcactgccactgctgccaccatcaccaccaccatggtagctgctgctccagttgctgttgctgctgctgctgctccagctgctgctgctgccccgtctccagccactgccgctgctactgctgctgctgtttctccagctgctgctggtcagattccagctgctgcctctgttgcctcagctgctgccgttgctccttctgctgctgctgctgctgctgttcaggttgctccagctgctccggctccagttccagctccggctctggttccggttccagctccagcagcggctcaggcttctgctcctgctcagactcaggcaccaacttcagctccggctgtggctccaactccagctccaactccaactccagctgtggctcaggctgaggttcctgcaagtccagctaccggtcctggaccacatcgtttgtctataccaagtttgacctgcaatccagacaaaacagatgggcctgtgttccactccaatactctggaaagaaaaactcccattcagatcctgggacaagagcctgatgcagagatggtggaatatctcatctaaacggccaaatcaagagctgcagattatcagcaaaaatgcttttaatcattttcccccttttattggttcttgttttgagggtgaggacaagggttgtggggaggggatgttttttaacaggactttttattggaacaatgtactacttgagtaataccatgtgaacaccagtctattttggtatgcttagggagtacctctaaagacagattaatcagaatgtgctctaaagcttattgtttgaatttatacgaatactgggactgttaacaggtggctatacatcgacgttttcaatgtgcttaaatttgtttaaattttccatattctagatcattttttattgaagagcacagtatgtgtggaagacagtgtataacacgtagtttggaagtgggaagctagagagaattgagtgtgtgctgttttgtatagttactatcctgtgcagcagctggagaaagcactcacctcaggcttacaaaagggaatagtttcaggagctatgtaagctggaaaaaaggtagggagttttggggtgcagaagggtactggagctaattttttcttccagtttcccagctaccctgccccagggaattgtgtttgtcttcatttcagtggtgctttggaaatggattcttttggttccctcctggaggttcatacattcatatatatgctctggagtaatttatgcatttggataattaatatattgctttcagatgctgggagagtacattaactgagtgatgcgcaacttcctctctcttagggaattagaccatcagaggccttgatggagagttgcatggggtgctatatgcagacttccatggtttgtgtgtagccatgaacacagcttgcttgcatttagtaagaccaatcagcttagtgtttatttcttctacagcacagattcactggctgggtctccagtctcaaattgccaatcatttgcaaagtgaggaaggatctttgttgacaggttgaatgctttgaatttctggtgactactttgaaataacttgttttgtttgtcaaattctaagcatatgtcttaaaaggcatttttgactatcacctccaagggaatagcttgagaaacccaaagtactatgctgcagtcgggggagaggtggattgcagcagtatcctcaactacctcttctcactgtcagtgacaccatcttggaatacctttgggaagcagcaggaaatgtgcatgtgggtagagatcaaaggaggcaatggctccaagccttgccatagggctgcctccaaggacacagaaggatgccagttgccacaggtccctgccctgtgtcacctgtctgcccttcattaaggtgagaaatctgcagatagcatcattaagatcagttttaaggggtatagggagggtgagggaagtggggggtgttaggtaagggttgggggtagaggttttgggatgtcttagttagaaaccagattaatagaagagtaggcctgatatattacatcatgagccatagtggtgggaaagaactttagcaatatagccctacctcctcattttagtgatgaggaatctgagaactggagaggttcagtgactttttgaaagtcatacaacacagctaaccattatgccaatcaccatgcttattttgggaaactctttatcttttttaaattccattttatgaaaaggcatcttcatggtccagggaatatgtatcttgtaaaatgtacctggttggagtagcttgtccagtcttgacaaactactgaatttctgtcttgcctctccttcagtgccttttaaaaggttttcccttttctgatctgcatttcaacatagagtcacataaatgtccccctgagaaaccaatcccacttctttctaggagattgggtatcttagataatcttttggggttcctctgtgagtataggaatggtatccttcctaattatcttccaaaggaattattttgtgtgtgtgcctgtgtgtgtgtagagacataaaggagggtgatgtgattttcagctagtcctttcacattttcaataatgaggtaatcatgttacatacacattagtcctcagttataaagtgaatctcagatagaaattaaaagtgcagttgtgttaagactctttcatactaccctttagtcataaggagaaaaaaacactcaaatagtagaagcagcaagtagcaaacttcaggagagctactttctatccaaataatttaaaaaacacttttcacctactcctttcatggttataacacattggcagactttttgctggctctgggagccatgattttaatcacattctgcaaggtgacaaatgtcatacattccacattgtgtggtagccatctctttagactcatgtgttttggggaaaggaagaagttcttggctgagtactattttgaactttccagaaccctctcacaccagagacagttcttctctgttcagtttccaatccccgataatttgctaaaataacattgtacatccaagagagggaagaagagtatgtcagtatattatgcagaagatagatacagccttttcagaagatctccactagtttttgttccaaaaattcaagtttatgggagaaatctcaattagccaccttttcacagttgtgtggatataacatttgggggatctttctggactcctacctatctgtgcattttaccggcacctcaggaaaggagggtgaccaggttgtcttagcttgtactgcttggtgatctctgaggaccttctaattcagttgtaccccagtgttccatgtatagaaaaacttcattagaacaaactttacttgatatgaaactcctattaacagtctttttttgaaataaaaagtagcttgagctttcttttaaaatcatgtatcttgattgttgatttaatgaaggatttccttttaatgctgcttttgagcttcaaggtaataggacagcaggaacctaaaatatctgccatcatctgccataggaaagatacccagagacccatcatgttctctttttgttgttacactgttgggtgggtataacaattggaaaatgaacaaactgattgattgtgcaaactactttttatgacaagcctaaaccctcataatgcggcagcttaaagtgtatacatatgcactaactttgatcaattatattctcatatctgttagctacacagtctcctattatctcaattgcttatgtgcatatggaatatgttacttaaaacgtgtgcattcttactgaaaatgttttcaaaggaaggtatcagctgtgggctaattgccaccaatttcagcctgccacgattcttggaaatatgtcttccaagtgccatccatcatcagtaggacaagtgtcgggagtttgtttatttttttccagtagcaacgatgggttacatggagccatgaaacctccttctggcctcccttgtgattaatggcatgtgtttgtaaaatggatagctggggttggcagatggctagagaagaatcgcctttggtttaaaatgtatgtggtcccctaatgattgtgaccccattctgtaatcaactgagctagttccaataaagttaagcaggtttaaatccactttgtgcctatcttttcactgacaataaagttagctattttaaaatgcagtaccgtgtggaaaatgctttggtgtttacccgacagaggctttatttgtgctgtatcagtgattactttcaattcagtatgcagtgaaattgcctttcaagggcagcgtgcagcagaatttgcatttgcttgaagtatggaatgtgattatagattataaagtattaagacaacaccacaggccgcatgctctaatcggtctctttatatactcaggcagcatatattaaaagctttgcatctttttatcttctggtttctagggataaaatgatggccacccaaagcagagaatttatcctttggttagcattttggaaggccccttgatattccttttgtacccttgttctgatgccaattcatcagtttt

SEQ ID NO: 31119 - DNA, 2084 bp, Homo Sapiens
ctctgcgcgtaatggcagcgccgtggcctcgcgtccatctttgccgttctctcggacctgtcacaaaggagtcgcgccgccgccgccgccccctccctccggtgggcccgggaggtagagaaaaactgccattggatgtccagaatcccctgtagttgataatgttgggaataagctctgcaactttctttggcattcagttgttaaaaacaaataggatgcaaattcctcaactccaggttatgaaaacagtacttggaaaactgaaaactacctaaatgatcgtctttggttgggccgtgttcttagcgagcagaagccttggccagggtctgttgttgactctcgaagagcacatagcccacttcctagggactggaggtgccgctactaccatgggtaattcctgtatctgccgagatgacagtggaacagatgacagtgttgacacccaacagcaacaggccgagaacagtgcagtacccactgctgacacaaggagccaaccacgggaccctgttcggccaccaaggaggggccgaggacctcatgagccaaggagaaagaaacaaaatgtggatgggctagtgttggacacactggcagtaatacggactcttgtagataatgatcaggaacctccctattcaatgataacattacacgaaatggcagaaacagatgaaggatggttggatgttgtccagtctttaattagagttattccactggaagatccactgggaccagctgttataacattgttactagatgaatgtccattgcccactaaagatgcactccagaaattgactgaaattctcaatttaaatggagaagtagcttgccaggactcaagccatcctgccaaacacaggaacacatctgcagtcctaggctgcttggccgagaaactagcaggtcctgcaagtataggtttacttagcccaggaatactggaatacttgctacagtgtctgaagttacagtcccaccccacagtcatgctttttgcacttatcgcactggaaaagtttgcacagacaagtgaaaataaattgactatttctgaatccagtattagtgaccggcttgtcacattggagtcctgggctaatgatcctgattatctgaaacgtcaagttggtttctgtgcccagtggagcttagacaatctctttttaaaagaaggtagacagctgacctatgagaaagtgaacttgagtagcattagggccatgctgaatagcaatgatgtcagcgagtacctgaagatctcacctcatggcttagaggctcgctgtgatgcctcctcttttgaaagtgtgcgttgcaccttttgtgtggatgccggggtatggtactatgaagtaacagtggtcacttctggcgtcatgcagattggctgggccactcgagacagcaaattcctcaatcatgaaggctacggcattggggatgatgaatactcctgtgcgtatgatggctgccggcagctgatttggtacaatgccagaagtaagcctcacatacacccatgctggaaagaaggagatacagtaggatttctgttagacttgaatgaaaagcaaatgatcttctttttaaatggcaaccagctgcctcctgaaaagcaagtcttttcatctactgtatctggattttttgctgcagctagtttcatgtcatatcaacaatgtgagttcaattttggagcaaaaccattcaaatacccaccatctatgaaatttagcacttttaatgactacgccttcctaacagctgaagaaaaaatcattttgccaaggcacaggcgtcttgctctgttgaagcaagtcagtatccgagaaaactgctgttccctttgttgtgatgaggtagcagacacacaattgaagccatgtggacacagtgacctgtgcatggattgtgccttgcagctggagacctgcccattgtgtcgtaaagaaatagtatctagaatcagacagatttctcatatttcatgacacatgtgaagaggcatcgtggacttttttctactcaattccagccaatgttgaaaagaaaaaaaaaaaaaaaaa

SEQ ID NO: 31120 - DNA, 3954 bp, Homo Sapiens; identical to SEQ ID NO: 22587

SEQ ID NO: 31121 - DNA, 3190 bp, Homo Sapiens; identical to SEQ ID NO: 23558

SEQ ID NO: 31122 - DNA, 2694 bp, Homo Sapiens
tccgccgctgctgtctgcggggtctggcgccggggtctgagtctctgctggctaagccgccgcctcagccgcctcagtcgcctcaatctcgccttccgccctcgctctccctccgcgccaccagaccccgtagccccgcgcgcccccagccctttaagccagatgatgaacttcctgcggcgccggctgtcggacagcagcttcatcgccaacctgcccaacggctacatgaccgacctgcagcggcccgagccccagcagccgccgccgccgccgccccccggtccgggcgccgcctcggcctcggcggcgcccccgaccgcctcgccgggcccggagcggaggccgccgcccgcctcggcgcccgcgccgcagcccgcgccgacgccgtcggtgggcagcagcttcttcagctcgctgtcccaagccgtgaagcagacggccgcctcggctggcctggtggacgcgcccgctcccgcgcccgcagccgccaggaaggccaaggtgctgctggtggtcgacgagccgcacgccgactgggccaagtgctttcggggcaaaaaagtccttggagattatgatatcaaggtggaacaggcagaattttcagagctcaacctggtggcccatgcagatggcacctatgctgtggatatgcaggttctccggaatggcacaaaggttgtccggtccttccggccagacttcgtgctcatccggcagcatgcatttggcatggcggagaatgaggacttccgccacctgatcattggtatgcagtatgcaggcctccccagcatcaactcactggaatccatatacaacttctgtgacaagccatgggtgtttgcccagctggtcgctatctataagacactgggaggagaaaagttccctctcattgaacagacatactaccccaaccacaaagagatgctgacactgcccacgttccctgtggtggtgaagattggccacgctcactcaggcatgggcaaggtcaaagtggaaaaccactacgacttccaggacattgccagcgtggtggctctcacccagacctatgccactgcagagcctttcattgactccaagtatgacatccgggtccagaagattggcaacaactacaaggcttacatgaggacatcgatctcagggaactggaagacgaacactggctctgcgatgctggagcagattgccatgtcagacaggtacaaactgtgggtggacacctgctctgagatgtttggcggcctggacatctgtgctgtcaaagctgtacatggcaaagatgggaaagactacatttttgaggtcatggactgtagcatgccactgattggggaacatcaggtggaggacaggcaactcatcaccgaactagtcatcagcaagatgaaccagctgctgtccaggactcctgccctgtctcctcagagacccctaacaacccagcagccacagagcggaacacttaaggatccggactcaagcaagaccccacctcagcggccaccccctcaagggggccctgggcaaccccaaggaatgcagcccccaggcaaggtgctgcctccacgccggctcccccctggaccatcactgccaccttcctcctcttcctcctcttcttcctcctcctcggctcctcagcggccgggcggccccaccacccacggagatgcaccctccagcagcagctccctggcagaggcccagccacccctggctgctccaccacagaagccccagcctcacccacagctcaacaagtcgcagtccctgacaaatgccttcagcttctctgagtcctccttcttccggtcttcagccaatgaggatgaagccaaagcagagaccatccggagcttgaggaagtcctttgccagcctcttttcagattagctcttcagacacacggggcacccagcccaaccgggaaaggcatctaagacattcaccaacaacagtcagccagcttggtggttatgtcccatgaccttgacgtgtgtggtcccttcctctgctctgttgtactaagtgatgttgtgcagcccagaaaggaccatttgacagtctcagggcaggtgcctacccagcaaggggtacctggcatcagagaggaaagagctgcttccctgtagtcatgagagcttccttctgaagtcatcgttcgctgtgagtttagtggccttattgtgacagtgccatcatgtcttattcttccctgtgaaaccaggattaatcgtggactcctggcagcttaacctagctcagttgcagtgctaagcatgccccgcccccattcagtgatacctgtttgggaagtatatacttccccaaaagtactcttggccctaagttttaggaactttccccgacctggatcccttgtcatacctgtgttactgtttaaagcacacccacccaacttacaagatcttaggctgctgtggtggtgaagcaccttgagtctgctgatattcgggagaacaaggatctgcagtttccccttttctcccctctgaagagtggttcttatgtgcaatctgcagtaaccttgaactccagagctgcactatagaggagaatgcatgccactatgacagcagtatgccaagctttgtgttcatctcctaataaacgttaagacctttggtgtaataaaaaaaaaaaaaaaaaaaaaaa

SEQ ID NO: 31123 - DNA, 1767 bp, Homo Sapiens
ctggaacccggaagcggcagcgcggcgcgacccggcgggcgggctctgggcgcgggaatcccggcggatcccgggcgggcggatgacccccagccctacccttggtgccgcctcctcctctctcctttctcctccggcagccagcgcgcctgtgtcctctctaggaaggggtaggggaggggcgtctggagaggaccccccgcgaatgcccacgtgacgtgcagtccccctggggctgttccggcctgcggggaacatgggcgtgctcagggtcggactgtgccctggccttaccgaggagatgatccagcttctcaggagccacaggatcaagacagtggtggacctggtttctgcagacctggaagaggtagctcagaaatgtggcttgtcttacaaggccctggttgccctgaggcgggtgctgctggctcagttctcggctttccccgtgaatggcgctgatctccacgaggaactgaagacctctactgccatcctgtccactggcattggcaggtatgtctctgtatggcagcaaatgtggcccatggcctgcagcaaaacgtcctatatgtagattccaatggagggctgacagcttcccgcctcctccagctgcttcaggctaaaacccaggatgaggaggaacaggcagaagctctccggaggatccaggtggtgcatgcatttgacatcttccagatgctggatgtgctgcaggagctccgaggcactgtggcccagcaggtgactggttcttcaggaactgtgaaggtggtggttgtggactcggtcactgcggtggtttccccacttctgggaggtcagcagagggaaggcttggccttgatgatgcagctggcccgagagctgaagaccctggcccgggaccttggcatggcagtggtggtgaccaaccacataactcgagacagggacagcgggaggctcaaacctgccctcggacgctcctggagctttgtgcccagcactcggattctcctggacaccatcgagggagcaggagcatcaggcggccggcgcatggcgtgtctggccaaatcttcccgacagccaacaggtttccaggagatggtagacattgggacctgggggacctcagagcagagtgccacattacagggtgatcagacatgacctgtgctgttgtttgggaaacagggaagcattggggacccctcccaacttttcttcccagtaacgcctgctgtttactgccacctggcactggtgactacagacgttctcaggctggccagaagagacatcttgggttccttggcctcactctctgtaagcatataaaccacaggcgaaagaggatgctgcattgcgaggacccagaaattcatactggtgccacgtttccttcccttatttctaacgtgtatgtttctggtggaaaccaagttcaccctggctgggagcatctctgatgaggcatgctggcgactggatggataatcctgtgcatcaccattgtgtcctgtgctccctcctagcgcagtggccaagccgggaaagcctctaacttgcctttgctgctgctgccttttttttcttttgtctctgcctttccatttgttagatgggggcccactcttccttagctctgtctctgagttactgggtggaaataagcttataaatgaaatactcttcttcatctctgttttgctcttaaaaatataaaaaggcaattccccgaaaaaaaaaaaaaaaaaaaaaaaaaaaaaaaaaaaa

SEQ ID NO: 31124 - DNA, 1559 bp, Homo Sapiens
ctggaacccggaagcggcagcgcggcgcgacccggcgggcgggctctgggcgcgggaatcccggcggatcccgggcgggcggatgacccccagccctacccttggtgccgcctcctcctctctcctttctcctccggcagccagcgcgcctgtgtcctctctaggaaggggtaggggaggggcgtctggagaggaccccccgcgaatgcccacgtgacgtgcagtccccctggggctgttccggcctgcggggaacatgggcgtgctcagggtcggactgtgccctggccttaccgaggagatgatccagcttctcaggagccacaggatcaagacagtggtggacctggtttctgcagacctggaagaggtagctcagaaatgtggcttgtcttacaagtcttgataaactgcttgatgctggtctctatactggagaagtgactgaaattgtaggaggcccaggtagcggcaaaactcaggcagaagctctccggaggatccaggtggtgcatgcatttgacatcttccagatgctggatgtgctgcaggagctccgaggcactgtggcccagcaggtgactggttcttcaggaactgtgaaggtggtggttgtggactcggtcactgcggtggtttccccacttctgggaggtcagcagagggaaggcttggccttgatgatgcagctggcccgagagctgaagaccctggcccgggaccttggcatggcagtggtggtgaccaaccacataactcgagacagggacagcgggaggctcaaacctgccctcggacgctcctggagctttgtgcccagcactcggattctcctggacaccatcgagggagcaggagcatcaggcggccggcgcatggcgtgtctggccaaatcttcccgacagccaacaggtttccaggagatggtagacattgggacctgggggacctcagagcagagtgccacattacagggtgatcagacatgacctgtgctgttgtttgggaaacagggaagcattggggacccctcccaacttttcttcccagtaacgcctgctgtttactgccacctggcactggtgactacagacgttctcaggctggccagaagagacatcttgggttccttggcctcactctctgtaagcatataaaccacaggcgaaagaggatgctgcattgcgaggacccagaaattcatactggtgccacgtttccttcccttatttctaacgtgtatgtttctggtggaaaccaagttcaccctggctgggagcatctctgatgaggcatgctggcgactggatggataatcctgtgcatcaccattgtgtcctgtgctccctcctagcgcagtggccaagccgggaaagcctctaacttgcctttgctgctgctgccttttttttcttttgtctctgcctttccatttgttagatgggggcccactcttccttagctctgtctctgagttactgggtggaaataagcttataaatgaaatactcttcttcatctctgttttgctcttaaaaatataaaaaggcaattccccg

SEQ ID NO: 31125 - DNA, 7475 bp, Homo Sapiens
acttcagacgccgctgatccgggaggagctggggtgagccgcggcggccgtctctcccacccgcagcagcatcctctctgcccttctctgccaccccggggagagccgggagctgcctctttacagcttccacgagccaggggtgcaggcagctgcccccaggaagtttgggcttctgcgtagtttaggggtgcctgcgagcgccccagagggcgaggggccgagggcgatgttgggcgccgcgcggggctgggggcgcccagaagacgtgcgagtgtccgcggtcctgctgctgtctccagtaccctccgcatcccccaagtgatgggaacaagggcccgcccaggcagccgctgtcgccgcaccgccccctcgctcgctctctgcgcgcggagtcacccagtcacactcccggcaccccgagcccttcctccggagctgctgcttctactttggctgctatcgccgccgccgcgggtggcccgctgctgactgggctcgccgggagacggagaagcactttttggccctccctcagcagctctcacaccccaactttgccgccgccgccgcgcctgccctcgcagcggcgctcggccgcacattgtgggggcgcacgccgggaggctccgcaagaccgtggaggcaggaaacggcactactgcgcttctgcctcggctctttgttgttcgctttggatggttcttgaaagtgtctgagcctcctcggaaatcctggggccggagaagacaaaccttggaattcttcctctgcaaaagtctctgagatactgacaagcgtccggaaaggtcgacgagtaattgccctgaaaactcttggctaattgacccacgttgcttatattaagcctttgtgtgtggtgtgtggcttcatacatttggggaccctatttccactccctcctcttggcatgagactgtatacaggatccacccgaggacaatgattgcggagcccgctcacttttacctgtttggattaatatgtctctgttcaggctcccgtcttcgtcaggaagattttccacctcgcattgttgaacacccttcagacctgattgtctcaaaaggagaacctgcaactttgaactgcaaagctgaaggccgccccacacccactattgaatggtacaaagggggagagagagtggagacagacaaagatgaccctcgctcacaccgaatgttgctgccgagtggatctttatttttcttacgtatagtacatggacggaaaagtagacctgatgaaggagtctatgtctgtgtagcaaggaattaccttggagaggctgtgagccacaatgcatcgctggaagtagccatacttcgggatgacttcagacaaaacccttcggatgtcatggttgcagtaggagagcctgcagtaatggaatgccaacctccacgaggccatcctgagcccaccatttcatggaagaaagatggctctccactggatgataaagatgaaagaataactatacgaggaggaaagctcatgatcacttacacccgtaaaagtgacgctggcaaatatgtttgtgttggtaccaatatggttggggaacgtgagagtgaagtagccgagctgactgtcttagagagaccatcatttgtgaagagacccagtaacttggcagtaactgtggatgacagtgcagaatttaaatgtgaggcccgaggtgaccctgtacctacagtacgatggaggaaagatgatggagagctgcccaaatccagatatgaaatccgagatgatcataccttgaaaattaggaaggtgacagctggtgacatgggttcatacacttgtgttgcagaaaatatggtgggcaaagctgaagcatctgctactctgactgttcaagaacctccacattttgttgtgaaaccccgtgaccaggttgttgctttgggacggactgtaacttttcagtgtgaagcaaccggaaatcctcaaccagctattttctggaggagagaagggagtcagaatctacttttctcatatcaaccaccacagtcatccagccgattttcagtctcccagactggcgacctcacaattactaatgtccagcgatctgatgttggttattacatctgccagactttaaatgttgctggaagcatcatcacaaaggcatatttggaagttacagatgtgattgcagatcggcctcccccagttattcgacaaggtcctgtgaatcagactgtagccgtggatggcactttcgtcctcagctgtgtggccacaggcagtccagtgcccaccattctgtggagaaaggatggagtcctcgtttcaacccaagactctcgaatcaaacagttggagaatggagtactgcagatccgatatgctaagctgggtgatactggtcggtacacctgcattgcatcaacccccagtggtgaagcaacatggagtgcttacattgaagttcaagaatttggagttccagttcagcctccaagacctactgacccaaatttaatccctagtgccccatcaaaacctgaagtgacagatgtcagcagaaatacagtcacattatcgtggcaaccaaatttgaattcaggagcaactccaacatcttatattatagaagccttcagccatgcatctggtagcagctggcagaccgtagcagagaatgtgaaaacagaaacatctgccattaaaggactcaaacctaatgcaatttaccttttccttgtgagggcagctaatgcatatggaattagtgatccaagccaaatatcagatccagtgaaaacacaagatgtcctaccaacaagtcagggggtggaccacaagcaggtccagagagagctgggaaatgctgttctgcacctccacaaccccaccgtcctttcttcctcttccatcgaagtgcactggacagtagatcaacagtctcagtatatacaaggatataaaattctctatcggccatctggagccaaccacggagaatcagactggttagtttttgaagtgaggacgccagccaaaaacagtgtggtaatccctgatctcagaaagggagtcaactatgaaattaaggctcgccctttttttaatgaatttcaaggagcagatagtgaaatcaagtttgccaaaaccctggaagaagcacccagtgccccaccccaaggtgtaactgtatccaagaatgatggaaacggaactgcaattctagttagttggcagccacctccagaagacactcaaaatggaatggtccaagagtataaggtttggtgtctgggcaatgaaactcgataccacatcaacaaaacagtggatggttccaccttttccgtggtcattccctttcttgttcctggaatccgatacagtgtggaagtggcagccagcactggggctgggtctggggtaaagagtgagcctcagttcatccagctggatgcccatggaaaccctgtgtcacctgaggaccaagtcagcctcgctcagcagatttcagatgtggtgaagcagccggccttcatagcaggtattggagcagcctgttggatcatcctcatggtcttcagcatctggctttatcgacaccgcaagaagagaaacggacttactagtacctacgcgggtatcagaaaagtcccgtcttttaccttcacaccaacagtaacttaccagagaggaggcgaagctgtcagcagtggagggaggcctggacttctcaacatcagtgaacctgccgcgcagccatggctggcagacacgtggcctaatactggcaacaaccacaatgactgctccatcagctgctgcacggcaggcaatggaaacagcgacagcaacctcactacctacagtcgcccagctgattgtatagcaaattataacaaccaactggataacaaacaaacaaatctgatgctccctgagtcaactgtttatggtgatgtggaccttagtaacaaaatcaatgagatgaaaaccttcaatagcccaaatctgaaggatgggcgttttgtcaatccatcagggcagcctactccttacgccaccactcagctcatccagtcaaacctcagcaacaacatgaacaatggcagcggggactctggcgagaagcactggaaaccactgggacagcagaaacaagaagtggcaccagttcagtacaacatcgtggagcaaaacaagctgaacaaagattatcgagcaaatgacacagttcctccaactatcccatacaaccaatcatacgaccagaacacaggaggatcctacaacagctcagaccggggcagtagtacatctgggagtcaggggcacaagaaaggggcaagaacacccaaggtaccaaaacagggtggcatgaactgggcagacctgcttcctcctcccccagcacatcctcctccacacagcaatagcgaagagtacaacatttctgtagatgaaagctatgaccaagaaatgccatgtcccgtgccaccagcaaggatgtatttgcaacaagatgaattagaagaggaggaagatgaacgaggccccactccccctgttcggggagcagcttcttctccagctgccgtgtcctatagccatcagtccactgccactctgactccctccccacaggaagaactccagcccatgttacaggattgtccagaggagactggccacatgcagcaccagcccgacaggagacggcagcctgtgagtcctcctccaccaccacggccgatctcccctccacatacctatggctacatttcaggacccctggtctcagatatggatacggatgcgccagaagaggaagaagacgaagccgacatggaggtagccaagatgcaaaccagaaggcttttgttacgtgggcttgagcagacacctgcctccagtgttggggacctggagagctctgtcacggggtccatgatcaacggctggggctcagcctcagaggaggacaacatttccagcggacgctccagtgttagttcttcggacggctcctttttcactgatgctgactttgcccaggcagtcgcagcagcggcagagtatgctggtctgaaagtagcacgacggcaaatgcaggatgctgctggccgtcgacattttcatgcgtctcagtgccctaggcccacaagtcccgtgtctacagacagcaacatgagtgccgccgtaatgcagaaaaccagaccagccaagaaactgaaacaccagccaggacatctgcgcagagaaacctacacagatgatcttccaccacctcctgtgccgccacctgctataaagtcacctactgcccaatccaagacacagctggaagtacgacctgtagtggtgccaaaactcccttctatggatgcaagaacagacagatcatcagacagaaaaggaagcagttacaaggggagagaagtgttggatggaagacaggttgttgacatgcgaacaaatccaggtgatcccagagaagcacaggaacagcaaaatgacgggaaaggacgtggaaacaaggcagcaaaacgagaccttccaccagcaaagactcatctcatccaagaggatattctaccttattgtagacctacttttccaacatcaaataatcccagagatcccagttcctcaagctcaatgtcatcaagaggatcaggaagcagacaaagagaacaagcaaatgtaggtcgaagaaatattgcagaaatgcaggtacttggaggatatgaaagaggagaagataataatgaagaattagaggaaactgaaagctgaagacaaccaagaggcttatgagatctaatgtgaaaatcatcactcaagatgcctcctgtcagatgacacatgacgccagataaaatgttcagtgcaatcagagtgtacaaattgtcgtttttattcctcttattgggatatcattttaaaaactttattgggtttttattgttgttgtttgatccctaaccctacaaagagccttcctattcccctcgctgttggagcaaaccattataccttacttccagcaagcaaagtgctttgacttcttgcttcagtcatcagccagcaagagggaacaaaactgttcttttgcattttgccgctgagatatggcattgcactgcttatatgccaagctaatttatagcaagatattgatcaaatatagaaagttgatattcaacctcacaagggctctcaaagtataatctttctatagccaactgctaatgcaaattaaaacatatttcattttaacatgatttcaaaatcagtttttcatactaccctttgctggaagaaactaaaaatatagcaaatgcagaaccacaaacaattcgaatggggtagaaacattgtaaatatttactctttgcaaaccctggtggtattttattttggcttcatttcaatcattgaagtatattcttattggaaatgtacttttggataagtagggctaagccagttggatctctggttgtctagtcattgtcataagtaaacctagtaaaaccttgttctatttttcaatcatcaaaaagtaattataaatacgtattacaaacaagtggatgtttttaatgaccaattgagtaagaacatccctgtcttaactggcctaaatttcttctggtagtgtcagttcaactttcagaagtgccacttaaggaagtttgatttttgtttttgtaatgcactgtttttaatctctctctctttttttttttttttttggttttaaaagcacaatcactaaactttatttgtaaaccattgtaactattaaccttttttgtcttattgaaaaaaaaaatgttgagaagcgtttttaacctgttttgttaatgctctatgtttgtatttggaatatttgaataatgacagatggtgaagtaacatgcatactttattgtgggccatgaaccaaatggttcttacttttcctggacttaaagaaaaaaagaggtttaagtttgttgtggccaatgtcgaaacctacaagatttccttaaaatctctaatagaggcattacttgctttcaattgacaaatgatgccctctgactagtagatttctatgatccttttttgtcattttatgaatatcattgattttataattggtgctatttgaagaaaaaaatgtacatttattcatagatagataagtatcaggtctgaccccagtggaaaacaaagccaaacaaaactgaaccacaaaaaaaaaggctggtgttcaccaaaaccaaacttgttcatttagataatttgaaaaagttccatagaaaaggcgtgcagtactaagggaacaatccatgtgattaatgttttcattatgttcatgtaagaagccccttatttttagccataattttgcatactgaaaatccaataatcagaaaagtaattttgtcacattatttattaaaaatgttctcaaatac

SEQ ID NO: 31126 - DNA, 7195 bp, Homo Sapiens
cttcctcattggcgccgtgcagagaggcggaatgttcaactcctaactgcggcggaaacgtgggagccgcgcgggccgctgtcgtcccaacccccgccgccctcgtcgcgcgcggggcctccgcgcccccggctgctgctcacgccccgcccgggagccagattttgtggaagtataatactttgtcattatgagatgtcgtctctcggtgcctcctttgtgcaaattaaatttgatgacttgcagttttttgaaaactgcggtggaggaagttttgggagtgtttatcgagccaaatggatatcacaggacaaggaggtggctgtaaagaagctcctcaaaatagagaaagaggcagaaatactcagtgtcctcagtcacagaaacatcatccagttttatggagtaattcttgaacctcccaactatggcattgtcacagaatatgcttctctgggatcactctatgattacattaacagtaacagaagtgaggagatggatatggatcacattatgacctgggccactgatgtagccaaaggaatgcattatttacatatggaggctcctgtcaaggtgattcacagagacctcaagtcaagaaacgttgttatagctgctgatggagtattgaagatctgtgactttggtgcctctcggttccataaccatacaacacacatgtccttggttggaactttcccatggatggctccagaagttatccagagtctccctgtgtcagaaacttgtgacacatattcctatggtgtggttctctgggagatgctaacaagggaggtcccctttaaaggtttggaaggattacaagtagcttggcttgtagtggaaaaaaacgagagattaaccattccaagcagttgccccagaagttttgctgaactgttacatcagtgttgggaagctgatgccaagaaacggccatcattcaagcaaatcatttcaatcctggagtccatgtcaaatgacacgagccttcctgacaagtgtaactcattcctacacaacaaggcggagtggaggtgcgaaattgaggcaactcttgagaggctaaagaaactagagcgtgatctcagctttaaggagcaggagcttaaagaacgagaaagacgtttaaagatgtgggagcaaaagctgacagagcagtccaacaccccgcttctcttgcctcttgctgcaagaatgtctgaggagtcttactttgaatctaaaacagaggagtcaaacagtgcagagatgtcatgtcagatcacagcaacaagtaacggggagggccatggcatgaacccaagtctgcaggccatgatgctgatgggctttggggatatcttctcaatgaacaaagcaggagctgtgatgcattctgggatgcagataaacatgcaagccaagcagaattcttccaaaaccacatctaagagaagggggaagaaagtcaacatggctctggggttcagtgattttgacttgtcagaaggtgacgatgatgatgatgatgacggtgaggaggaggataatgacatggataatagtgaatgaaagcagaaagcaaagtaataaaatcacaaatgtttggaaaacacaaaagtaacttgtttatctcagtctgtacaaaaacagtaaggaggcagaaagccaagcactgcatttttaggccaatcacatttacatgaccgtaatttcttatcaattctacttttatttttgcttacagaaaaacggggggagaattaagccaaagaagtatatttatgaatcagcaaatgtggtgcctgattatagaaatttgtgatccctatatacaatataggatttttaaagttgagacattctggctttttcttttaatgaatactttttagtttgtattggactttatttcctttattcaaatcatttttaaaaactaacattttgaacaaacattcttaactcctaattgttcttagacacgtagtaattctgtgacatactttttttttcttatagcaatacactgtaatatcagaaatggttggcctgagcaacctagtaagacttcgtctctactaataattaaaaaactagctggcatggtagcacacacctgtagtcccagatacttgggaggccaaggcaggaggattgcttgagacctagcaatcagtcagggctgcagtgagccatgaggcaccactgcactctagcctgggcaagagaacaagatcctgtctcaaaaaacaaaaaaaagaaagaattgatagtacaaaatccaacaacaatactgagatgatctaagaaggttataacaaaatgctcttcagaaatacctaagtgctgagaatttttagtactaaagagcacagctgctcaaagtaaagcctgagcagtgttctcagtaatgtatttgaaggaaaaataccctgatttgaaaccaacagcagatgttgcaaactttcataccactgctggccatggaagcctcttaacaacacactgtcatttaaggctgtgcttgtgctttatacaaagagaaagaggtggtcttaaggggatgcttccaggggggtgagttcatgcctctcctgtattttccagcaagtggggtatgtgtggtggtttgttttttagaggggcataataatccaggattctaagcatatgctcagctattttaaagaggaaattaaatattataaaagaaatagtaaagataagttatcctcacttaggcaaaagcacaggtcctttccatatcaagtttagcctaccagggttgttttttgttttaaccctgcttaataatgttggtgttttagaagtagatacaggcactgctctgaaaacctggctagccaaggatattctcagaatgttatcacctgtttgtcaaagcttgtttaaattataaaacacttttaattatatatatgaggcaaaagaactaagacttttttcaaactaaattagaaaggagtgtcattatttgactgttaaaccaaaatatttttggtgggtctttttatggaagtttaaagaaaggacatcatcatagatatgatctaacagtatttctaactatatttgatcattaaaagcctcttggaatttgaagcgtgacgtgtttctaatgccccttgagaggtgaaaaataccacataatgatcagtatgctgtgccagcttcatttggggagaaataactagtagaaagttctgggtgtgaggtgtacagcagtctaggtggcatagtgatgaagaaagggatcagagtctgactgtcactcagaatcctgggctcagttgcttgacaaccttgggaaaattgttttatctttgtgcgtctgtttgctgatcttcagcgtgggaataataacagtacctacttgaaaggatcattgtgcggattaaaagaaataatatatgtaaagcactttaacacagcaccaggcccacggaaagtggctaatgttagctactatgaatggtgccagtgaagacactgaaaaataagtgatttcagtaaccttctggaaagctatcagtttcaaataatattttctctgtagtatgagatgaaattaaaagtggatagctttcaggaaagataaagagaacatgcttagaatgtaagctaaacagattttttctgttgctctttgaaaactatgagccctggccagcttaacctggtctgaggtgagactaaacacaaaaacagtagataaatctctccctaaaagatggattcccccacatacccatgctactagtttctctgtctattcacacatatgtacaaatacatgaacacagcctgtctgtgctcagacatagagaagtactacctgacttgagtcaatgcacccaagaagaaaagcttggagtagagcagaagggagggcttgggactcctgtctttccagcatgccctggggtgcagtggtcagccacctgaagagagagccaatagcatggggtttacaaggcaaagatagtcattcattcaacacatattcatagagctccttctctgtgccagacactgttctggaagatagctagatgaaaatctttgcactcacagagcttacatgccagtgagtgaagatcgatgataaataaagcaaatgcatcatatgttcacatttgataagtatatgccaaaaaatgaagccgggaaggaggacaaggcccatgggtgggtgttgaggtttttaaagtgtggtcaggaaaggccccactgataaggtaacatttgagcaagtctgaaaaaggcaaggggatctttggggctaacttcgggatccctgcactttatgtaagaatgtaaacctggagtctcatttaagaatgatcagcaatacgtttagaacatatgaactgaatgaaatggacattttttcttaatttatgtataaatccatatgattatacataaagttctgatgcattaataaaagcagccaaatagggccaaagagaaaaataacaggactctgtactggacctaactttatcattaattaggtaatattttcctcatttctttactgctgccattttcctcaccagtattccagagatggtcatagctcattactctaccaccaagaacctaaaaggaattagaatacagcagaattggcctcagtgaagagcttaaaattgttctcctcgtagaactggactattgatcattaccacgtgacgttggctctattactttctgttcccaatgtccttctagtggtttgaaaatgttaaaacatccctaaaatctaaatcatataatcagaattctatagtgtcccactctatctgtaaagatcatttggaagactttagactctattaattttaaaaggaatatttattagccatatgcagaatttctaatgatgatattgtacagcttctaattcacttttcagatcagtgtttgaaatggcaattatcagtgttggatttagttccaactacttgatttacaaaaatgtacatttagaggttaaaagaaacagtgagaaatgtaaacattcaaaatgataattgaatctctcagttgtgggaataattatcagagacatgcaactgaaaatgtctcacctttcatctttttttcttaattcataaagttatcttgtagaatttgatgagaccctccctagtcattctcaactggggcggtgctgtcaccgaatggtgtttgagagtgttggggctagggcacatttttggttgtcacagcaactggggtggcatttgctgcccagtgccaggaatagtaacattatgaatgccagggacagtgtgctcagtaaagtcttccatccaaaaggggcagggcacggtggctcacgcctgtaatcccagcactttgggaggccaaggtgggcggatcacctgatgtcaggggttcgagaccagcctggccaacatggtgaaaccctgttgctactaaaaatacaaaaattggctgggtgtggtgtcacatgccagtaaccccagctactagggaggctgaggcaggagaatcacttgaacccgggaggcagaggttgcagtgagctgagattgcaccactacactccagcctggatgacagagtgagacttcatctcaaaaaaaaaaaaaaacaaaaaaaaacaacccggtagcattgtcccttccccactgacaaacttatcaaatccagaagctttagagtttcgtctctaattatttttctcctgaacaaaattacccaagtcaaaacaaaatgtatttttagaattacggcagcatacgacctgaattttgtgagtttcgtggctttatcttaaatcaccatttccctaaaaatggtttctttctccttagaaatgctggtggcaacttgatgaaacagccaaatgcaccagggcaggtcactttcccattacactgattccacaattaaaaaaaaaaaagaaaaaaaactcattgagatagctacagttctataggttaatttaaagcctcctttttctactcatttttgaaagcaaaattacattttactattttacataaccagtgaaaagacgttgaaagcctacagctcactgtttttggtgctctggaaatgttgagggtgggtttttaaccagtgatttttaacgtgcagtgaatttgttagacttttaaacaccagctaaggtagtcaaacttgatccccattaaaaatcaaggaattaggggtcgggggagggtttaggagtgatccagaatgacctcccagaattactgtgcgtacaactttatttttcagagttttcattggaatggtaagagttttatgaaagacagttttaaaacttattctgagttaaatattaatactttaaaaaattattgtactagacttattgcagccttttgaaagtagcagagtttcatcataccacatatataacagagcataaattttctataatcaggcaccttttgctgcttttgagtaagactgttttcctgtttaagtgttaagcatcgccagacataaaaatctattctctcctctcgattgtagcatagcctgacagctctagatacagcatttctatgatgaaaaatgagtatccatcaggaaatctagaagactagccgtgttttctcagactccacctttgtttgcactctgttgcctgtgaggagctttctggcatgtgattatttacttcaaaactagagttccaagcacctacattaattattttatattgtgtgcagaatagtatatcttttaatgtcagatatgatacactgcacatattgcttttgcactcttaaaatttttgtactaaataatagaaaatatttatattctttgagtgtgagctttgaatagatggcattatcactttattgtttttttaacaaaaactttttctcaattattctattgcaatgttattctgagcaagtcctatgccaaatatcttgtataatgtttgtatggaagattaaattttactcttgtgtggtaagactatttcagttactgattttatagttggaatttgatattccagcacaaagtccacagtgtattcagaaatccaagttggtgtcatacatttcattttgatgtgaacttttctttgctttcctttgttctaagactccattttgcaataaacgttttgacagtaaaaaaaaaaaaaaaaaaa

SEQ ID NO: 31127 - DNA, 3006 bp, Homo Sapiens
agtcggcggcggctgctgctgcctgtggcccgggcggctgggagaagcggagtgttggtgagtgacgcggcggaggtgtagtttgacgcggtgtgttacgtgggggagagaataaaactccagcgagatccgggccgtgaacgaaagcagtgacggaggagcttgtaccaccggtaactaaatgaccatggaatctggagccgagaaccagcagagtggagatgcagctgtaacagaagctgaaaaccaacaaatgacagttcaagcccagccacagattgccacattagcccaggtatctatgccagcagctcatgcaacatcatctgctcccaccgtaactctagtacagctgcccaatgggcagacagttcaagtccatggagtcattcaggcggcccagccatcagttattcagtctccacaagtccaaacagttcagtcttcctgtaaggacttaaaaagacttttctccggaacacagatttcaactattgcagaaagtgaagattcacaggagtcagtggatagtgtaactgattcccaaaagcgaagggaaattctttcaaggaggccttcctacaggaaaattttgaatgacttatcttctgatgcaccaggagtgccaaggattgaagaagagaagtctgaagaggagacttcagcacctgccatcaccactgtaacggtgccaactccaatttaccaaactagcagtggacagtatattgccattacccagggaggagcaatacagctggctaacaatggtaccgatggggtacagggcctgcaaacattaaccatgaccaatgcagcagccactcagccgggtactaccattctacagtatgcacagaccactgatggacagcagatcttagtgcccagcaaccaagttgttgttcaagctgcctctggagacgtacaaacataccagattcgcacagcacccactagcactattgcccctggagttgttatggcatcctccccagcacttcctacacagcctgctgaagaagcagcacgaaagagagaggtccgtctaatgaagaacagggaagcagctcgagagtgtcgtagaaagaagaaagaatatgtgaaatgtttagaaaacagagtggcagtgcttgaaaatcaaaacaagacattgattgaggagctaaaagcacttaaggacctttactgccacaaatcagattaatttgggatttaaattttcacctgttaaggtggaaaatggactggcttggccacaacctgaaagacaaaataaacattttattttctaaacatttctttttttctatgcgcaaaactgcctgaaagcaactacagaatttcattcatttgtgcttttgcattaaactgtgaatgttccaacacctgcctccacttctcccctcaagaaattttcaacgccaggaatcatgaagagacttctgcttttcaacccccaccctcctcaagaagtaataatttgtttacttgtaaattgatgggagaaatgaggaaaagaaaatctttttaaaaatgatttcaaggtttgtgctgagctccttgattgccttagggacagaattaccccagcctcttgagctgaagtaatgtgtgggccgcatgcataaagtaagtaaggtgcaatgaagaagtgttgattgccaaattgacatgttgtcacattctcattgtgaattatgtaaagttgttaagagacataccctctaaaaaagaactttagcatggtattgaaggaattagaaatgaatttggagtgctttttatgtatgttgtcttcttcaatactgaaaatttgtccttggttcttaaaagcattctgtactaatacagctcttccatagggcagttgttgcttcttaattcagttctgtatgtgttcaacatttttgaatacattaaaagaagtaaccaactgaacgacaaagcatggtatttgaattttaaattaaagcaaagtaaataaaagtacaaagcatattttagttagtactaaattcttagtaaaatgctgatcagtaaaccaatcccttgagttatataacaagatttttaaataaatgttattgtcctcaccttcaaaaatatttatattgtcactcatttacgtaaaaagatatttctaatttactgttgcccattgcacttacataccaccaccaagaaagccttcaagatgtcaaataaagcaaagtgatatatatttgtttatgaaatgttacatgtagaaaaatactgattttaaatattttccatattaacaatttaacagagaatctctagtgaattttttaaatgaaagaagttgtaaggatataaaaagtacagtgttagatgtgcacaaggaaagttattttcagacatatttgaatgactgctgtactgcaatatttggattgtcattcttacaaaacatttttttgttctcttgtaaaaagagtagttattagttctgctttagctttccaatatgctgtatagcctttgtcattttataattttaattcctgattaaaacagtctgtatttgtgtatatcatacattgttttcaataccacttttaattgttactcattttattcactaagctcgataaatctaacagttactcttaaaaaaaaaaaaaagactaaggtggattttaaaaattggaaactgacataatgttaggttataatttctcatttggagccgggcgcagtggctcacgcctgtaatcccagcactttgggaggccaaggtgggtggatcacctgtggtcaagagttcaagaccagcctggccatcatggtgaaaccccatctctactaaaaatacaaaaattagccaggcgtggtggctggcgcctgtaatcccagctactcaggaggttgaggcagcagaattgcttgaacccaggaggcagagggttgcagtgagccgagatagcaccattgcactccagcctgggcgactccatctcaaaaaataaaaaaaaaaaaaaa

SEQ ID NO: 31128 - DNA, 10452 bp, Homo Sapiens
ctcggcccaacaaaatggcggcggcagcggtgtcgctttgtttccgcggctcctgcggcggtggcagtggtagcggcctttgagctgtggggaggttccagcagcagctacagtgacgactaagactccagtgcatttctatcgtaaccgggcgcgggggagcgcagatcggcgcccagcaatcacagaagccgacaaggcgttcaagcgaaaacatgaccgctgagcccatgagtgaaagcaagttgaatacattggtgcagaagcttcatgacttccttgcacactcatcagaagaatctgaagaaacaagttctcctccacgacttgcaatgaatcaaaacacagataaaatcagtggttctggaagtaactctgatatgatggaaaacagcaaggaagagggaactagctcttcagaaaaatccaagtcttcaggatcgtcacgatcaaagaggaaaccttcaattgtaacaaagtatgtagaatcagatgatgaaaaacctttggatgatgaaactgtaaatgaagatgcgtctaatgaaaattcagaaaatgatattactatgcagagcttgccaaaaggtacagtgattgtacagccagagccagtgctgaatgaagacaaagatgattttaaagggcctgaatttagaagcagaagtaaaatgaaaactgaaaatctcaaaaaacgcggagtgctgtggtgatatccttatatttgattccttgtgcacatgtgggagaaaatctccaaagaattacctagttttgcttaattcttgagcgatgtatgcaccaaagcacatagaagatacttaaagatgggcttcatgggattgtgagctgcactgcttgtggacaacaggtcaatcattttcaaaaagattccatttatagacacccttcattgcaagttcttatttgtaagaattgctttaagtattacatgagtgatgatattagccgtgactcagatggaatggatgaacaatgtaggtggtgtgcggaaggtggaaacttgatttgttgtgacttttgccataatgctttctgcaagaaatgcattctacgcaaccttggtcgaaaggagttgtccacaataatggatgaaaacaaccaatggtattgctacatttgtcacccagagcctttgttggacttggtcactgcatgtaacagcgtatttgagaatttagaacagttgttgcagcaaaataagaagaagataaaagttgacagtgaaaagagtaataaagtatatgaacatacatccagattttctccaaagaagactagttcaaattgtaatggagaagaaaagaaattagatgattcctgttctggctctgtaacctactcttattccgcactaattgtgcccaaagagatgattaagaaggcaaaaaaactgattgagaccacagccaacatgaactccagttatgttaaatttttaaagcaggcaacagataattcagaaatcagttctgctacaaaattacgtcagcttaaggcttttaagtctgtgttggctgatattaagaaggctcatcttgcattggaagaagacttaaattccgagtttcgagcgatggatgctgtaaacaaagagaaaaataccaaagagcataaagtcatagatgctaagtttgaaacaaaagcacgaaaaggagaaaaaccttgtgctttggaaaagaaggatatttcaaagtcagaagctaaactttcaagaaaacaggtagatagtgagcacatgcatcagaatgttccaacagaggaacaaagaacaaataaaagtaccggtggtgaacataagaaatctgatagaaaagaagaacctcaatatgaacctgccaacacttctgaagatttagacatggatattgtgtctgttccttcctcagttccagaagacatttttgagaatcttgagactgctatggaagttcagagttcagttgatcatcaaggggatggcagcagtggaactgaacaagaagtggagagttcatctgtaaaattaaatatttcttcaaaagacaacagaggaggtattaaatcaaaaactacagctaaagtaacaaaagaattatatgttaaactcactcctgtttccctttctaattccccaattaaaggtgctgattgtcaggaagttccacaagataaagatggctataaaagttgtggtctgaaccccaagttagagaaatgtggacttggacaggaaaacagtgataatgagcatttggttgaaaatgaagtttcattacttttagaggaatctgatcttcgaagatccccacgtgtaaagactacacccttgaggcgaccgacagaaactaaccctgtaacatctaattcagatgaagaatgtaatgaaacagttaaggagaaacaaaaactatcagttccagtgagaaaaaaggataagcgtaattcttctgacagtgctatagataatcctaagcctaataaattgccaaaatctaagcaatcagagactgtggatcaaaattcagattctgatgaaatgctagcaatcctcaaagaggtgagcaggatgagtcacagttcttcttcagatactgatattaatgaaattcatacaaaccataagactttgtatgatttaaagactcaggcggggaaagatgataaaggaaaaaggaaacgaaaaagttctacatctggctcagattttgatactaaaaagggcaaatcagctaagagctctataatttctaaaaagaaacgacaaacccagtctgagtcttctaattatgactcagaattagaaaaagagataaagagcatgagtaaaattggtgctgccagaaccaccaaaaaaagaattccaaatacaaaagattttgactcttctgaagatgagaaacacagcaaaaaaggaatggataatcaagggcacaaaaatttgaagacctcacaagaaggatcatctgatgatgctgaaagaaaacaagagagagagactttctcttcagcagaaggcacagttgataaagacacgaccatcatggaattaagagatcgacttcctaagaagcagcaagcaagtgcttccactgatggtgtcgataagctttctgggaaagagcagagttttacttctttggaagttagaaaagttgctgaaactaaagaaaagagcaagcatctcaaaaccaaaacatgtaaaaaagtacaggatggcttatctgatattgcagagaaattcctaaagaaagaccagagcgatgaaacttctgaagatgataaaaagcagagcaaaaagggaactgaagaaaaaaagaaaccttcagactttaagaaaaaagtaattaaaatggaacaacagtatgaatcttcatctgatggcactgaaaagttacctgagcgagaagaaatttgtcattttcctaagggcataaaacaaattaagaatggaacaactgatggagaaaagaaaagtaaaaaaataagagataaaacttctaaaaagaaggatgaattatctgattatgctgagaagtcaacagggaaaggagatagttgtgactcttcagaggataaaaagagtaagaatggagcatatggtagagagaagaaaaggtgcaagttgcttggaaagagttcaaggaagagacaagattgttcatcatctgatactgagaaatattccatgaaagaagatggttgtaactcttctgataagagactgaaaagaatagaattgagggaaagaagaaatttaagttcaaagagaaatactaaggaaatacaaagtggctcatcatcatctgatgctgaggaaagttctgaagataataaaaagaagaagcaaagaacttcatctaaaaagaaggcagtcattgtcaaggagaaaaagagaaactccctaagaacaagcactaaaaggaagcaagctgacattacatcctcatcttcttctgatatagaagatgatgatcagaattctataggtgagggaagcagcgatgaacagaaaattaagcctgtgactgaaaatttagtgctgtcttcacatactggattttgccaatcttcaggagatgaagccttatctaaatcagtgcctgtcacagtggatgatgatgatgacgacaatgatcctgagaatagaattgccaagaagatgcttttagaagaaattaaagccaatctttcctctgatgaggatggatcttcagatgatgagccagaagaagggaaaaaaagaactggaaaacaaaatgaagaaaacccaggagatgaggaagcaaaaaatcaagtcaattctgaatcagattcagattctgaagaatctaagaagccaagatacagacataggcttttgcggcacaaattgactgtgagtgacggagaatctggagaagaaaaaaagacaaagcctaaagagcataaagaagtcaaaggcagaaacagaagaaaggtgagcagtgaagattcagaagattctgattttcaggaatcaggagttagtgaagaagttagtgaatccgaagatgaacagcggcccagaacaaggtctgcaaagaaagcagagttggaagaaaatcagcggagctataaacagaaaaagaaaaggcgacgtattaaggttcaagaagattcatccagtgaaaacaagagtaattctgaggaagaagaggaggaaaaagaagaggaggaggaagaggaggaggaggaggaagaggaggaggaagatgaaaatgatgattccaagtctcctggaaaaggcagaaagaaaattcggaagattcttaaagatgataaactgagaacagaaacacaaaatgctcttaaggaagaggaagagagacgaaaacgtattgctgagagggagcgtgagcgagaaaaattgagagaggtgatagaaattgaagatgcttcacccaccaagtgtccaataacaaccaagttggttttagatgaagatgaagaaaccaaagaacctttagtgcaggttcatagaaatatggttatcaaattgaaaccccatcaagtagatggtgttcagtttatgtgggattgctgctgtgagtctgtgaaaaaaacaaagaaatctccaggttcaggatgcattcttgcccactgtatgggccttggtaagactttacaggtggtaagttttcttcatacagttcttttgtgtgacaaactggatttcagcacggcgttagtggtttgtcctcttaatactgctttgaattggatgaatgaatttgagaagtggcaagagggattaaaagatgatgagaagcttgaggtttctgaattagcaactgtgaaacgtcctcaggagagaagctacatgctgcagaggtggcaagaagatggtggtgttatgatcataggctatgagatgtatagaaatcttgctcaaggaaggaatgtgaagagtcggaaacttaaagaaatatttaacaaagctttggttgatccaggccctgattttgttgtttgtgatgaaggccatattctaaaaaatgaagcatctgctgtttctaaagctatgaattctatacgatcaaggaggaggattattttaacaggaacaccacttcaaaataacctaattgagtatcattgtatggttaattttatcaaggaaaatttacttggatccattaaggagttcaggaatagatttataaatccaattcaaaatggtcagtgtgcagattctaccatggtagatgtcagagtgatgaaaaaacgtgctcacattctctatgagatgttagctggatgtgttcagaggaaagattatacagcattaacaaaattcttgcctccaaaacacgaatatgtgttagctgtgagaatgacttctattcagtgcaagctctatcagtactacttagatcacttaacaggtgtgggcaataatagtgaaggtggaagaggaaaggcaggtgcaaagcttttccaagattttcagatgttaagtagaatatggactcatccttggtgtttgcagctagactacattagcaaagaaaataagggttattttgatgaagacagtatggatgaatttatagcctcagattctgatgaaacctccatgagtttaagctccgatgattatacaaaaaagaagaaaaaagggaaaaaggggaaaaaagatagtagctcaagtggaagtggcagtgacaatgatgttgaagtgattaaggtctggaattcaagatctcggggaggtggtgaaggaaatgtggatgaaacaggaaacaatccttctgtttctttaaaactggaagaaagtaaagctacttcttcttctaatccaagcagcccagctccagactggtacaaagattttgttacagatgctgatgctgaggttttagagcattctgggaaaatggtacttctctttgaaattcttcgaatggcagaggaaattggggataaagtccttgttttcagccagtccctcatatctctggacttgattgaagattttcttgaattagctagtagggagaagacagaagataaagataaaccccttatttataaaggtgaggggaagtggcttcgaaacattgactattaccgtttagatggttccactactgcacagtcaaggaagaagtgggctgaagaatttaatgatgaaactaatgtgagaggacgattatttatcatttctactaaagcaggatctctaggaattaatctggtagctgctaatcgagtaattatattcgacgcttcttggaatccatcttatgacatccagagtatattcagagtttatcgctttggacaaactaagcctgtttatgtatataggttcttagctcagggaaccatggaagataagatttatgatcggcaagtaactaagcagtcactgtcttttcgagttgttgatcagcagcaggtggagcgtcattttactatgaatgagcttactgaactttatacttttgagccagacttattagatgaccctaattcagaaaagaagaagaagagggatactcccatgctgccaaaggataccatacttgcagagctccttcagatacataaagaacacattgtaggataccatgaacatgattctcttttggaccacaaagaagaagaagagttgactgaagaagaaagaaaagcagcttgggctgagtatgaagcagagaagaagggactgaccatgcgtttcaacataccaactgggaccaatttaccccctgtcagtttcaactctcaaactccttatattcctttcaatttgggagccctgtcagcaatgagtaatcaacagctggaggacctcattaatcaaggaagagaaaaagttgtagaagcaacaaacagtgtgacagcagtgaggattcaacctcttgaggatataatttcagctgtatggaaggagaacatgaatctctcagaggcccaagtacaggcgttagcattaagtagacaagccagccaggagcttgatgttaaacgaagagaagcaatctacaatgatgtattgacaaaacaacagatgttaatcagctgtgttcagcgaatacttatgaacagaaggctccagcagcagtacaatcagcagcaacagcaacaaatgacttatcaacaagcaacactgggtcacctcatgatgccaaagcccccaaatttgatcatgaatccttctaactaccagcagattgatatgagaggaatgtatcagccagtggctggtggtatgcagccaccaccattacagcgtgcaccacccccaatgagaagcaaaaatccaggaccttcccaagggaaatcaatgtgattttgcactaaaagcttaatggattgttaaaatcatagaaagatcttttatttctttaggaatcaatgacttaacagaactcaactgtataaatagtttggtccccttaaatgccaatcttccatattagttttacttttttttttttttaaatagggcataccatttcttcctgacatttgtcagtgatgttgcctagaatcttcttacacacgctgagtacagaagatatttcaaattgttttcagtgaaaacaagtccttccataatagtaacaactccacagatttcctctctaaatttttatgcctgcttttagcaaccataaaattgtcataaaattaataaatttaggaaagaataaagatttatatattcattctttacatataaaaacacacagctgagttcttagagttgattcctcaagttatgaaatacttttgtacttaatccatttcttgattaaagtgattgaaatggttttaatgttcttttgactgaagtctgaaactgggctcctgctttattgtctctgtgactgaaagttagaaactgagggttatctttgacacagaattgtgtgcaatattcttaaatactactgctctaaaagttggagaagtcttgcagttatcttagcattgtataaacagccttaagtatagcctaagaagagaattcctttttcttctttagtccttctgccattttttattttcagttatatgtgctgaaataattactggtaaaatttcagggttgtggattatcttccacacatgaattttctctctcctggcacgaatataaagcacatctcttaactgcatggtgccagtgctaatgcttcatcctgttgctggcagtgggatgtggacttagaaaatcaagttctagcattttagtaggttaacactgaagttgtggttgttaggttcacaccctgttttataaacaacatcaaaatggcagaaccattgctgactttaggttcacatgaggaatgtacttttaacaattcccagtactatcagtattgtgaaataattcctctgaaagataagaatcactggcttctatgcgcttcttttctctcatcatcatgttcttttaccccagtttccttacatttttttaaattgtttcagagtttgttttttttttagtttagattgtgaggcaattattaaatcaaaattaattcatccaatacccctttactagaagttttactagaaaatgtattacattttattttttcttaatccagttctgcaaaaatgacctataaatttattcatgtacaattttggttacttgaattgttaaagaaaacattgtttttgactatgggagtcaactcaacatggcagaaccatttttgagatgatgatacaacaggtagtgaaacagcttaagaattccaaaaaaaaaaaaaaaaaaaaaaaaaaagaaaactgggtttgggctttgctttaggtatcactggattagaatgagtttaacattagctaaaactgctttgagttgtttggatgattaagagattgccatttttatcttggaagaactagtggtaaaacatccaagagcactaggattgtgatacagaatttgtgaggtttggtggatccacgcccctctcccccactttcccatgatgaaatatcactaataaatcctgtatatttagatattatgctagccatgtaatcagatttatttaattgggtggggcaggtgtgtatttactttagaaaaaatgaaaaagacaagatttatgagaaatatttgaaggcagtacactctggccaactgttaccagttggtatttctacaagttcagaatattttaaacctgatttactagacctgggaattttcaacatggtctaattatttactcaaagacatagatgtgaaatttaggcaaccttctaaatcttttcaccatggatgaaactataacttaaagataatacttagaagggttaattggaaatcagagtttgaaataaaacttggaccactttgtatacactcttctcacttgacattttagctatataatatgtactttgagtataacatcaagctttaacaaatatttaaagacaaaaaaatcacgtcagtaaaatactaaaaggctcatttttatatttgttttagatgttttaaatagttgcaatggattaaaaatgatgatttaaaatgttgcttgtaatacagttttgcctgctaaattctccacattttgtaacctgttttatttctttgggtgtaaagcgtttttgcttagtattgtgatattgtatatgttttgtcccagttgtatagtaatgtttcagtccatcatccagctttggctgctgaaatcatacagctgtgaagacttgcctttgtttctgttagactgcttttcagttctgtattgagtatcttaagtactgtagaaaagatgtcacttcttcctttaaggctgttttgtaatatatataaggactggaattgtgtttttaaagaaaagcattcaagtatgacaatatactatctgtgttttcaccattcaaagtgctgtttagtagttgaaacttaaactatttaatgtcatttaataaagtgaccaaaatgtg

SEQ ID NO: 31129 - DNA, 7217 bp, Homo Sapiens
tacagccccaaggtcgctccctctggggccctttcttccccattcttcccagcagcccaaagctctggtgggacaggggcagcccctggggagggaggagaggacccaggaacccggctaggagggtggcccacccatttccagtgtgacctgttcccattcccccatgtctcctcccatccctcccgccactcagctcaggctgatgagaagcagagcaacgggtgtatcggtgttttctttcctggtggggtagtggggtggggctgaggagagaaaagggtgattagcgtggggccccgccctcttttgtcctcttcccaggttccctggccccttcggagaaacgcacttggttcgggccagccgcctgaggggacgggctcacgtctgctcctcacactgcagctgctgggccgtggagcttccccagggagccagggggacttttgccgcagccatgaagggggcacgctggaggagggtcccctgggtgtccctgagctgcctgtgtctctgcctccttccgcatgtggtcccaggaaccacagaggacacattaataactggaagtaaaactcctgccccagtcacctcaacaggctcaacaacagcgacactagagggacaatcaactgcagcttcttcaaggacctctaatcaggacatatcagcttcatctcagaaccaccagactaagagcacggagaccaccagcaaagctcaaaccgacaccctcacgcagatgatgacatcaactcttttttcttccccaagtgtacacaatgtgatggagactgttacgcaggagacagctcctccagatgaaatgaccacatcatttccctccagtgtcaccaacacactcatgatgacatcaaagactataacaatgacaacctccacagactccactcttggaaacacagaagagacatcaacagcaggaactgaaagttctaccccagtgacctcagcagtctcaataacagctggacaggaaggacaatcacgaacaacttcctggaggacctctatccaagacacatcagcttcttctcagaaccactggactcggagcacgcagaccaccagggaatctcaaaccagcaccctaacacacagaaccacttcaactccttctttctctccaagtgtacacaatgtgacagggactgtttctcagaagacatctccttcaggtgaaacagctacctcatccctctgtagtgtcacaaacacatccatgatgacatcagagaagataacagtgacaacctccacaggctccactcttggaaacccaggggagacatcatcagtacctgttactggaagtcttatgccagtcacctcagcagccttagtaacagttgatccagaaggacaatcaccagcaactttctcaaggacttctactcaggacacaacagctttttctaagaaccaccagactcagagcgtggagaccaccagagtatctcaaatcaacaccctcaacaccctcacaccggttacaacatcaactgttttatcctcaccaagtggattcaacccaagtggaacagtttctcaggagacattcccttctggtgaaacaaccatctcatccccttccagtgtcagcaatacattcctggtaacatcaaaggtgttcagaatgccaatctccagagactctactcttggaaacacagaggagacatcactatctgtaagtggaaccatttctgcaatcacttccaaagtttcaaccatatggtggtcagacactctgtcaacagcactctcccccagttctctacctccaaaaatatccacagctttccacacccagcagagtgaaggtgcagagaccacaggacggcctcatgagaggagctcattctctccaggtgtgtctcaagaaatatttactctacatgaaacaacaacatggccttcctcattctccagcaaaggccacacaacttggtcacaaacagaactgccctcaacatcaacaggtgctgccactaggcttgtcacaggaaatccatctacaggggcagctggcactattccaagggtcccctctaaggtctcagcaataggggaaccaggagagcccaccacatactcctcccacagcacaactctcccaaaaacaacaggggcaggcgcccagacacaatggacacaagaaacggggaccactggagaggctcttctcagcagcccaagctacagtgtgactcagatgataaaaacggccacatccccatcttcttcacctatgctggatagacacacatcacaacaaattacaacggcaccatcaacaaatcattcaacaatacattccacaagcacctctcctcaggaatcaccagctgtttcccaaaggggtcacactcaagccccgcagaccacacaagaatcacaaaccacgaggtccgtctcccccatgactgacaccaagacagtcaccaccccaggttcttccttcacagccagtgggcactcgccctcagaaattgttcctcaggacgcacccaccataagtgcagcaacaacctttgccccagctcccaccggggatggtcacacaacccaggccccgaccacagcactgcaggcagcacccagcagccatgatgccaccctggggccctcaggaggcacgtcactttccaaaacaggtgcccttactctggccaactctgtagtgtcaacaccagggggcccagaaggacaatggacatcagcctctgccagcacctcacctgacacagcagcagccatgacccatacccaccaggctgagagcacagaggcctctggacaaacacagaccagcgaaccggcctcctcagggtcacgaaccacctcagcgggcacagctaccccttcctcatccggggcgagtggcacaacaccttcaggaagcgaaggaatatccacctcaggagagacgacaaggttttcatcaaacccctccagggacagtcacacaacccagtcaacaaccgaattgctgtccgcctcagccagtcatggtgccatcccagtaagcacaggaatggcgtcttcgatcgtccccggcacctttcatcccaccctctctgaggcctccactgcagggagaccgacaggacagtcaagcccaacttctcccagtgcctctcctcaggagacagccgccatttcccggatggcccagactcagaggacaagaaccagcagagggtctgacactatcagcctggcgtcccaggcaaccgacaccttctcaacagtcccacccacacctccatcgatcacatccagtgggcttacatctccacaaacccagacccacactctgtcaccttcagggtctggtaaaaccttcaccacggccctcatcagcaacgccacccctcttcctgtcaccagcacctcctcagcctccacaggtcacgccacccctcttgctgtcagcagtgctacctcagcttccacagtatcctcggactcccctctgaagatggaaacatcaggaatgacaacaccgtcactgaagacagacggtgggagacgcacagccacatcaccaccccccacaacctcccagaccatcatttccaccattcccagcactgccatgcacacccgctccacagctgcccccatccccatcctgcctgagagaggagtttccctcttcccctatggggcagacgccggggacctggagttcgtcaggaggaccgtggacttcacctccccactcttcaagccggcgactggcttcccccttggctcctctctccgtgattccctctacttcacagacaatggccagatcatcttcccagagtcagactaccagattttctcctaccccaacccactcccaacaggcttcacaggccgggaccctgtggccctggtggctccgttctgggacgatgctgacttctccactggtcgggggaccacattttatcaggaatacgagacgttctatggtgaacacagcctgctagtccagcaggccgagtcttggattagaaagatcacaaacaacgggggctacaaggccaggtgggccctaaaggtcacgtgggtcaatgcccacgcctatcctgcccagtggaccctcgggagcaacacctaccaagccatcctctccacggacgggagcaggtcctatgccctgtttctctaccagagcggtgggatgcagtgggacgtggcccagcgctcaggcaagccggtgctcatgggcttctctagtggagatggctttttcgaaaacagcccactgatgtcccagccagtgtgggagaggtatcgccctgatagattcctgaattccaactcaggcctccaagggctgcagttctacgggctacaccgggaagaaaggcccaactaccgtctcgagtgcctgcagtggctgaagagccagcctcggtggcccagctggggctggaaccaggtctcctgcccttgttcctggcagcagggacgacgggacttacgattccaacccgtcagcataggtcgctggggcctcggcagtaggcagctgtgcagcttcacctcttggcgaggaggcgtgtgctgcagctacgggccctggggagagtttcgtgaaggctggcacgtgcagcgtccttggcagttggcccaggaactggagccacagagctggtgctgccgctggaatgacaagccctacctctgtgccctgtaccagcagaggcggccccacgtgggctgtgctacatacaggcccccacagcccgcctggatgttcggggacccccacatcaccaccttggatggtgtcagttacaccttcaatgggctgggggacttcctgctggtcggggcccaagacgggaactcctccttcctgcttcagggccgcaccgcccagactggctcagcccaggccaccaacttcatcgcctttgcggctcagtaccgctccagcagcctgggccccgtcacggtccaatggctccttgagcctcacgacgcaatccgtgtcctgctggataaccagactgtgacatttcagcctgaccatgaagacggcggaggccaggagacgttcaacgccaccggagtcctcctgagccgcaacggctctgaggcctccgccagcttcgacggctgggccaccgtctcggtgatcgcgctctccaacatcctccactcctccgccagcctcccgcccgagtaccagaaccgcacggaggggctcctgggggtctggaataacaatccagaggacgacttcaggatgcccaatggctccaccattcccccagggagccctgaggagatgcttttccactttggaatgacctggcagatcaacgggacaggcctccttggcaagaggaatgaccagctgccttccaacttcacccctgttttctactcacaactgcaaaaaaacagctcctgggctgaacatttgatctccaactgtgacggagatagctcatgcatctatgacaccctggccctgcgcaacgcaagcatcggacttcacacgagggaagtcagtaaaaactacgagcaggcgaacgccaccctcaatcagtacccgccctccatcaatggtggtcgtgtgattgaagcctacaaggggcagaccacgctgattcagtacaccagcaatgctgaggatgccaacttcacgctcagagacagctgcaccgacttggagctctttgagaatgggacgttgctgtggacacccaagtcgctggagccattcactctggagattctagcaagaagtgccaagattggcttggcatctgcactccagcccaggactgtggtctgccattgcaatgcagagagccagtgtttgtacaatcagaccagcagggtgggcaactcctccctggagctctggggagctctttcctgtgtcagaaccagtcctgccctgtgaattactgctacaatcaaggccactgctacatctcccagactctgggctgtcagcccatgtgcacctgccccccagccttcactgacagccgctgcttcctggctgggaacaacttcagtccaactgtcaacctagaacttcccttaagagtcatccagctcttgctcagtgaagaggaaaatgcctccatggcagaggtcaacgcctcggtggcatacagactggggaccctggacatgcgggcctttctccgcaacagccaagtggaacgaatcgattctgcagcaccggcctcgggaagccccatccaacactggatggtcatctcggagttccagtaccgccctcggggcccggtcattgacttcctgaacaaccagctgctggccgcggtggtggaggcgttcttataccacgttccacggaggagtgaggagcccaggaacgacgtggtcttccagcccatttccggggaagacgtgcgcgatgtgacagccctgaacgtgagcacgctgaaggcttacttcagatgcgatggctacaagggctacgacctggtctacagcccccagagcggcttcacctgcgtgtccccgtgcagtaggggctactgtgaccatggaggccagtgccagcacctgcccagtgggccccgctgcagctgtgtgtccttctccatctacacggcctggggcgagcactgtgagcacctgagcatgaaactcgacgcgttcttcggcatcttctttggggccctgggcggcctcttgctgctgggggtcgggacgttcgtggtcctgcgcttctggggttgctccggggccaggttctcctatttcctgaactcagctgaggccttgccttgaaggggcagctgtggcctaggctacctcaagactcacctcatccttaccgcacatttaaggcgccattgcttttgggagactggaaaagggaaggtgactgaaggctgtcaggattcttcaaggagaatgaatactgggaatcaagacaagactataccttatccataggcgcaggtgcacagggggaggccataaagatcaaacatgcatggatgggtcctcacgcagacacacccacagaaggacactagcctgtgcacgcgcgcgtgcacacacacacacacacacacgagttcataatgtggtgatggccctaagttaagcaaaatgcttctgcacacaaaactctctggtttacttcaaattaactctatttaaataaagtctctctgactttttgtgtctcc

SEQ ID NO: 31130 - DNA, 789 bp, Homo Sapiens
gcgccgtggctgggcaggagccgaggacggcatgtcccaggccccgggagcacagccgagcccacccaccgtgtaccacgaacggcagcgcctggagctgtgtgctgtccacgccctcaacaacgttctgcagcagcagctctttagccaggaggctgccgatgagatctgcaagaggttggccccagactcccggctgaaccctcatcgcagcctcctgggcaccggcaactatgatgtcaatgtgatcatggccgctctgcaggggctgggcctggccgccgtgtggtgggacaggaggaggcccctgtcccagctggccctgccccaggtactggggctgatcctgaacctgccctcgcccgtgtcgctggggctgctgtcactgccgctgcgccggcggcactgggtggccctgcgccaggtggacggtgtctactacaacctggactccaagctgcgggcgcccgaggccctgggggatgaggacggagtcagggccttcctggcggctgcgctggcccagggcctgtgcgaggtgctgctggtagtgaccaaggaggtggaggagaagggcagctggctgcggacagactgaccatggctgaccatcggcgcccacagcgcagtccctgcgcatccccctccggctgcgcacactgcatgcctgggaaaggccagcacttcatggaccctggggaggccccgccccctccccacacccctgctccccactgccgctgctgcctcaataaatctgctgatttgcgaaaaaaaaaaaaaaaaaaa

SEQ ID NO: 31131 - DNA, 1478 bp, Homo Sapiens
agcggctgggcggcgggccgggcccggggccgcttggaatggcgcctcctccgccttcgccccaactgcttctcctggcagccctcgcgaggctcctgggtcccagcgaggtgatggctggaccggcggaggaggcgggagcccattgtcccgagagcctgtggcctctgcctccgcaggtgtcaccaagagtgacctacacacgagtgagcccagggcaggctgaggatgtcaccttcctctaccacccctgtgcccatccctggctgaagctccagcttgccctcctggcctatgcttgtatggctaacccttccctcacccctgacttcagcctcacgcaggatcggcccctggtgctgactgcatgggggctggcgctggagatggcctgggtagagccagcctgggctgcccactggctgatgaggaggcggaggaggaagcagaggaagaagaaggcatggatctactgtgaaagcctttcagggcctgctccctccgagccaactcccggtagagggaggctgtgccgaagagggtgtgtgcaggccctggctctggcctttgctctgcggagctggcggccccctggcacagaggtgacatctcaagggcccaggcagccctcttctagtggtgccaagaggcggaggctgcgggctgcccttggtccccagcccactcgctcagccctgaggtttccctctgcttccccagggagcttgaaggccaagcagtccatggcgggaatccctggtagggagagtaatgccccatctgtgcccactgtctccctgctgccgggggcgcctggaggcaatgccagctccaggacagaggctcaggtgcccaacgggcaaggcagcccagggggctgtgtctgttcaagtcaggcttccccggcccctcgcgcagcagcgcctccacgggcagcccggggccccaccccacgcactgaagaggccgcctgggctgccatggccctgaccttcctgctggtgctgctcaccctggccacgctctgcacacggctgcacagaaacttccgacgcggggagagcatctactgggggcccacagcggacagccaggacacagtggctgctgtgctgaagcggaggctgctgcagccctcgcgccgggtcaagcgctcgcgccggagacccctcctcccgcccacgccggacagcggcccggaaggcgagagctcggagtgacggcctgggacctgccactgtggcgtgcggctcctccccgcgccgcgaggccgcgacctctgccacgtggaccgcgcgcggggcgctccctggtggcgatggcgcggcactggccgagcactgcgggggctttcctccttgttggttgctgagtgggcggccaaggggagaaaaggagccgcttctgcctcccttgccaaaactccgtttctaattaaattatttttagtagaaaaaaaaaaaaaaaaaaaaaaaaaa

SEQ ID NO: 31132 - DNA, 2052 bp, Homo Sapiens
gttgggggcagccaggcctggctcgagatgccgaagtcgtgcgcggcccggcagtgctgcaaccgctacagcagccgcaggaagcagctcaccttccaccggtttccgttcagccgcccggagctgctgaaggaatgggtgctgaacatcggccggggcaacttcaagcccaagcagcacacggtcatctgctccgagcacttccggccagagtgcttcagcgcctttggaaaccgcaagaacctaaagcacaatgccgtgcccacggtgttcgcctttcaggaccccacacagcaggtgagggagaacacagaccctgccagtgagagaggaaatgccagctcttctcagaaagaaaagacttcaccctgccgttcccaggtcctccctgaggcgggggccggagaggacagtcctgggagaaacatggacactgcacttgaagagcttcagttgcccccaaatgccgaaggccacgtaaaacaggcaatgttgtttaatgtagaaaatggaaccccagcttcacgtgaagccttgtggttgagtgaggagtgaaggatggggaggaggcctctggggaaggggttccctccctcctgaagatgaacacacagtacacggaagagcgccagcctctgctttcaggaaaggtttattgtggtgagtgccttctgtacagtcgactgcaaatgaaacgcagaggatgggtgcccagaagcacctgcggcagaggcgcacgggaagcccggggcccaggctcatgcaacacgacgctcaccgcggctcgggccgtggggccgtcagagaaacctttttaaaaaatggagatgaatgttacagaattggacaacccgaactgcttttcaaaaccagaggaaggaggttcttagccgttactcagataccagtgctggggagggaggcctgacttcagcaacagctgtgggtgggctggaggccggcgcagcttggggccccccacgccagctgtctcagccaccacctgtgcggcgcttgctccgaggggtcagcaagagcaactgatggctgccacttccaggccccgagagacaggcctcacgtaactttactgcagccgaggtccaggccgtggagggggtcctagctccgctgcattctgcatcccaagtgggcacgtggaggaagggtctgaaggaaggctccggagcacaggccctggtgttcctgtgaggacgctggacctgcaggagcggggagctgcagtgccacctgctgggtaccacgggccgggcctggggtccacgcctttgggttgggtgtgtctgatgtcttgccaagcgcctggtcctgtcctcttgagctgcccttgcccagcactgcactctggaggtgggtggtgcaggcagtggagggacacaggccagctcaagcccgctggtggcagggcgttttcccaccgggatacgggaagccacctgtgtcagggctaggccctgggatcgggagttacactaccctgtcccaagccgagggggccggtggaatgatttgagcagctctgggagtggggaaaaaagacgactaatttccaaacccgtttgttctcagataaaaagcagttttataaacccgcaatctgctccagattcaagcagtaatatttcagcaggaggaggtggtcatgggaagccagcacagcagaggctccctgaccgggaggcctgcctgcttttcaggttgtttcccatgttcagcttggactgcagaagtggctcacgctcctgtggtgagggcagggtgctccacagacacctccagacccagccaagaactacagggcggcgggctgcggtcagcacgtgtgctcgggacacagcggagtcagggccagagcccttccctccaggaactgatccttgggaaaacagccatgggccaggctgcagtctggttcccagtggggctgcctcagtcctacccccagcaccctcaaaagctggggtgtctgcatgtcccttcacataattgataatggtaccaccttctataataataatataaaataaaaac

SEQ ID NO: 31133 - DNA, 1080 bp, Homo Sapiens
ggggatggttccgagggcaggactatgggaggctgccctgtacggaaaagaagaagaaatggcagtaaagagggcaaccatcattccacccagcccaaaaggaataagagaaaccctatctttcaggattctcaagatacagaggtattttcatggagtgataatgaaaggagcagcagccgcattaatatcccagagagagcaagtggaccagaaggcaacttaaaccagattgttactgaacccgatgcaaactttccccagttcttgcatgagggattgtctaaacctgtttatgtcataaactggtttatgtcctttggtcctgaaataaaactcaatacttcacagcagggaaggaaccaagctgtttaaaactacttatctccgctatgaaggagaagtattttcaaggaatatcagaagaaagtagaaagtgagaggaggttccagctgggcttcctgggtcaagtaggggctcagaaagctgtgaaactcactcatttcctgcatgcggacttactttggtcctggatgaataatattgaagatatgtgcttaaaacattcctaacatcagaatttgcgcctgtgttttcttccccaagaaagctataaacagcgaaaattttgttgtaagcttccctgtgtcctctctccctctctcccttccccctctcctgaaactaaaaggaatgttaaaagcccacttttctgtgaccagcagaccttatctatggtcccaattccaattccttgtaaacacaatttgtaaaatcccgtgagatcctgtctcctttgccatcccgctgcaaggttataagtagagaaaacttaagttacaattccagttttcctcaagatctgagacatgttaattgtctttgtttctccctctggtaacatcttcccaccacacatatttcctgccttagagagtttaaaaggtgataaaaaaatctaacactggctaccccgctcgggaccccttccacgctgtgaaagctttgtactgtcactctgcttaataaagcctacagcttttttactctcaaaaaaaaaaaaaaaaaaaaaaaaaaaa

SEQ ID NO: 31134 - DNA, 2705 bp, Homo Sapiens; identical to SEQ ID NO: 25694

SEQ ID NO: 31135 - DNA, 2842 bp, Homo Sapiens; identical to SEQ ID NO: 27993

SEQ ID NO: 31136 - DNA, 2523 bp, Homo Sapiens
ggccatttttcttcctggtgtttgaatgactcataaaatgagtttggagtggtctgaagcctctgcctccttccttgaatgctttctaagaggggctgccatgcaagaatatatgctgattttcccatacggcgcctcatctcccagagatcttccttggagaccctggaagatattgaggagaacgcccctctccggagatgtcgaactctctcaggttcacccagaccaaagaattttaagaagattcattttatcaagaacatgcggcaacacgataccaggaatggcagaatagtccttatcagtggcagaagatccttctgtagtatattttcagtgctgccgtatcgcgacagtacccaagtcggggacttgaagttggacggaggaagacaatcaactggtgcagtgagtttgaaagagatcattggtctggaaggtgtggagctgggtgctgatgggaagactgtttcctatacccaatttctgttacccacaaatgcctttggagcccggagaaataccatagactccacctcctctttctcccagttccgtaacctgagccaccgcagcctctccataggccgggcaagcggcacccaggggagcctcgacacaggtagtgacctgggagactttatggactatgacccaaatctcttggatgacccccagtggccttgtggcaaacacaaacgcgttctgatcttcccttcctacatgacaacagtgattgactacgtgaagccctcggatctcaagaaggacatgaacgagaccttcaaggagaagtttcctcacattaagctgacactcagcaaaattaggagtctgaaacgagagatgcggaagcttgcgcaggaggactgtggccttgaggagcccacggtggccatggccttcgtctactttgaaaagctcgccctcaaggggaaactcaacaaacagaaccggaagctgtgtgctggggcatgtgtgctgttagcagccaaaattggaagtgacctcaaaaaacacgaagtcaagcatttaattgacaaactggaagagaagttccggctgaacaggcgagaactgattgcctttgaattcccggtgttagtggccttggaattcgccctccacttgcccgagcacgaagtcatgccccactacagacggctggtccagagttcctagcactggccccgaggacagccaagggccatttcttctcagcttggtggagcagcacttacttactactggaaatgaaaaaaagtagaactcagaataccagacttttcttcctctcgacatagtttggggagaagcagtactagaaactttccaaggagtcttgggtgtgtagccaagaggagccatgagctatggactcctcaagcacgggaagaggaggtgtgtgctgagaacagagaggccctgccctctgtccactagcgagaatccctagctgccccagcccagtctttctccccggcattcacaaactttgcaagcgtggtccagggccttctccagatctgttccaacttggagtgtgaagggcttgagcatacgggggaagagagtctgcagaagttgggggaaaacttttaaaagataccctcattgtgtcaaagagtgtgccaatctatttttgtatcagcattggaagtgcactttcccctggggcgtgtgggtgtgtgaatgtgcaagtgtctgagagatactgcatcagccctagacccccagagccagtcccgccctttacagagcagcccttagcctggggccatgggtcaggctgaccttcaacaattatttctagatgatttctggataagaattgctctctcggtaccagacagtttgacatcctccacccttagaaaatgactgacattgttttgttactgctcctacccaccaaggggataaagaaggcgagttctgagtgttggatgagtcagtcgcgtggaaggacgtggagcgtggcgctctgtaacttcctgccgtctgccaccccgccacgtgtatttaaccctcgcactttctccactgtggagatggctggggcggcgccccacagtgtgtattcctgtcctctatgttagagtgcatcagaagcacatttactgtgctatttatatcgctatataaaagtgttttataaaaacccagaataggagcccgacgcatgattggtgtttgaggcgtttgccagctgggacaaactgcgtttggagctgtggttaagctgactaaggaggcggtggctctttcttaacattcccacgtgcccagggctgttcatgcaagattttaatggtgacttgtcctggcttactgggacagtctgtatgaggcatgtcaccacactgtcgcctcatagctgcaagagagaggcaccagctgaagttcccctgactgaagagagcctgtggccatgtaaaaagagaattaaactcttgttgctttttgtaaaaaaaaaaaaaaaaaaaaaaaaaaaaaaaaaaaaaaaaaaaaaaaaaaaaa

SEQ ID NO: 31137 - DNA, 1428 bp, Homo Sapiens
aaacgtggccgggtctgcaagctaggtgccagcggggaaagtttccctgcttcttatcgtctgctttaacgccttaaatagcccgctgaaggctgcagcaggtgctaggtagcagcctcccggccctcgggaaaggcggggtggggaggcgagagcagcttagcctcctcgacctcccttcctggtgacggacgaacagttcccgtagaatttcgcttcaccgagtgaccttgagcccagggcgacggtcagcttgttaattcctggctgcaggaactttgtgagaattttaatgcatggaaaagctgtccatgttccaactgctgtacatccaaaagtctcagtgtaatagcaggaccaaaatattctgtcaatcagctgaccatatacttaatgactcctaaaatctcgtggacttctaagaaagcgccatggcctgtgctgctgttatgattcctgggttgttgcggtgctctgttggagccatccgtattgaggctgcgtcactgagattgacactcagcactttgcgccaccttactctaaccagcataatgaaatccaaaaggaaaactgatcacatggagagaactgcaagtgtccttcgacgggagattgtgtcagcagctaaggtgtgtggagctgccagtgagtcaccgtcagtgaagagcctccgcttgcttgttgctgatcaagacttttcctttaaagctggccagtgggttgatttctttattccaggagtctctgtggttggtgggttttcaatatgctccagtcccagactgctagaacaagagagagtgatagaattggcagtgaaatatacgaaccaccctcctgccctctgggttcacaatacgtgtacacttgactgtgaagtggctgtgagagtgggtggagagttcttctttgaccctcagcctgcggatgcctctagaaacctcgtgttgattgcaggaggagtcggaattaaccctctgctttccatcctgcggcacgcagcagatctcctcagagagcaggcaaacaaaagaaatggatatgagataggaacaataaaactattctacagtgcaaaaaataccagcgaactcctgtttaagaaaaatatccttgatttagtaaatgaatttcctgagaagattgcatgcagtttgcatgttacaaaacagactacacaaatcaatgcggaactcaagccatacatcacggaaggaagaataacggagaaggagataagagatcatatttcaaaagagactttgttctatatttgtggcccacctccaatgacagactttttctccaagcaactggaaaacaaccatgtacccaaagaacacatttgctttgagaagtggtggtaggaggcagacaaaggcagaaaaaataaagaggtgagatctaaaaaaaaaaaaaaaaaaa

SEQ ID NO: 31138 - DNA, 3079 bp, Homo Sapiens
tcttaaacaaggagaagtgccagaaagcccggaagcaaggaaggaaagtgaccaagcatgtggcaaaatggatactgtggatattgcaaacaactctactttgggaaaacccaagaggaaaagaagaaaaaagaaggggcatggctggagcagaacgggaacgagaacgcagaaaaacaaccaacaaaatgataacagcaaagccgatggccagctggtctcgagtgaaaagaaggcgaacatgaatctgaaagacctttccaagattagggggagaaagagaggcaaacctggaacccactttactcagagtgacagagctccacagaaaagagtccgatcaagagcttcaagaaagcacaaagatgaaactgtggattttcaggctcctttacttccagtgacctgtggtggggtgaagggaattttacataaggagaaattggaacaaggaaccttggcaaagtgtatacagactgaggatggaaaatggttcacccccatggaatttgaaatcaaaggaggctacgcaagatcaaagaactggaggctgagtgtgcgctgtggcgggtggcccctacgacggctgatggaggaaggatctctacctaatcctccaagaatatattacaggaacaaaaagagaatactgaagtctcaaaacaatagctcagttgacccttgtatgagaaacttggatgagtgtgaggtgtgccgggacggaggggagctgttctgttgcgacacttgttcaagagtcttccatgaggactgccacatcccacctgtggaaagtgagaagtaagtgacatgcaggcacctctctttcatcctttaagggaccttccacctgccatgcgcactctccagcagaatgtctgcttgtgtctagatggggaaggagcaggttcatcgggtactgggacccagcagtgtgatccagagagcagtgggagacgctggcagcaggaggtaaatgctctctgtgctctcagggacacctcctctgatatgctgaggccagtgttggggacctttgcctacatactggtattgtcctttccttgaagttttgcagtagggtctcctgccccagggggttgaggaaaaaaaacaccagttgtttatattttgtgcttattcatacaagacaggaagcacggtcttaggcggatggaggcctgacgtccctggagttgaaagcccagtttctgacacacaggcctggcaggcaggactccttgtgctcccagcagctcagacagggaaaggatagtccccactcacggtgacaccaccttcctgaggcttccctcctgctgctaccactgatgcgagggaaaggccagtggctggagaccccatgtgcagttcttggatactctgggaggtgttcccctccctcccatgactgagcccatcagccattcctgaaggaagacagtggtagccacaggaacggtggccatttccaagctccctgccctctgctcacccatgtccaatctctcaggaccccgtggaattgcatcttctgcaggatgaaggagtctccgggaagccaacagtgttgtcaggaatctgaggtcctggagaggcagatgtgtcctgaggaacagttggtaaatcagatgcaaaccccaagccttctcctttcccctcacacgtgagaaccatgaacaagcgcaagggcaggggaatgtactgaaaggagcctgctctaccgcgccacacttcaatggcactgatagaacaccacaccttgtttgcacaaaaaataactcagccatgacatgtctgtttccaagagccacacatgttagagaaacttgaggaagaagggtgtgagtcgtgtgctgtgtctcatgcatgtgggctcattctctccaagctgcttttcatttacggcctctttcttttgcagaaatgtgagttcctcctcttgaaagtctattgctgttctgagagctccttttttgccaagattccatactattattatattagagaggcgtgtcaaggcctgaaggagcccatgtggttggataaaatcaagaaaaggctgaatgagcacggttacccccaagtggaggggtttgtacaagacatgcgcctcatcttccagaaccacagggcctcttacaagtataaggattttggccaaatgggacttagactggaggctgaatttgagaaggatttcaaggaagtgtttgctattcaggaaacaaatgggaacagttgactggtttagtggatgctgaaggccttcaggaaatatgctactggttgccactgacttcaaactgagagcacttgggaaatagcacatgcagggagaggcttttctctgagcctccctcatccgcccaaaaacaaatcctcaaaagaaatttgatcatcatgaatcccatccccaagaatctcatcaaccagggaagaggaactgagatcacagggaaggagattggaggtgataccagcacagacagactctcacctcttctcctgaggtctgctccagacaacatttattactcacaagacctttttcctccgttttttttttgagatggagtctcacacagtcacccgggattggaatgcaatggcgcgatctcagctcactgcaacctctgcctcccggattcaagtgattcccctgtctcagcctcccaagtagctgggattacagtgcctgccaccatgcccagctaattttttgcatttttagtagagacggggtttcactatgttggccaggctggtctcgaactcctgacctcatgagccgcccgccttggcctcccaaagtgctgggacgtgacaggagtgagccaccacacctggccactcgcaagaccttttatctgaaaaccagccaagctttattcacgacacacttcttcccttcactctcccacttctgtggtcaactccctgcagaactcccaaactgccgttcttttcgatagctcacgatggtgtatgagtgtcaatcatctgacccttcttggagtctcatatttcgtggaactcctgtgcaaacatatattattaaattttttttcctcctgtc

SEQ ID NO: 31139 - DNA, 1988 bp, Homo Sapiens; identical to SEQ ID NO: 25783

SEQ ID NO: 31140 - DNA, 897 bp, Homo Sapiens
gggacccgccgcggcgctgtcgccggagagggagggcaccgctgtcgtcggccagaagccaaggagtcctcagtgacggtgggatccacaacatctccacatcgctgtccccacccagccagggcagcgccagcactagctcagacgcaaggacggaaccgctggactccaggttccttgcctgggagtaggagaaatccacctgctgggggctgagtgtggcctgagggacaggccctgggtcccgggatgcccctgcccgagcccagcgagcaggagggtgagagtgtgaaggccagccaggagccatcccccaagccaggcacagaagtcatcccggcagcccccaggaagcccagaaagttctccaaactggtcctgctcacagcctccaaagacagcaccaaggtggcgggggccaagcgcaagggtgtgcactgtgtcatgtccctgggggtgcccggccccgccacccttgccaaggccctcctccagacccaccccgaggcccagcgggccattgaggcagcccctcaggagcctgagcagaaacggagcaggcaggacccaggcacagacagaacagaagacagtggattagcagcggggcctcctgaggctgctggggagaactttgccccctgctctgtggcgcccggcaagtccctgtaaccttgacaacaggcgcatcctcccaggccaccaacccagccataggctcttctctgtccgcagggcttctggggccaaatgggtgaatctttgcttttaacattgtgtgatttcttttcttttttttttttttagatcaagtataagttacttttgtaagcagaaaaatactttcaaacaagaataaaagaagctgttcgctaaaaaaaaaaaaaaaaaaaaaaa

SEQ ID NO: 31141 - DNA, 774 bp, Homo Sapiens
cccacccgcgacgccgacgcaaggctgctgctatggggccgggcggccgtgtggcgcggctgctcgccccactaatgtggcgcagggcggtttcctcggtggcggggtccgcggttggagccgagcccgggcttcggctgctggccgtgcagcggcttcccgtaggagcagcgttctgccgggcttgccagaccccaaactttgtccgcggcctgcacagcgagcctgggctggaggagcgggcggaggggacggtcaacgagggacgcccagaatcggacgcggcagatcatactggtcccaagtttgacatcgatatgatggtttcacttctgaggcaagaaaatgcaagagacatttgtgtgatccaggttcctccagaaatgagatatacagattactttgtgattgttagtggaacttctacccgacacttacatgccatggccttctacgttgtgaaaatgtacaaacacctgaaatgtaaacgtgaccctcatgttaagatagaagggaaggacactgatgactggctgtgcgtggattttggcagcatggtgattcatttgatgcttccagaaaccagagaaatctatgaattagagaaattatggaccctacgttcttatgatgaccagttagctcagatagcacctgagacagtacctgaagacttcattcttggaatagaagatgatacttcatctgtgactccagtggagttaaaatgtgaataaaatattttatgcactgcgaaaaaaaaaaaaaaaaaaa

SEQ ID NO: 31142 - DNA, 1363 bp, Homo Sapiens
ctgagattggcgggtaacctagcaacgcagggaccgcggcggtaactgtggctagggaaacctggagcggtcagagcaggatggccagagacaataaaagcacgagacccaagtagtctaccgaagtctccatctctgtggacctacagaggcacagagggctgctcacaagatggctttagacattctcgccatggcccctttgtatcaggcccctgccatcaacagaatagggccaaagacagacccatctaaaaggccagctgatccactaaaacccttggttctctctaggaccaaactcaccaccattgaggccaaaaggatcatgtccatcctggatgaggcgatctacaaggtggagctggtgaccttgctgtcgtatgtggcatccaacagagaggatatggaggggatgctgggggaggacgtcatgagggcagtgagagagcatgaggatctctgccaggtcctccttgaaaacgtcaggtgcctgaaagagaaagaaaggcaattgcaggagcagaaagaggctgaggaggaagggtggctcagagaccgcctcctttccatagagctgcagaaatccagcctctcaccacttatgcagcagatcaaagactccaccaagaacgtccttagactcttgctcagcaacccccaggctgctaggctcctgcagatgcagacacagggtagaagtgcagaagcccagaattttattgacagcctgatagagctccgtggtttcctgtttgaaaaactactcactagtcccatggaagcgagggataaggcccagttcttacaggatatcagtagacagaatagtaataaccaacaaatcattgatactcttgaaaaggaattggcggagagaatgaagaacaggaatgcagaggaggagttggaggatctggacgctgttcacagggaggagaagatctcgctggaggagctcaggcggaggcacaaagtgctggtgggagagtttgcgcagatccgggaagagcgggagatcaactccaagaaaaggatggaggcagagcaggagatggtgcgcatggtacgggcggccacgctcatccaggccctatggaagggctatctggtgcgctccctgctcagatccaagaagaagcggggcaagggcaaagcaaaggacaaggagaagggcaagcagaaaggcaaggagaagggcaagggcaagaaatgagctctccacccagcccgctcctgacccttatcttcccagagaccaggccaggaaggcccgagatggagagcactaaattcacggctttcatgtttttatttaataaattaaaaagtatttgaagccacattgaaaaaaaaaaaaaaa

SEQ ID NO: 31143 - DNA, 1371 bp, Homo Sapiens
gcggtggcggcggcggcggcggcgcgtggcaggtccggcgggcgcgaggcggcggcggaggcccgagcccggcccagcctcgtcccgcccggagcccgcctggctgctaccccgaccccggctccggtcccgtcctgtcccggcgcgccgcggcctcgccccggcccccgctcggcgcctcccgagggagcggcgctgccggccgagagcgcaggcccggccatgaccgacttcaaattgggtatcgtgcggctcggccgggtggccgggaagaccaaatacacgctgatcgatgagcaggacatcccgctggtggagagctactcctttgaggcccgaatggaagtggatgcagatggaaatggtgctaagatatttgcctatgcctttgacaagaaccgaggaaggggctctgggagactccttcatgagctgctgtgggagcggcaccgggggggcgtggccccgggcttccaggtggtgcacctcaacgctgtgaccgtggacaatcgcctggacaacctgcaactggtgccgtggggctggcggcccaaggctgaagagacctccagcaagcagagggagcaaagcttgtattggcttgcaattcagcagctgcctacagaccctatagaagaacagtttcctgtcctaaatgtgacccggtattataatgccaacggggatgtagtggaagaggaggagaactcttgcacctactatgagtgccactaccctccctgcacagtgattgagaagcagctccgggagttcaacatctgtgggcgctgccaggtggcccggtactgcggctcccagtgccagcagaaggactggcctgcccacaagaagcactgtcgggagaggaagcgtcccttccagcatgagcttgagccagagcgatgacgggcaggggagccacacatactcacagcccccgggctctaccctgggcacagcagagacagactggtggttgaacctggaggtgccaaaaaagccagctgcgggcccaggacagctgccgtgagactcccgatgtcacaggcagtctgtgtggttacagcgcccctcagtgttcatctccagcagagacaacggaggaggctcccaccaggacggttctcattatttatatgttaatatgtttgtaaactcatgtacagttttttttgggggggaggcaatgggaagggtagaaattacaaatagaatcatttgctgtaatccttaaatggcaaacggtcaggccacgtgactaaaaactgtcctgttgtcgaagcttctcccctgggccgccgggagccccgtggagcgcggcctgcacgggagttgtgtccacaaaggcaaagtaaaggggtggaatcatca

SEQ ID NO: 31144 - DNA, 2004 bp, Homo Sapiens; identical to SEQ ID NO: 27841

SEQ ID NO: 31145 - DNA, 2339 bp, Homo Sapiens
gggcgcctccgggcctctgcggagccctgggcagctctgagctcgcggaggcgtggccggtgcgcggggcccgcggcgcgcggggatgggggtctcggtggatgtgcaccaggtgtacaagtaccccttcgagcaggtggtcgccagctttctccgaaaggtttccacgctttgagaaggactgaatgagatcatgcgcatggcagcttctctaggatagcaccctgcgtgaacacagtagctgctcagttaagtctttgatgggtgtgatcctgattcagcttgatcaattctgcagtcatactggattgtgtttgaaaaggtgtccagaaaaacctggccatctgcctcctgtcttcccagtaccccaaccccatggataaaaatgtcatctcagtaaaaatcatggaggaaaaaagagatgaatcaacaggggtcatctacagaaagaggattgcaatctgtcagaacgtggttccagaaattttaaggaaggtgagcattttgaaagtacctaatatccaattagaagaggagtcatggctcaatcctcgggaaagaaacatggccatacggagtcactgccttacgtggacacagtatgcatccatgaaggaagagtctgtcttccgggaaagtatggaaaacccaaattggacagagttcattcaaagaggcaggatttcaatcacaggggttggatttctcaactgtgttttagaaacttttgccagcacattcttacgacagggagcccagaagggaattagaatcatggagatgctgctaaaggaacagtgtggtgcccccttagctgaataaagaatcatcagagagctgtatccatgtctacttttttatttatttattttttttttgagaatcacttcttggccacagcacatcacagacacagtttctggaatacaggtttgaggatacagtgttggcagcttcaagaagagaagaccttcttgccaggacataaaatgataccctcctctgggagcctgcttcgaatagtgggactcagggagataagaccttcttgctggatttttatgacacaatctctttataattttacaaataaaggaaaaaagacccatgtaagatatgtgtgcccttcctcagggtgttctgctggttgtctgatgatggtgtcagggcagctaaggacaggataaaggcctggagagggtgcttgtgcccttatgttatcagcaccgttgttcctaggattcgtgaggggattctggaaccaataagggagttgaactggtacctgattcacgggtggactggaacaaacaggaatgtaccagacctatgttgaagctaagccgtatttataacaatgtttaagattctcagaaatcaggagatttttatcctatccataagtaatatgtaactgccataagtatagcttttagaatgtaatatgtaaactgcgatttggtcctctggaaaaaaaaaaatgaaatgaagagtgggaaggcagtttcttttctgctaattcgttctgtgatggtgagcaagcaaatcattaacctctctgttttttattgggcaaatggggataatcaggcacaggtctttccgccaatgcgttatgatgattaaagaaggtaattttgtgcagggttttaagtcaacagacagacctgggtttgaatccaagtgctggcacctacttgctcagtgatcatgaacacaattttaaatctttctgaatctcatttaaaaaaatttgtgaaacaagatgatagaattaattttgtgagattgttggactgatttgagatcatgcctatgaagtacctagcacactgcctagtacatagtagaagtccaggaaatggaagccattattatgtaaaacgttttgcaaaggtactttttaactgtaacgtaaagtggtactactgtttgaaacttagatggcagtagtttgcatttctcgtgatcagaagccaaaatataaatacatactacctaaaaaatcttgaagagaggtaataatttgaaattcatcttcttaagataaaaatcagggcagggtgtggtggcttatgcctgtaatcccagtactttgggaggccgaggcgggtggatcacaaggtcaggagttcgagaccagcctggccaatatggtgaaaccccgtctctactaaaaatacaaaaaaattagctgggcgtggtggcgcatgcctgtaatcctagctacttgggagtctgaggcaggagaattgcttgaactcaggaggtgaaggttgcagtaagctgagattgtgccactgcaccccagcctgggtgacagagcaagactccatcac

SEQ ID NO: 31146 - DNA, 4606 bp, Homo Sapiens
cccacatccgggaccctcatgcctgggcggaggagggggggccctcattcgggaccctgcactccgtcgccggaagtgccaccgagaagcgccggcctcggggctgtctacagcggcccgggagaggctgtggtggccccgagcgcgagtgtgtaggtgacaggacagcggccaggcccgcccctcccctcgtgatggtcattgtcctccagagcagtgatggaggaaataccagcccaggaagcagcagggtcaccaagggtccagtttcagtctttggagacccagtctgagtgtctgtccccagagcctcagtttgtgcaggacaccgacatggaacagggactcactggggatggagagaccagagaagagaacaagctgttgattcctaagcagaaaatttcggaagaagtgcattcatacaaagtgagagtaggaagactcaaacacgatattacccaagttcctgagactagagaagtgtataagtctgaggacagattagaaagacttcaggaaattctaaggaaatttctgtacctggagagagagtttaggcaaataacaatcagcaaggaaaccttcaccagtgagaagaacaatgaatgtcatgaacccgaaaaaagcttcagtctggactctactattgatgcagatcagagagttcttagaatacagaataccgatgacaatgataagtatgacatgagcttcaaccagaattcagcctctggtaaacatgaacacttaaatctaacagaggattttcagagtagtgaatgtaaggaaagcttaatggatctctcccaccttaataaatgggagagcatccctaacactgagaaatcctataaatgtgatgtatgtgggaaaattttccatcagagctcagcccttactagacatcagagaatccatactagagagaagccctacaaatgtaaagaatgtgaaaagtctttcagtcagagctcaagtcttagtcgacataaaagaatacacactagagaaaaaccttacaaatgtgaagcatctgataaatcctgtgaagcgtctgataaatcctgtagtccaagctcaggcataattcagcataagaaaattcacaccagagccaaatcttacaaatgtagcagttgtgaaagagtcttcagtcgtagtgtccaccttactcaacatcagaaaattcacaaagagatgccctgtaagtgtactgtatgtggcagtgacttctgccatacttcatacctacttgaacatcagagggtccatcatgaagagaaagcctatgagtatgatgaatatgggttggcctatattaaacaacaaggaattcatttcagagaaaagccctatacgtgtagtgaatgtggaaaagacttcagattgaattcacatcttattcagcatcaaagaattcacacaggagagaaagcacatgaatgtaatgaatgtggaaaagctttcagtcaaacctcatgccttattcagcatcacaaaatgcataggaaagagaaatcgtatgaatgtaatgagtatgagggcagtttcagtcatagctcagatcttatcctgcaacaagaagtcctcaccagacagaaagcctttgattgtgatgtatgggaaaagaactccagtcagagagcacatctagttcaacatcagagcattcataccaaagagaactcatgaatgtaatgaagatgggaagatatttatcaaattcaggcttcattcagcatctgagagttcacaccagggagaaatcatgtatgtactgcatgtggtaaagccttcagtcatagctcagccattgctcagcatcagataattcacaccagagagaaaccctctgaatgtgacgaatgaagaaaaggtattagtgttaaactcttaatcgactcctgcaaatctataccagtgagaaatcttacaaatgtattgaatgtggcaaatttttcatgctattagtattttcataccttagtcacatttggagaattcacatgggaataaaattccattgctgcaatgaatgtgaaaaagccatcagtcaaagaaactaccttgtttagtatcaaattcacgccatgcaaaaagattataaatgtaataagcatgtatgtgtgtgaggagattcagtcataacccaacgctcattcaacatcaaagaatttatacctaagagaacttatttgggtgtagtaaatggcagatctttcaataggagtttaactagtctttgtcatatcagaatatccatagtagacaagaatttgatgtaacgcaaatggaaaaactcgacaccacatttcaggctttacccaacatcgaaataatggagagaaaattgttgattatttgtttatgaaattgttaatacatagtcccaatctttttcattgcacaaaaatctagggttgacttggtaaatgcagtgacattttctcatggagttcctttatttaatatgtattctaagtaggtacgtttatttttacttttttattataattttgatattaaaaagaacagagatggggtcttgctttgttgcccaggctggtcttgaactcctggcctcaagcgatcctcccacctgtcctcccaaagtgctggggttacaggcgtgtgtcactgtgctgggcctattttatttatagaactcatttaagctgtttttattttaatatgccctataaacatttttatattttttgaaattggttcttagtgttcacaacttccataagatactgctaatgcaccagtattaaaacacatcgacgtaagtagctcatttagctttttctgctgttcttggcccaagttctttccaaaaccaactcttaggcctgctctttactagggatcttatgtcgtattgctttacagccacaacacttggattcctgttgattaacttctccattctcttaagcacctttagaagatttagaagtttcctagttttaagtgtttcaccagcaagtattccatacctacttgatgttgctggtctggtgtcttatttcctaaagtgaagcatctttttttaaaaaagaatttgattgacaatatatccagtccaatataagtatgaaggattctctctcctgagattgtagcaggcagccaaacattttcaaatgatgcccaaggttttagctgtcttgtgtgcatccacagtctgcgaagaagacatgataaggacatcagggagccaacaagactcctaatagcctcactacattcatccagtgcctattctgcatgcctaagcttagagttcttttatatacctctacggccagcaaaatgctcaggtctgctcttggtagggtaaacataaagaagatacacaggccgggcatggtggctcacacctgtaatcccagcactttgggaggctgaggcggatggatcacgaggtcaggcagtcgagaccatcctggccaacatggtgaaaccccgtctctactaaaaatacaaaagttagccgggtgtggtggcacgcgcctgtaatcccagctactcaggaggctgaggcaggagaactgcttgaacctgggaggcggaggttgcagtgagccgagattgcaccactgcactccagcctgggcgacagagcaggactctctctcaaaaaaacacaaaaaaacaaaaacaaaaaaccatacacacacacacacacacacaaatcagcatcataagggaatgtagccttccaacagagatgatgctgttcgtatgttaatctcagagacagtatttcaagagagtggcaggtctgttcctggtaaaattttaaccattaggattgcagataaatgtttgaattctgctcctctctcatcaatccaggacagtatttgaagtgtgagggctttgtgtatagttgtttatccattaccacatttttgtattttaatagtctacaggctatataaaagaacatggctttttgactgataaaagtgattacagatgttggctcaagttcagggccaccatcatatacctaacaagagttcatgattctttaggtaatgtcaaaacattttgtatttttccatcttaagctttataacattttgtgagtaagacaaatgttatttaaaattcttgttgtcagtccagcaattgaggctttcatagttcagtgttataatattcagtagggaccctcaacaaatatataaaaatatgttgctcactctataatcctcctatggctaacctctaggatagttctgccactatattttacttctttgccatcagcaagagtaggatttcatcaaggcaaggtaggaatctaaatgaaattgatatataaatgaattgatctaaatgtaaaagcaaatgaaaaatgcatgtgttttttcctgtcaaacatgtatacccttatgtatagagaccagtagtcacgtatggtgactgaaacaggattatgtaatccctaaaaagcagaatatgtaaaaatcacatgtatgcgtttggtttaggaatgtgcttttgtacttccacttgaataaaggtgtgtttggtattctgaaaaaaaaaaaaaaaaaaaaaaaaaaaaaaaaaaaaaaaaaaaaaa

SEQ ID NO: 31147 - DNA, 2624 bp, Homo Sapiens
ggggacggcctgggacgcggcgggagcatggagccgcgcgccggctgccggctgccggtgcgggtggagcaggtcgtcaacggcgcgctggtggtcacggtgagctgcggcgagcggagcttcgcggggatcctgctggactgcacgaaaaagtccggcctctttggcctacccccgttggctccgctgccccaggtcgatgagtcccctgtcaacgacagccatggccgggctcccgaggagggggatgcagaggtgatgcagctggggtccagctccccccctcctgcctgcggggttcagccccccgagaccaccggccccgagccacccccgcccctcgtgccgccgctgcccgccggaagcctgcccccgtaccctccctacttcgaaggcgcccccttccctcacccgctgtggctccgggacacgtacaagctgtgggtgccccagccgccgcccaggaccatcaagcgcacgcggcggcgtctgtcccgcaaccgcgacccggggcgcctcatcctcagcaccatccgcctgcggccgcgccaggtgctctgtgagaagtgcaagagcacgctgagccccccggaggccagccccggacccccagccgcgcccagggcccgcaggaggctgggcagcggcccggacagggagctccgcaagccggaggagccggagaacggcgagcccacggctgcggccaccgccaggaggagcaagagggagaggcgcgaggaggacagggccccggcagagcaggtcccgcggagcccggtcatcaagatctcctacagcacgccccagggcaagggagaggtggtcaagatcccctcccgcgtgcacggctctctggagcccttccgtccccagcaggccccgcaggacgacggcagccaggaccccgaggtgctggacagagagtcccgggaccggccgtcctgcgcgccctcggcctccatccccaagttgaaactgacacggcctgtgccggccggcgcggacctgccgccccctaagatccgcctgaagccccaccgtctgggggacagcgagcacgagcccgtgtaccgggccgagctggtgggggagctgaacgggtacctgcgggacagctcgccggcgccctgtgcggacggccctgccggtgggctggcggacttgtcttctggaagttcgggtgaggacgatgacttcaagagctgtccccagggtccacagggacgcgagggcttggcttttctcgtcagctgccctgaggggagagcggactgtgccagtgagtcggcgtgcagcagcgacagcctggacgaggccagatcgtccggctcggaagggacgccggcagacacgggtgacctctcgcctggccacggcgcgtcagcgccctcggtgtccagagaggctcgccaaacggtgccgcccctgacggtcaggctgcacacacagagcgtgtcggagtgcatcacggaggacggcaggactgtggccgtgggggacatcgtctggggtaagatccatggttttccttggtggccggcgcgtgttcttgacatcagtctcggccagaaggaggacggagagccgtcttggcgagaagcgaaggtctcgtggtttggttctccgactacgtcgttcttgtctatttcaaaactctcccctttctctgaatttttcaaactgagatttaatcgtaagaagaaggggatgtatcggaaagctataaccgaggctgcaaatgccgcaagacacgtggccccggaaatcagggagctcttaacccagtttgaaacgtaactggttccctgaccaggtcaccgacgatgagggcgcacctgctgtcctggagcttccgatctctgttcggggaccctgtgagccttctggccggctgcgtgcagagcccactgggcacggtggtcggcctggtgtgaggccccccggggaccggcagtgtgtccagggaggggatggccctgagcccagcggctcctcccgctgagtgtatttcttcccaccactcagcgcatggctgccctggctcacgaggcagtcgggactcgtgacttgctggctgctggctgctgctgcctcgcgcgctggggttccatggaggaactgggcctgccgccccggcctcacctgctgcccgcatgctggggtcccatggaggaaccaggcctggcgccccggcctcgcccagcggctggtgtgggcagctgttccctgcctcgcagtgtcctggaggcagctgtctcgcagactcagcttggtctcccgcaggcttcagaaaaacccaattgcacgtgtgggattcttccccagcccttgggtgcggggtctctgtgcacttgagagctgggggacccacccaccgtctcccactccaagttcatcccagagcgtggggcccgctgggcacctggcacctggcctgcagatgctgctacgagtgaccagtgctgtgtggaggaggccaagggcggcccctgggaaaccgggcttcaacagtacaaggaaaagaaacttgctctgttttgtaagagcgtgttccttttcctcttttttgtcactttaaagaccaaaaagaataaagaaagaaaagaaaaaaaaaaaaaaaa

SEQ ID NO: 31148 - DNA, 1214 bp, Homo Sapiens
gcgcgggccggcgcgggagcaagcggcatggcgttccggcaggcgctgcagctggcggcctgcgggctggccgggggctcggccgccgtgctcttctcggccgtggcggtagggaagccgcgcgcaggcggggacgcggagccacgcccggctgagccgccggcctgggcggggggcgcgcggccgggccccggtgtctgggaccccaactgggacaggcgagaaccactgtctctgatcaacgtgcggaagaggaacgtggaatctggggaagaagagctggcgtccaagctggaccactacaaagccaaggccacgcggcacatcttcctcatcaggcattcccagtaccacgtggatggctccctggagaaggaccgcactctgaccccgctgggtcgggagcaggctgaactcactgggctccgcctggcaagcttggggttgaagtttaataaaatcgtccattcgtctatgacgcgcgccatagagaccaccgatatcatcagccggcacctgccaggcgtctgcaaagtcagcacagatctgctgcgggaaggcgcccccatcgagccagacccgcccgtgtctcattggaagccggaagctgtgcagtattacgaagacggagcccggatcgaggccgccttccggaactacatccaccgcgcagatgccaggcaggaggaggacagttacgaaatcttcatctgtcacgccaacgtcatccgctacatcgtgtgcagcatcccgccgctgttgtccgctggggattttgtggttctggggtcctgacctctttcacttgctgatctgtgggcgctcccacccgtgtgccagcgtgacggctcggggtgtccgctcccctctgggtcgaggccacagctgagtcacgttgctgctcgggctgctccctcggggggcccttgtccctcaacctgctctggtgccccactctcagcaccacagaatgatccgggttcaggttgcgttttccctgccaccaccctgcaatcagccacttctttaaggagctccagggctgcagccacgttagagggccccttggggggcagggccagctctacggttacatgcctgaaacagtcagaagggttggccaaatctcactaaatgcaaatttgaaacaacaaaaaaaaaaaaaaaaaaaaaaaaaaaaaaaaaaaaaaaaaaaaaaaaaaaaaaaaaaaaaa

SEQ ID NO: 31149 - DNA, 7816 bp, Homo Sapiens
ttttcttgcttttcttcccttttttttctttttgcaaacaaaacaaaaaacagcatagaagaaagagcaaaataaagaagaagaagaggaggaagagagggaaagagaggaagggaaaaaaaacaccaacccgggcagaggaggaggtgcggcggcggcggcggcggcggcagcggcggcagcggcgcggcggcggctcggaccccctcccccggctccccccatcagtgcagctctccgggcgatgccagaatagatgccggggcaatgtcccgccgcaaacagggcaacccgcagcacttgtcccagagggagctcatcaccccagaggctgaccatgtggaggccgccatcctcgaagaagacgagggtctggagatagaggagccaagtggcctggggctgatggtgggtggccccgaccctgacctgctcacctgtggccagtgtcaaatgaacttccccttgggggacatcctggtttttatagagcacaaaaggaagcagtgtggcggcagcttgggtgcctgctatgacaaggccctggacaaggacagcccgccaccctcctcacgctccgagctcaggaaagtgtccgagccggtggagatcgggatccaagtcacccccgacgaagatgaccacctgctctcacccacgaaaggcatctgtcccaagcaggagaacattgcagggccgtgcaggcctgcccagctgccagcggtggcccccatagctgcctcctcccaccctcactcatccgtgatcacttcacctctgcgtgccctgggcgctctcccgccctgcctccccctgccgtgctgcagcgcgcgcccggtctcgggtgacgggactcagggtgagggtcagacggaggctccctttggatgccagtgtcagttgtcaggtaaagatgagccttccagctacatttgcacaacatgcaagcagcccttcaacagcgcgtggttcctgctgcagcacgcgcagaacacgcacggcttccgcatctacctggagcccgggccggccagcagctcgctcacgccgcggctcaccatcccgccgccgctcgggccggaggccgtggcgcagtccccgctcatgaatttcctgggcgacagcaaccccttcaacctgctgcgcatgacgggccccatcctgcgggaccacccgggcttcggcgagggccgcctgccgggcacgccgcctctcttcagtcccccgccgcgccaccacctggacccgcaccgcctcagtgccgaggagatggggctcgtcgcccagcaccccagtgccttcgaccgagtcatgcgcctgaaccccatggccatcgactcgcccgccatggacttctcgcggcggctccgcgagctggcgggcaacagctccacgccgccgcccgtgtccccgggccgcggcaaccctatgcaccggctcctgaaccccttccagcccagccccaagtccccgttcctgagcacgccgccgctgccgcccatgccccctggcggcacgccgcccccgcagccgccagccaagagcaagtcgtgcgagttctgcggcaagaccttcaagttccagagcaatctcatcgtgcaccggcgcagtcacacgggcgagaagccctacaagtgccagctgtgcgaccacgcgtgctcgcaggccagcaagctcaagcgccacatgaagacgcacatgcacaaggccggctcgctggccggccgctccgacgacgggctctcggccgccagctcccccgagcccggcaccagcgagctggcgggcgagggcctcaaggcggccgacggtgacttccgccaccacgagagcgacccgtcgctgggccacgagccggaggaggaggacgaggaggaggaggaggaggaggaggagctgctactggagaacgagagccggcccgagtcgagcttcagcatggactcggagctgagccgcaaccgcgagaacggcggtggtggggtgcccggggtcccgggcgcggggggcggcgcggccaaggcgctggctgacgagaaggcgctggtgctgggcaaggtcatggagaacgtgggcctaggcgcactgccgcagtacggcgagctcctggccgacaagcagaagcgcggcgccttcctgaagcgtgcggcgggcggcggggacgcgggcgacgacgacgacgcgggcggctgcggggacgcgggcgcgggcggcgcggtcaacgggcgcgggggcggcttcgcgccaggcaccgagcccttccccgggctcttcccgcgcaagcccgcgccgctgcccagccccgggctcaacagcgccgccaagcgcatcaaggtggagaaggacctggagctgccgcccgccgcgctcatcccgtccgagaacgtgtactcgcagtggctggtgggctacgcggcgtcgcggcacttcatgaaggaccccttcctgggcttcacggacgcacgacagtcgcccttcgccacgtcgtccgagcactcgtccgagaacggcagcctgcgcttctccacgccgcccggggacctgctggacggcggcctctcgggccgcagcggcacggccagcggaggcagcaccccgcacctgggcggcccgggccccgggcggcccagctccaaggagggccgccgcagcgacacgtgcgagtactgcggcaaggtgttcaagaactgcagcaacttgacggtgcaccggcggagccacaccggcgagcggccttacaagtgcgagctgtgcaactacgcgtgcgcgcagagcagcaagctcacgcgccacatgaagacgcacgggcagatcggcaaggaggtgtaccgctgcgacatctgccagatgcccttcagcgtctacagcaccctggagaaacacatgaaaaagtggcacggcgagcacttgctgactaacgacgtcaaaatcgagcaggccgagaggagctaagcgcgcgggccccggcgccccgcacctgtacagtggaaccgttgccaaccgagagaatgctgacctgacttgcctccgtgtcaccgccaccccgcaccccgcgtgtccccggggcccaggggaggcggcactccaacctaacctgtgtctgcgaagtcctatggaaacccgagggttgattaaggcagtacaaattgtggagccttttaactgtgcaataatttctgtatttattgggttttgtaatttttttggcatgtgcaggtactttttattattattttttctgtttgaattcctttaagagattttgttgggtatccatcccttctttgttttttttttaacccggtagtagcctgagcaatgactcgcaagcaatgttagaggggaagcatatcttttaaattataatttggggggaggggtggtgctgcttttttgaaatttaagctaagcatgtgtaatttcttgtgaagaagccaacactcaaatgacttttaaagttgtttactttttcattccttccttttttttgtcctgaaataaaaagtggcatgcagttttttttttaattattttttaattttttttttggtttttgtttttggggtggggggtgtggatgtacagcggataacaatctttcaagtcgtagcactttgtttcagaactggaatggagatgtagcactcatgtcgtcccgagtcaagcggccttttctgtgttgatttcggctttcatattacataagggaaaccttgagtggtggtgctgggggaggcaccccacagactcagcgccgccagagatagggtttttggagggctcctctgggaaatggcccgacagcattctgaggttgtgcatgaccagcagatactatcctgttggtgtgccctggggtgccatggctgctattcgctgtagattaggctacataaaatgggctgagggtacctttttggggagatggggtggcctgcagtgacacagaaaggaagaaactagcggtgttcttttaggcgttttctggcttgacggcttctctctttttttaaatcacccccaccacataaatctcaaatcctatgttgctacaaggggtcatccatcatttcccaagcagacgaatgccctaattaattgaagttagtgttctctcatttaatgcacactgatgatattgtagggatgggtggggtggggatcttgcaaatttctattctcttttactgaaaaagcaggggatgagttccatcagaaggtgcccagcgctacttcccaggtttttattttttttttcctatctcattaggttggaaggtactaaatattgaactgttaagattagacatttgaattctgttgacccgcactttaaagcttttgtttgcatttaaattaaatggcttctaaacaagaaattgcagcatattcttctctttggcccagaggtgggttaaactgtaagggacagctgagattgagtgtcagtattgctaagcgtggcattcacaatactggcactataaagaacaaaataaaataataatttataggacagtttttctactgccattcaatttgatgtgagtgccttgaaaactgatcttcctatttgagtctcttgagacaaatgcaaaactttttttttgaaatgaaaagactttttaaaaaagtaaaacaagaaaagtacattctttagaaactaacaaagccacatttactttaagtaaaaaaaaaaaaaattctggttgaagatagaggatatgaaatgccataagacccaatcaaatgaagaaataaacccagcacaaccttggacatccattagctgaattatcctcagccccttttgtttttgggacaacgctgcttagatatggagtggaggtgatttactgctgaattaaaactcaagtgacacaagttacaagttgatatcgttgaatgaaaagcaaaacaaaaacaattcaggaacaacggctaattttttctaaagttaaatttagtgcactctgtcttaaaaatacgtttacagtattgggtacatacaagggtaaaaaaaaaattgtgtgtatgtgtgttggagcgatctttttttttcaaagtttgcttaataggttatacaaaaatgccacagtggccgcgtgtatattgttttcttttggtgacggggttttagtatatattatatatattaaaatttcttgattactgtaaaagtggaccagtatttgtaataatcgagaatgcctgggcattttacaaaacaagaaaaaaaatacccttttcttttccttgaaaatgttgcagtaaaatttaaatggtgggtctataaatttgttcttgttacagtaactgtaaagtcggagttttagtaaatttttttctgccttgggtgttgaatttttatttcaaaaaaaatgtatagaaacttgtatttggggattcaaaggggattgctacaccatgtagaaaaagtatgtagaaaaaaagtgcttaatattgttattgctttgcagaaaaaaaaaaaatcacatttctgacctgtacttatttttctcttcccgcctccctctggaatggatatattggttggttcatatgatgtaggcacttgctgtatttttactggagctcgtaattttttaactgtaagcttgtccttttaaagggatttaatgtacctttttgttagtgaatttggaaataaaaagaaaaaaaaaacaaaaacaaacaggctgccataatatatttttttaatttggcaggataaaatattgcaaaaaaaacacatttgtatgttaagtcctattgtacaggagaaaaagggttgtttgacaacctttgagaaaaagaaacaaaaggaagtagttaaatgctttggttcacaaatcatttagttgtatatattttttgtcggaattggcctacacagagaaccgttcgtgttgggcttctctctgaacgccccgaaccttgcatcaaggctccttggtgtggccacagcagaccagatgggaaattatttgtgttgagtggaaaaaaatcagtttttgtaaagatgtcagtaacattccacatcgtcctccctttctctaagaggccatctctaagatgtcagatgtagaggagagagagcgagagaacatcttccttctctaccatcactcctgtggcggtcaccaccaccacctctcccgcccttaccagcagaaagcaatgcaaactgagctgctttagtccttgagaaattgtgaaacaaacacaaatatcataaaaggagctggtgattcagctgggtccaggtgaagtgacctgctgttgagaccggtacaaattggatttcaggaaggagactccatcacagccaggacctttcgtgccatggagagtgttggcctcttgtctttcttccctgctttgctgctttgctctctgaaacctacattccgtcagtttccgaatgcgagggcctgggatgaatttggtgcctttccatatctcgttctctctccttcccctgcgtttcctctccatccttcatcctccattggtcctttttttttctttcattttttatttaatttcttttcttcctgtctgttcctcccctaatcctctattttatttttattttttgtaaagccaagtagctttaagataaagtggtggtcttttggatgagggaataatgcatttttaaataaaataccaatatcaggaagccattttttatttcaggaaatgtaagaaaccattatttcaggttatgaaagtataaccaagcatccttttgggcaattccttaccaaatgcagaagcttttctgttcgatgcactctttcctccttgccacttacctttgcaaagttaaaaaaaaggggggagggaatgggagagaaagctgagatttcagtttcctactgcagtttcctacctgcagatccaggggctgctgttgcctttggatgccccactgaggtcctagagtgcctccagggtggtcttcctgtagtcataacagctagccagtgctcaccagcttaccagattgccaggactaagccatcccaaagcacaagcattgtgtgtctctgtgactgcagagaagagagaattttgcttctgttttgtgtttaaaaaaccaacacggaagcagatgatcccgagagagaggcctctagcatgggtgacccagccgacctcaggccggtttccgcactgccacaactttgttcaaagttgcccccaattggaacctgccacttggcattagagggtctttcatggggagagaaggagactgaattactctaagcaaaatgtgaaaagtaaggaaatcagcctttcatcccggtcctaagtaaccgtcagccgaaggtctcgtggaacacaggcaaacccgtgattttggtgctccttgtaactcagccctgcaaagcaaagtcccattgatttaagttgtttgcatttgtactggcaaggcaaaatatttttattaccttttctattacttattgtatgagcttttgttgtttacttggaggttttgtcttttactacaagtttggaactatttattattgcttggtatttgtgctctgtttaagaaacaggcacttttttttattatggataaaatgttgagatgacaggaggtcatttcaatatggcttagtaaaatatttattgttcctttattctctgtacaagattttgggcctctttttttccttaatgtcacaatgttgagttcagcatgtgtctgccatttcatttgtacgcttgttcaaaaccaagtttgttctggtttcaagttataaaaataaattggacatttaacttgatctccaaa

SEQ ID NO: 31150 - DNA, 3113 bp, Homo Sapiens
tcacttaataatatatctactcagagcaagtggctgaaatatcaaaacacatcccaatgcaacgtggctactccaaacagagttgataagagaataactgatggcttctttgctgaggctgtttctgggatgcattttagagacacaagtgaaagacagagtgatgctgtcaatgaaagctctttagactctgtgcatttgcaaatgataaaaggcatgctctatcaacagcggcaggattttagcagtcaagattcggtttccagaaagaaagtactttctctgaatttaaagcagacttctaagacagaggaaattaaaaatgtattaggagggtctacctgctacaactacagtgtaaaggatttacaggagataagtggctctgagctgtgctttccaagtgggcagaaaataaaatctgcttatcttccccaaaggcaaattcacataccagctgtttttcagtctcctgctcattataagcagactttcacatcttgcctcatagaacatctaaatatattgctgtttgggttagcacaaaacctgcagaaagctctttcaaaagttgacatatcattttatacatcattgaagggagagaaactgaaaaacgcagaaaataatgtaccatcctgccatcatagtcaacctgcaaaacttgtcatggttaaaaaggaaggtccaaataagggtcgtctcttttatacatgtgatggacccaaagctgatcgatgtaaattctttaaatggcttgaggacgtgactccaggatattcaacacaggaaggagctcgacctggcatggttttaagtgatattaagagtattggcttatatttaagaagtcaaaagataccactttatgaggaatgccagcttttggtgagaaaaggatttgattttcagagaaaacagtatggcaaactaaagaagtttactactgtaaatcctgagttttataatgaaccaaaaaccaaactttatcttaagctaagtcggaaggaaagatcttcagcttatagcaaaaatgatctttgggtggtttcaaaaaccctagactttgagctggatacttttatcgcatgtagtgctttctttggaccatcatctatcaatgagatagaaatactgcctttgaaaggctatttcccttctaattggcccactaacatggttgtccatgcgttattggtttgtaatgctagcacagaactgactactttgaaaaacattcaggactactttaatccagctactctacctctaacacagtacctgttaacaacgtcttcgccaactatagttagtaacaaaagagtcagtaagagaaaatttatcccaccagccttcacaaatgtcagtacaaaatttgaactactcagcctaggagcaacattgaagttagctagtgagttgattcaggtacacaagttaaacaaggatcaagctacagctctaattcaaatagctcaaatgatggcatcacatgaaagcattgaagaagtgaaggaactgcaaactcataccttccctatcacaatcatacatggtgtgtttggagcaggaaagagttacttgctggcagtggtgattttgttctttgtacagctgtttgaaaagagtgaagctcccaccattggaaatgcaaggccgtggaaacttctgatttcttcttctactaatgtggctgttgacagagtacttcttgggcttctcagtcttggatttgaaaactttatcagagttgggagtgttaggaagattgccaaaccaattttaccttatagcttgcatgctggctcagaaaatgaaagtgaacagttaaaagaactacatgcactaatgaaagaagacctgactcctacggaaagagtctatgtgagaaaaagcattgagcagcataaactggggaccaatagaaccctgctgaagcaggttcgagtagttggagttacctgtgcagcctgcccattcccatgcatgaatgatcttaaatttcctgtagttgtgctggatgagtgtagtcagataactgaaccggcctctctccttcccattgcaaggtttgagtgtgaaaagctgattcttgttggggatcccaaacagctacctcctactattcagggttctgatgcagctcatgaaaatggattggaacaaactctttttgatcgactttgcttaatgggtcacaagccaattctattgagaactcaataccgttgtcatcctgcaatcagtgctattgctaatgatctgttttacaaaggagccctcatgaatggtgtaacagaaatagagcggagccctttattggaatggctaccaaccctgtgtttttataatgttaaaggactagaacagatagaaagagataacagctttcataatgtggcagaagctacgtttacactcaagctgattcaatcactgattgcaagtggaatagcaggctctatgattggtgtgataacattatacaaatcccagatgtacaagctttgtcatttactcagtgctgtggactttcaccatcctgatattaaaactgtgcaggtgtccacagtagatgcttttcagggagctgaaaaggagatcattattctgtcctgtgtaaggacaagacaagtaggattcattgattcagaaaaaagaatgaatgttgcattgactagaggaaagaggcatttgttgattgtgggaaatttagcctgtttgaggaaaaatcaactttggggacgagtgatccaacactgcgaaggaagggaagatggattgcaacatgcaaaccagtatgaaccacagctgaaccatctccttaaagattattttgaaaaacaagtggaagaaaaacagaagaaaaagagtgaaaaagagaaatctaaagataaatctcattcataaaaagacatggtgtaaatattttgtatttatgtaaattcagactcattttacatgatatattttttatatttttattactctaaaccctcttattaaaaatatgatatttaaataacatagtaaacacatgtaaaaattttgttcttcaaaaaagtgtacaaaaggtagtataaaatcctactaataaaaataagcttttttct

SEQ ID NO: 31151 - DNA, 1810 bp, Homo Sapiens
gaaggccctgccgggcggcggcggcggcgacagcgtgcgagccatggtcgcgctggagaaccccgagtgcggcccggaggcggcggagggcaccccgggcgggcggcggctgctgccccttcccagctgcctgcctgccctagccagctcccaggtgaagagactctcggcttccaggcggaaacagcacttcatcaaccaggcagtgcggaactcagacctcgtgcccaaggccaaggggcggaagagcctccagcgcctggagaacacccagtacctcctgaccctgctggagacagacgggggcctgcctggcctggaggatggggacttggcaccccctgcatcaccaggcatctttgccgaggcctgcaacaacgccacctatgtggaggtctggaacgatttcatgaaccgctccggggaggagcaggagcgggttcttcgctacctggaggatgagggcaggagcaaggcgcggaggaggggccctggccgtggggaggaccggaggagagaggaccccgcctatacaccccgcgagtgcttccagcgcatcagccggcgtctgcgagccgtcctcaagcgcagccgcatccccatggaaacgctggagacctgggaggagcggctgcttcggttcttctccgtgtccccccaggccgtgtacacagcaatgctagacaacagcttcgagaggcttctgctgcacgctgtctgccagtacatggacctcatctcggccagtgctgacctggaggggaagcggcagatgaaggtcagtaatcggcacctggatttcctgccgccggggctgctcctgtccgcctacctggagcagcacagctgatggcggccccgcggagaccccgctgccacctcgcccagccatcaagccctccgataccttcggctaaaatatctttcatatttttagaatttgtcctcggaaacctttttcgcttggggtggtctctctcactctgccccctcctcacgcagctcttggcagtcaacagacgctggcggctggggctgcccatgccatcccagctccaagcttcccactccgggacttgtgtttgggtggggagacctgacctgggcatgttcctgtttcttcatcgttgagcttttctggcccggtctgaagctcaagtgaggagggggaggctgggtttttatcacttttaatgaatttggtgtgatttgttgtagatttttaaatttcccttttggagagaaaaaccaaaaaaactcgccccactggtaaaacatgggtcttggtcccagcccctgctcagcccctcccagtttttagcttgaatgagggtggggtctctgggaccctgcccctcatgccagaagcatcttgtgttgtatatgtgtgcgcgcgtgtgccctgagacccaggacagaagccacggtcctaagagccggttttatcctcgtcattctgcgtgtcctcccccacgccacctgtgtcggggctcagggtctcctgctttatatgagcccccttcctttcctcccctcctttatgctgggggtccaggacttccagccagaagcctctgcccttgcactaccttgtctgtcaccccatcccgtgtcccctcgtcccccagcctgactcctgcctgatagctcctgtgtccccatgctggtcctcctggcccaggctgcaggagccaggctggggggcctccgcacccccttgctgcgtgtgggtaattgtgttttgggggaaagtggggaatttaataaatttctggtgctctggcaaaaaaaaaaaaaaaaaaaaaaaaaa

SEQ ID NO: 31152 - DNA, 1186 bp, Homo Sapiens
gggggattgtctattgttctccaaacagtaaaccagtatttcacactgagattgtcggctgcgggtatattccaattccccgtctcctcatgaatatgaagtgaagggctctgaccctggaagtggttctaagcagggcaaaatggggtctcggaagtgtggaggctgcctaagttgtttgctgattccgcttgcactttggagtataatcgtgaacatattattgtatttcccgaatgggcaaacttcctatgcatccagcaataaactcaccaactacgtgtggtattttgaaggaatctgtttctcaggcatcatgatgcttatagtaacaacagttcttctggtactggagaataataacaactataaatgttgccagagtgaaaactgcagcaaaaaatatgtgacactgctgtcaattatcttttcttccctcggaattgctttttctggatactgcctggtcatctctgccttgggtcttgtccaagggccatattgccgcacccttgatggctgggagtatgcttttgaaggcactgctggacgtttccttacagattctagcatatggattcagtgcctggaacctgcacatgttgtggagtggaacatcattttattttccattctcataaccctcagtgggcttcaagtgatcatctgcctcatcagagtagtcatgcaactatccaagatactgtgtggaagctattcagtgatcttccagcctggaatcatttgaataaggacaaaatgttttccattatcaagacatggccatctatctaaatattatatcaactgtgtagacttgagggcaatattgaaatgatggtgctttctgcatttggtgtttatttgtaaaaaatttgcagtcctcactgcacatgcaagtataccacccttccatttagtatgttttttaagtaatatgcatcagaaacttcagaaatacttctgccctttgatcaaacaaatccatttccaagaatctgtactagggaagtaaataagaatatgagagaaacctttatgcaaatatgtatattgcaacattatttaatattctggaaaattggaaacaccccaaaattctaaactcagaggaaggattaagtaaagagtggtacatactgtaaatgttttctgataaaaaaaaaaaaaaaaaaaaaaaaaaaaa

SEQ ID NO: 31153 - DNA, 2208 bp, Homo Sapiens
aacgcacttggcgcgcggcgcgggctgcagacggctgcgaggcgctgggcacaggtgtcctgatggcaaatttcaagggccacgcgcttccagggagtttcttcctgatcattgggctgtgttggtcagtgaagtacccgctgaagtactttagccacacgcggaagaacagcccactacattactatcagcgtctcgagatcgtcgaagccgcaattaggactttgttttccgtcactgggatcctggcagagcagtttgttccggatgggccccacctgcacctctaccatgagaaccactggataaagttaatgaattggcagcacagcaccatgtacctattctttgcagtctcaggaattgttgacatgctcacctatctggtcagccacgttcccttgggggtggacagactggttatggctgtggcagtattcatggaaggtttcctcttctactaccacgtccacaaccggcctccgctggaccagcacatccactcactcctgctgtatgctctgttcggagggtgtgttagtatctccctagaggtgatcttccgggaccacattgtgctggaacttttccgaaccagtctcatcattcttcagggaacctggttctggcagattgggtttgtgctgttcccaccttttggaacacccgaatgggaccagaaggatgatgccaacctcatgttcatcaccatgtgcttctgctggcactacctggctgccctcagcattgtggccgtcaactattctcttgtttactgccttttgactcggatgaagagacacggaaggggagaaatcattggaattcagaagctgaattcagatgacacttaccagaccgccctcttgagtggctcagatgaggaatgagccgagatgcggagggcgcagatgtcccactgcacagctggaatgaatggagttcatcccctccacctgaatgcctgctgtggtctgatcttaagggtctatatatttgcacctcctcattcaacacagggctggaggttctacaacaggaaatcaggcctacagcatcctgtgtatcttgcagttgggatttttaaacatactataaagtctgtgttggtatagtacccttcataaggaaaaatgaagtaatgcctataagtagcaggcctttgtgcctcagtgtcaagagaaatcaagagatgctaaaagctttacaatggaagtggcctcatggatgaatccggggtatgagcccaggagaacgtgctgcttttggtaacttatccctttttctcttaagaaagcaggtactttcttattagaaatatgttagaatgtgtaagcaaacgacagtgcctttagaattacaattctaacttacatattttttgaaagtaaaataattcacaagctttggtattttaaaattattgttaaacatatcataactaatcataccagggtactgcaataccactgtttataagtgacaaaattaggccaaaggtgatttttttttaaatcaggaagctggttactggctctactgagagttggagccctgatgttctgattcttcaaagtcaccctaaaagaagatctgacaggaaagctgtataatgagatagaaaaacgtcaggtatggaaggctttcagttttaatatggctgaaagcaaaggataacgaattcagaattagtaatgtaaaatcttgataccctaatcttgcttctggatctgttctttttttaaaaaaacttccttcaccgcgcctataatcctagcactttgggaggccgaggcaggcagatcacggggtcaggagatcaagaccatcctggctaacatggtgaaaccccgtctctactgaaaatacaaaaaattagccgggtgtggtggcgggcgcctgtagttccagctactcgggaggctgaggcaagagaatggcatgaacccggtaggggagcttgcagtgagcccagatcatgccactgtactccagcctaggtgacagagcaagactctgtctcaaaaacaagcaaacagacttccttcaacaaatatttattaaatatccactttgcaacagcactgaaatggctgtaaggactcctgagatatgtgtccagcaaggagtttacagtcaaacaggagagacatgcctgtagttacatccagtgtgatgggtgctgagaggcaagtacaaaccacgatg

SEQ ID NO: 31154 - DNA, 1079 bp, Homo Sapiens; identical to SEQ ID NO: 26276

SEQ ID NO: 31155 - DNA, 2162 bp, Homo Sapiens
gcggacgtgagcgataatggcggatatggaggatctcttcgggagcgacgccgacagcgaagctgagcgtaaagattctgattctggatctgactcagattctgatcaagagaatgctgcctctggcagtaatgcctctggaagtgaaagtgatcaggatgaaagaggtgattcaggacaaccaagtaataaggaactgtttggagatgacagtgaggacgagggagcttcacatcatagtggtagtgataatcactctgaaagatcagacaatagatcagaagcttctgagcgttctgaccatgaggacaatgacccctcagatgtagatcagcacagtggatcagaagcccctaatgatgatgaagacgaaggtcatagatcggatggagggagccatcattcagaagcagaaggttctgaaaaagcacattcagatgatgaaaaatggggcagagaagataaaagtgaccagtcagatgatgaaaagatacaaaattctgatgatgaggagagggcacaaggatctgatgaagataagctgcagaattctgacgatgatgagaaaatgcagaacacagatgatgaggagaggcctcagctttccgatgatgagagacaacagctatctgaggaggaaaaggctaattctgatgatgaacggccggtagcttctgataatgatgatgagaaacagaattctgatgatgaagaacaaccacagctgtctgatgaagagaaaatgcaaaattctgatgatgaaaggccacaggcctcagatgaagaacacaggcattcagatgatgaagaggaacaggatcataaatcagaatctgcaagaggcagtgatagtgaagatgaagttttacgaatgaaacgcaagaatgcgattgcatctgattcagaagcggatagtgacactgaggtgccaaaagataatagtggaaccatggatttatttggaggtgcagatgatatctcttcagggagtgatggagaagacaaaccacctactccaggacagcctgttgatgaaaatggattgcctcaggatcaacaggaagaggagccaattcctgagaccagaatagaagtagaaatacccaaagtaaacactgatttaggaaacgacttatattttgttaaactgcccaactttctcagtgtagagcccagaccttttgatcctcagtattatgaagatgaatttgaagatgaagaaatgctggatgaagaaggtagaaccaggttaaaattaaaggtagaaaatactataagatggaggatacgccgagatgaagaaggaaatgaaattaaagaaagcaatgctcggatagtcaagtggtcagatggaagcatgtccctgcatttaggcaatgaagtgtttgatgtgtacaaagccccactgcagggcgaccacaatcatctttttataagacaaggtactggtctacagggacaagcagtctttaaaacgaaactcaccttcagacctcactctacggacagtgccacacatagaaagatgactctgtcacttgcagataggtgttcaaagacacagaagattagaatcttgccaatggctggtcgtgatcctgaatgccaacgcacagaaatgattaagaaagaagaagaacgtttgagggcttccatacgtagggaatctcagcagcgccgaatgagagagaaacagcaccagcgggggctgagcgccagttacctggaacctgatcgatacgatgaggaggaggaaggcgaggagtccatcagcttggctgccattaaaaaccgatataaagggggcattcgagaggaacgagccagaatctattcatcagacagtgatgagggatcagaagaagataaagctcaaagattactcaaagcaaagaaacttaccagtgatgaggaaggtgaaccttccggaaagagaaaagcagaagatgatgataaagcaaataaaaagcataagaagtatgtgatcagcgatgaagaggaagaagatgatgattgaagtatgaaatatgaaaacattttatatattttattgtacagttataaatatgtaaacatgagttattttgattgaaatgaatcgatttgcttttgtgtaattttaattgtaataaaacaatttaaaagcaaaaaaaaaaaaaaaa

SEQ ID NO: 31156 - DNA, 2099 bp, Homo Sapiens
gtccgttggtcggtcgggaacgaggctcaggcggccaggcccgcgcggagccgttgccatggcagccgccgccggggacgcggacgacgagccgcgctcaggccactcgagctcggagggcgagtgcgcggtggcgccggagccgctgactgacgctgagggcctcttctccttcgctgacttcgggtctgcgctgggcggcggcggcgcgggcctctcgggccgggcgtccggcggggcccagtcgccgctgcgctacttgcacgtcctgtggcagcaggatgcggagccgcgcgacgagctgcgctgcaagatacccgctggccggctgaggcgcgctgccaggccccaccggcggctcgggcccacgggcaaggaggtgcacgctctgaagagactgagggactcggccaatgccaatgatgtggaaacagtgcagcagctgctggaagatggcgcggatccctgtgcagctgatgacaagggccgcacagctctacactttgcctcatgcaatggcaatgaccagattgtgcagctgctcctggaccatggtgctgatcctaaccagcgagatgggctggggaacacgccactgcacctggcggcctgcaccaaccacgttcctgtcatcaccacactgctacgaggaggggcccgtgtagatgccctggaccgagctggtcgcacacccctgcacctggccaagtcaaagctgaatatcctgcaggagggccatgcccagtgcctagaggctgtgcgtctggaggtgaagcagatcatccatatgctgagggagtatctggagcgcctagggcaacatgagcagcgagaacgcctggatgacctctgcacccgcctgcagatgaccagtaccaaagagcaggtggatgaagtgactgacctcctggccagcttcacctccctcagtctgcagatgcagagcatggagaagaggtagcaagagaggctccctgccttcctgccactgccccaccctgccccactgctgtctcagtaccaagaaaaagcccaacatctgggacttggagctgcacttgtctggtgaggaccttgccctcacccgcacatgccgtggggcagagatgctctctctccacggcctcagagccactcccagccacagtttccagcatctctgtggacagggaccacagctcccagcttcttccagttctcgcagcaccagaccagcctctgcagctgcacttcagctccgcagacctgcgctatctcagcagacctcacttgccccatggccttcatggcgcgctccaggcctcagacccttctctgtgttccgtcctggccatgggcttgttgcagtcagcaggtgtgggcttaggcgggcaccctgtggccaggggtactgcgtgaggccctcagttggtcctgtgcctctcaccagcacttagacagacacgtcaccagactttcaaggagatactgcagtgagtttctctggttggaaggggagggttggtgagtcccagaccttaaaaatacaaggttaagagggaccccaaagcaaaaaattccaacccttttcctcccagtcattgaaacaccaaaactattataccggagggtgtaatagttttgctgcccagttgtggtaggccagtagtggcctcccaagatgcccatgtcctaatcccaggaacctgtcaaaattaccttgtatggccaaaggggctttgcagatgtaatgaagttaaggatctttcgccaggaagattatcccagcttgttcaggagggcttgatgtcctcacccgggtctgtataacagaagagcaggtgacgggagaggaggttggaggtgtagcgatggagcaggaaactggagttgaggagggcagctcaagccacagagtccaggccacctcagagccaggaaatgcatcctcccacagagccctggaaggccccagccctgctcccacctggactggctcagtgaggctaattttataattctggctgattttagaactctaagggaataaatttgtgttgttttaagtcaaaaaaaaaaaaaaaaaaaaaaaaaaaaaaaaaaaaaaaaaaaaaaaaaaa

SEQ ID NO: 31157 - DNA, 3804 bp, Homo Sapiens
ggccttccccgcgcagagctccgaccgcgggcggcccaggggcgggcgcgccgctgcatccccatcctcgtcgtcgcccggcacagcgcgagcgggcgagcggcgcgggcggccggagcgccgaggcccggccatggccaccaccagcaccacgggctccaccctgctgcagcccctcagcaacgccgtgcagctgcccatcgaccaggtcaactttgtagtgtgccaactctttgccttgctagcagccatttggtttcgaacttatctacattcaagcaaaactagctcttttataagacatgtagttgctacccttttgggcctttatcttgcacttttttgctttggatggtatgccttacactttcttgtacaaagtggaatttcctactgtatcatgatcatcataggagtggagaacatgcacaattactgctttgtgtttgctctgggatacctcacagtgtgccaagttactcgagtctatatctttgactatggacaatattctgctgatttttcaggcccaatgatgatcattactcagaagatcactagtttggcttgcgaaattcatgatgggatgtttcggaaggatgaagaactgacttcctcacagagggatttagctgtaaggcgcatgccaagcttactggagtatttgagttacaactgtaacttcatggggatcctggcaggcccactttgctcttacaaagactacattactttcattgaaggcagatcataccatatcacacaatctggtgaaaatggaaaagaagagacacagtatgaaagaacagagccatctccaaatactgcggttgttcagaagctcttagtttgtgggctgtccttgttatttcacttgaccatctgtacaacattacctgtggagtacaacattgatgagcattttcaagctacagcttcgtggccaacaaagattatctatctgtatatctctcttttggctgccagacccaaatactattttgcatggacgctagctgatgccattaataatgctgcaggctttggtttcagagggtatgacgaaaatggagcagctcgctgggacttaatttccaatttgagaattcaacaaatagagatgtcaacaagtttcaagatgtttcttgataattggaatattcagacagctctttggctcaaaagggtgtgttatgaacgaacctccttcagtccaactatccagacgttcattctctctgccatttggcacggggtatacccaggatattatctaacgtttctaacaggggtgttaatgacattagcagcaagagctatgagaaataactttagacattatttcattgaaccttcccaactgaaattattttatgatgttataacatggatagtaactcaagtagcaataagttacacagttgtgccatttgtgcttctttctataaaaccatcactcacgttttacagctcctggtattattgcctgcacattcttggtatcttagtattattgttgttgccagtgaaaaaaactcaaagaagaaagaatacacatgaaaacattcagctctcacaatccaaaaagtttgatgaaggagaaaattctttgggacagaacagtttttctacaacaaacaatgtttgcaatcagaatcaagaaatagcctcgagacattcatcactaaagcagtgatcgggaaggctctgagggctgttttttttttttgatgttaacagaaaccaatcttagcaccttttcaaggggtttgagtttgttggaaaagcagttaactggggggaaatggacagttatagataaggaatttcctgtacaccagattggaaatggagtgaaacaagccctcccatgccatgtccccgtgggccacgccttatgtaagaatatttccatatttcagtgggcactcccaacctcagcacttgtccgtagggtcacacgcgtgccctgttgctgaatgtatgttgcgtatcccaaggcactgaagaggtggaaaaataatcgtgtcaatctggatgatagagagaaattaacttttccaaatgaatgtcttgccttaaaccctctatttcctaaaatattgttcctaaatggtattttcaagtgtaatattgtgagaacgctactgcagtagttgatgttgtgtgctgtaaaggattttaggaggaatttgaaacaggatatttaagagtgtggatatttttaaaatgcaataaacatctcagtatttgaagggttttcttaaagtatgtcaaatgactacaatccatagtgaaactgtaaacagtaatggacgccaaattataggtagctgattttgctggagagtttaattaccttgtgcagtcaaagagcgcttccagaaggaatctcttaaaacataatgagaggtttggtaatgtgatattttaagcttattctttttcttaaaagagagaggtgacgaaggaaggcaggaatgaagaagcactgcgtggcctccggtggaatgcacggggcacagccgcgactctgcaggcagcttcccccccatgccagggctctgcgccgtcatgtgagacttaaaaaaaaagttgaatgacttcgtgatactttggacttctaaattaaatttatcaggcataaattatgtagaattagaggctttgaaaataatactggtaggttgctcaaaggttttgaaagagaaatcgctaggtaggttactatctggctaatccatttcttatccttgacaatttaattcatatttgggaaacttttagggaaatgaaaaataaaagtcactgagtctgggtgacattttttaagaataatataaattcagtttcaaactcttctcacattaaaattttgctgtgaactcttactaaaatgagttttaggttctgtaagtggaaaaatgtgcttttattttatgggccatttttaccacaactaatcttgccttggattactaagcatctcctgcgatcccacagaggactgtggtggccacaggagctgaaagcagaagagtgggatttgatgccaggcagtggagtggcctcagccccagattgtacctcctgccctgtaggaggggagggggcaaagccttctgacttcacctttgtttgacctatgtatggaacttacttttactttttgccttaaatttttaatgaaatgcaaattttctgtgatggggttctctctctctttttttcggggggtggagtcactaataaatttgcaaatgaagttaaagacaaggcaaccatctggcttatgctatataatacttcatttaaagaagaaaggaaaagcaaatgcacttgcagcttttgaggtctcagcaaaaatgggcatgtgtcttttttgaagtttagaaatatcctaatctatttttatttatctaaaagtaagtgttttccggctgataaggctaaccctacccaggaaaggattgataactaaataaatttcctctgttttcccatgcattgaaattatgttggctgagcatggtggctcacacctgtaatcctagcactttgggaggccgaggtgggcggatcacttgaggtcaggagttggagaccagcctggccaacgtggtgaatccccgtctctactgaaaacacaaaaattagacgggcatggtggcgcacacctgtaatcccagctacttgggaggctgaggcaggagaattgcttgaacctgggaggtggaggttgcagtgagctaaaattgtgccactgcactccagcctgggtgacagaggaagactccgtctcac

SEQ ID NO: 31158 - DNA, 2205 bp, Homo Sapiens
gagagaaggtgtctcaggtctcgggcgcgggagggggtggcggagaggacagggagattccccagcgctggctctgaaatctggggcaggctttccttgccttactgccaatcccaactgtgcctggtagggtttgtccctggcgtcaaaggtaggaacagctgagcccttagatgtacccctgacggcgagagcccaggagtgggcgtttcacttttcctgcgtttggggagtccctgaggctatgccctttgacctttgacatgtgtgcagcttctgcttctccagataatctggtattccatatgaaaaatgagatgagaaacatcaagtacaaaccagtagactatcaacaattgcgtgcattaactgaagcaaagaaattggcttctgcctctgcaaagctaaagatcagaaaagcaatgttgacttcaaagttatccaaagaacaaacactaataaaacaacacaagcaagtgtggtggcaggaataccagaggctgaatgaagtcagatgtaaaatggaatctgaaataaaatcccttctcaatgaagagaacattggaaatgaatgtctttgtgaccttacaaattttgagcaagagctatcagaacaacagtgcacatatcttaaaaatgtaataaatcctattcagcagctgagagcagatctaaaatacagacagcatcacactttgcagcattcacacccacatattgagtttaactccatgaaagtattggaagaggttgactttgtgaagaaacaattgaaaactgtctttgaaagacttaggctggagcaacagagaatagaaaatgatctttcagactggagtataaagattctagatcattctttggaagaaaagactaacccgcttagtgaactgcccattgaattagaaagtttggaatgcccataccctgatttgaaatcttcaattctcagtgagttctataagtttacacagaaatatcagaagaagcttcaagactttaatctgcagttggaagacatatacagaaactgtcaactaagtgaagaagaccactggatttaccaggctattttggatcagtaccctggagatctctttggaagaaggactctgtatctggacatgttacaaagatattttcctcacaaatctaggcatgatttggttgaacacgagaaatattgtgaccaatatcgctttgctatagagcagcaaaatatcctgatatcaaattggaataaaaataggaaagactttatacagaaggctgtgctgacactcactgaggcttgtgcaacacatgaaatggagagcatgttggctaaggacaagaaaaagcaacaggaattgtgtgctgatctgaaagccaaggttcgtcaatggcgagcccaccaagaagaggtagcaagactggaaatggaaatttctgccagaagaagagaaaaggaagaggagaaagagaaactgtggaagaagaaggaattgttgcaaagagcagagaagaaaaaaaaaataaaaaaatactgggccaagaaaaaacagaagtggcaagaaatggaaatgagagatcttcagcgtctagaagaactgaagaaattaatcgctgaacagtcactaaaagacagagaaagggttaaatatagacaagaattattggaaaggcgtttgatggagaaaaaggaagtggcccttcaagaagctcatgaagacaaagagagagcacggcggctagaagcccttaggaaacaggttgctgttgttgctcaatttgatcctgttagaatgatgtcagatacaatggcatcaaaagctagaatgggcattgaaattgaagaagaatttattcttcaaaagccactcttcacattgaatacatacaatgaacagcagataatttctgaccctagacttcgcttcgagttagcacttcgagaagctggacttcatagaacactttatgctaaagagatattaccaaaaattagtcctcaaaaacctccaagaaaggacatggagtctactgtatttaaaatatagagctcatcctcaaattctatatgtaaagagcatttttctttgaaaacatgtatatggataataataattactactttctaaaatgtttgaaatatcagacatagaaatcatagcatctattaaaacaactttgcctttcttttgtgaaaaaaaaaaaaaaaaaaaa

SEQ ID NO: 31159 - DNA, 2156 bp, Homo Sapiens
gactttgcagatttctcttcccccaggcctccctcctccacctctccgccccctccgggcttggctctcccaggaggctacgactggagccactggtcccgcaggatccccgcgtcctcggtcgccgcgtccacgtccctctcgcgtccccgcccggcgccacgccgcctccctctgggttcggcctccgcgcggtgcagcgcagttctcaggccgcgggacaagcccgacttaaatctctgcaatggctaacgaagcttatccttgtccgtgtgacattggccacagacttgagtatggagggctaggccgtgaagttcaagtcgagcacatcaaggcttatgtcaccaaatcccccgttgatgcaggcaaagctgtgattgtcattcaagatatatttggctggcagttgcccaataccagatatatagctgacatgatctcaggaaatggatacacaaccattgttccagacttctttgtagggcaagagccttgggacccctctggcgactggtctatcttccctgagtggctgaaaacaagaaatgcccagaagatcgatagagagatcagtgctatcttgaagtatctgaaacaacagtgtcatgcccagaaaattggcatcgtgggattctgctggggtggaactgctgtccatcatttgatgatgaaatactcagaattcagggcaggggtgtccgtctatggcattgtcaaggattctgaagacatttacaatttaaagaaccccactttgttcatttttgctgaaaatgatgttgtgattccactcaaggacgtatctttgctgactcagaagttgaaagaacactgcaaagttgaatatcaaattaaaacattttctgggcagactcatgggttcgtgcatcggaagagagaagattgctcacctgcagacaagccctacattgacgaggccagaaggaatttaattgagtggctgaacaagtacatgtagcaagaatcaagggcaagccttcctagaatagctttcatcccaaaatttgcttggaaatagttagatcatttgatttaattttcacttttataaaataagtgtaggaatcctaaaattgattatttcatttgaaacacaaattcagtaggacgtaatgcatgaaataatttaatttttgacatgtacatcgaatcataatttaaaaacaaggtctgaccaggtgtagtgcctcatgcctgtaattccagcactttgggaggccaaagtgggtggatcacctgaggtcaggagtttgagaccagcctggccaacatggtgagaccccatctctacaaaaaatacaaaaattagcctggtgtggtggtgcacacctgtagtcccagctacttgggaggctgaggcacaggaatcaatagaaccccaggaggtggagactgcagtgagccaagattgtgccactactgtactctagcctgggcagcagagtgagaccctgtctcaaaaataaataagtaaataaataaataaataaaataaaaaccaggtcagtacctggagaatttgaatgatagagaatgatagagtaataccctaattattagttaaaacctacaggccgggtgyggtggctcacgcctgtaatcccagcactttgggaggccgaggtgggtggatcacttgaggtcaggagttcaagaccagcctggccaacatggtgaaaccccatctctactaaaaatataaaaatcagccgggcatggtggcatgtgcctgtaatcccagctactcaggagtctgaggaggagaatcacttgaacctggaggcagaggttgcagtgagtcgaggttgcgctactgcactccagcctggacaacagagggagactctgtctcaaaaaaaaaaaacctacagctgttcaaggaccagctgacaggtcaagtgtggccttttctggtctttgaacacatcatagaaagtgacaaatgctgcaaagccatgaagaacatgaactataaacgggtagactaactgcccagcttagacacttatctatgccacaaaacagctgaatttgtcacatttatatattgcaatatgggaagtattgagatcaaaacaggattccattgacctaattatattaagctaataaactaattttttgaatttttg

SEQ ID NO: 31160 - DNA, 3609 bp, Homo Sapiens
tcaaggacgcatcacctaatgccgcggtcacggccaccgtcacaagcgcccccagccccaccccaccccggcctgcccgccgtccttctcccgcccccgcccctgcctgccagctccaccgggccgtaggtgcggacgacctcaaaattcctcggcccgcgaaggccgccagctgcggggaggggaggggaggcgcggtcccgcagcgcccccaggctcatgtcccaggtatgtccagacccccgaggcaccgcttgcagggcagtgacagcccgtgaggctcggcctcgacccctggcacccttggtcccagctacgccggctcctggccttcccccaagtccgagagagaggtgggattctccccgacgcagttggaaaccgggaatcccctttagggtcccgttcgtgctgcactactgactccaccatctgcaaagggattcttgtccagaatccccgaaggctttaggacagcgcttattttgttgaatgaagagtctctaattttcggaaagaccacaggctaaaagtcaagttgtgcctttttagccaagaagcatggaagtcattcacggcaggccctactgttgcagggagcttgaaggagctgacatactgtccaacaccttttactctaatgaattgcacaaccccctccagacggttactcgcccaactgcctcagaggacaggtatcaggaattaagggagtcacttcaacaatgtaggcttccttggggcgctgaaagagagtatggtgggataataccgatttcactccccgaggaccacaggccaaagtatgagcctcctcgtgtcatgggcaaaggacatcagcattatggatttggtggagaaacctggccaagaaagcttcctgttgaacaattttattatttgacccagaacaaaaaaagtgatgtctatggaaatgattctttgatacccaagccgcctaattcaacagtaggagagatctgcttgccatatccaattgaacacccctaccacacacacatctgtcgcggcgccatgttccccaccttcacgtcacctgaggacctctacacgggcattaaagcccgcacccagcagccctttcctcccacggtgccaaccaaggcttatgattcaacagttttgaagacaagaggtaatccttatagatatgaactgattgatattcccatggattcaaagaagaaagcactgacttggccaggtcaaggtgtatattatgattttcccagaggtgttgagaaaaataagccagtattctacccaaaacctcctaaaaccttcgctcctaacacttctttaaattcatgggaccctatttgctctgccaaagaagccaacatacaaagaaatcttgagaggtcccactggctcacttcgtacactcatgattttacaggtctggggcccatggacccccttgaactggatgattaccatgaaaagatggtagcagagttaacacgaaagataggatttgacccagagccgcaagaaaaattccaccctgtcttcaaacctcccagaccgttggaaggacgaattgcccgattaattcagaaccgacgttctctggaggctatagtccagcaaagaccacgttcctgtccagattgtactcctagagttttgtgtaattttcatacctttgtacccagttctaaagaaatggtggcacttagtgataacataccagccggtgtgacccataaaaaccaggatattgaagagaagatcatagaagaacagagcttgctgtctacctatgaactcccatcttgttacccaacaaaagacctaactagcatttatgacataaagccatttccaaaaatcacagatactaaaaagacagaagatttatactggagacagcagtcactaaaaacccaacccacaccttactgtaaaccagaccactggattcactatgaaaatcttaaatctcccctacgtgatcagtataatatgtgtccagaccctgttagccttagtaaacctagtgttttacaaaataaacaagacacggaagctttcactttagaacattttttaagtaagccagaagaagagttgttcttgaatatggaaaacaatgaagaaacaagacctgttcttggttggattcctagagctggagtgaccaaacctcagaccaacctgctggagcttaagaactctttttcaaaaactggtgcacaaaagcgtttccataaatcaattctagaagaccataaagacctcagggataatgagcattcggggatgaagcaccaattctatggccataattcctattatttctataattgagatactcattcttcccttcaaaacccagcctcttgcaagaagctaaaaaatataacagaatttccttcgtattgctggattctgttttctagattaaaccacaaggaccttgttagtgaggtttacattttcaggaatttaagttagtatctggttggaggaacccagaaaaggtgatgttatgacttcttgaaaagtttaacaatttggcaataaaatattagaactagaaaaatttatagtctttaatctctcatcttcagattatacaaggaaattttccaaaatcacaaaaagcaatgtgtacaacaaagtttacatcattgtttcaccaaaaaaaattgaaaagctggaaagaactcaaatgatcaataattaatgaatgactatacaaattatagtatcttaataaaaatgagaacactgtccctttatgtaaatttttgtacatagtagcattaggtagaaaagacaaaacccaaacacctagttaattgagggatggacacctctaaaaactatattgtcttaaaagtatgtggactctgttcctttatgtaaacatgtaaagaaaataagtcagcgaaaaaaatgaaacccaaaactctctgcatgtacacattacaaattgaattgtttgcttacccttaaccttctgattgagaaacataactgtttcttttatgcagataaaattattttactgaagatctagcaatggccttaattagcaactggtgagttctaattatagcaagaaaggatggcttggtatcagttattacagagccccaaatcttcatttctggagtgtgttctctaagagtttggctaactcccatatgcaagtcaattcatttaatgtgccaagaggtagattttaaacatagtctatcgtggaagttcaagaggaatttctttaagtattttgtgaatatttattttaattttatgaccaacatgtcatttggttgtaacctccttaaaactattctgggctaaagttagagaatttttttccaactgcattctgtacagcactagttacattatgacaggaagtaaaagtttacatggtgaaataatactggggaaatcggagcaacaatgtcagttgcatgccttggtcactgggttctctatagcctttaatatgtaatgcaattgggagtgtctgaagtgagggagatatagtgtacacactttttatcacagagtagatcactggaatggaattccaaataataaactttggaaggtgtaactctccagtat

SEQ ID NO: 31161 - DNA, 6074 bp, Homo Sapiens
aagggagctcagtaagtcacttctgggcgactgttgttttatttccggtctatgggacccggctgcgatttgctgctgcggacagcagctaccatcactgctgccgccatcatgtcagacacggacagcgacgaagattccgctggaggcggcccattttctttagcgggtttccttttcggcaacatcaatggagccgggcagctggagggggaaagcgtcttggatgatgaatgtaagaagcacttggcaggcttgggggctttggggctgggcagcctgatcactgaactcacggcaaatgaagaattgaccgggactgacggtgccttggtaaatgatgaagggtgggttaggagtacagaagatgctgtggactattcagacatcaatgaggtggcagaagatgaaagccgaagataccagcagacgatggggagcttgcagcccctttgccactcagattatgatgaagatgactatgatgctgattgtgaagacattgattgcaagttgatgcctcctccacctccacccccgggaccaatgaagaaggataaggaccaggattctattactggtgagaaagtggacttcagtagttcctctgactcagaatctgagatgggacctcaggaagcaacacaggcagaatctgaagatggaaagctgacccttccattggctgggattatgcagcatgatgccaccaagctgttgccaagtgtcacagaactttttccagaatttcgacctggaaaggtgttacgttttctacgtctttttggaccagggaagaatgtcccatctgtttggcggagtgctcggagaaagaggaagaagaagcaccgtgagctgatacaggaagagcagatccaggaggtggagtgctcagtagaatcagaagtcagccagaagtctttgtggaactacgactacgctccaccaccacctccagagcagtgtctctctgatgatgaaatcacgatgatggctcctgtggagtccaaattttcccaatcaactggagatatagataaagtgacagataccaaaccaagagtggctgagtggcgttatgggcctgcccgactgtggtatgatatgctgggtgtccctgaagatggcagtgggtttgactatggcttcaaactgagaaagacagaacatgaacctgtgataaaatctagaatgatagaggaatttaggaaacttgaggaaaacaatggcactgatcttctggctgatgaaaacttcctgatggtgacacagctgcattgggaggatgatatcatctgggatggggaggatgtcaaacacaaagggacaaaacctcagcgtgcaagcctggcaggctggcttccttctagcatgactaggaatgcgatggcttacaatgttcagcaaggttttgcagccactcttgatgatgacaaaccttggtactccatttttcccattgacaatgaggatctggtatatggacgctgggaggacaatatcatttgggatgctcaggccatgccccggctgttggaacctcctgttttgacacttgatcccaatgatgagaacctcattttggaaattcctgatgagaaggaagaggccacctctaactccccctccaaggagagtaagaaggaatcatctctgaagaagagtcgaattctcttagggaaaacaggagtcatcaaggaggaaccacagcagaacatgtctcagccagaagtgaaagatccatggaatctctccaatgatgagtattattatcccaagcaacagggtcttcgaggcacctttggagggaatattatccagcattcaattcctgctgtggaattacggcagcccttctttcccacccacatggggcccatcaaactccggcagttccatcgcccacctctgaaaaagtactcatttggtgcactttctcagccaggtccccactcagtccaacctttgctaaagcacatcaaaaaaaaggccaagatgagagaacaagagaggcaagcttcaggtggtggagagatgttttttatgcgcacacctcaggacctcacaggcaaagatggtgatcttattcttgcagaatatagtgaggaaaatggacccttaatgatgcaggttggcatggcaaccaagataaagaactattataaacggaaacctggaaaagatcctggagcaccagattgtaaatatggggaaactgtttactgccatacatctcctttcctgggttctctccatcctggccaattgctgcaagcatttgagaacaacctttttcgtgctccaatttatcttcataagatgccagaaactgatttcttgatcattcggacaagacagggttactatattcgggaattagtggatatttttgtggttggccagcagtgtcccttgtttgaagttcctgggcctaactccaaaagggccaatacgcatattcgagactttctacaggtttttatttaccgccttttctggaaaagtaaagatcggccacggaggatacgaatggaagatataaaaaaagcctttccttcccattcagaaagcagcatccggaagaggctaaagctctgcgctgacttcaaacgcacagggatggactcaaactggtgggtgcttaagtctgattttcgtttaccaacggaagaagagatcagagctatggtgtcaccagagcagtgctgtgcttattatagcatgatagctgcagagcaacgactgaaggatgctggctatggtgagaaatccttttttgctccagaagaagaaaatgaggaagatttccagatgaagattgatgatgaagttcgcactgccccttggaacaccacaagggccttcattgctgccatgaagggcaagtgtctgctagaggtgactggggtggcagatcccacggggtgtggtgaaggattctcctatgtgaagattccaaacaaaccaacacagcagaaggatgataaagaaccgcagccagtgaagaagacagtgacaggaacagatgcagaccttcgtcgcctttccctgaaaaatgccaagcaacttctacgtaaatttggtgtgcctgaggaagagattaaaaagttgtcccgctgggaagtgattgatgtggtgcgcacaatgtcaacagaacaggctcgttctggagaggggcccatgagtaaatttgcccgtggatcaaggttttctgtggctgagcatcaagagcgttacaaagaggaatgtcagcgcatctttgacctacagaacaaggttctgtcatcaactgaagtcttatcaactgacacagacagcagctcagctgaagatagtgactttgaagaaatgggaaagaacattgagaacatgttgcagaacaagaaaaccagctctcagctttcacgtgaacgggaggaacaggagcggaaggaactacagcgaatgctactggcagcaggctcagcagcatccggaaacaatcacagagatgatgacacagcttccgtgactagccttaactcttctgccactggacgctgtctcaagatttatcgcacgtttcgagatgaagaggggaaagagtatgttcgctgtgagacagtccgaaaaccagctgtcattgatgcctatgtgcgcatacggactacaaaagatgaggaattcattcgaaaatttgccctttttgatgaacaacatcgggaagagatgcgaaaagaacggcggaggattcaagagcaactgaggcggcttaagaggaaccaggaaaaggagaagcttaagggtcctcctgagaagaagcccaagaaaatgaaggagcgtcctgacctaaaactgaaatgtggggcatgtggtgccattggacacatgaggactaacaaattctgccccctctattatcaaacaaatgcgccaccttccaaccctgttgccatgacagaagaacaggaggaggagttggaaaagacagtcattcataatgataatgaagaacttatcaaggttgaagggaccaaaattgtcttggggaaacagctaattgagagtgcggatgaggttcgcagaaaatctctggttctcaagtttcctaaacagcagcttcctccaaagaagaaacggcgagttggaaccactgttcactgtgactatttgaatagacctcataagtccatccaccggcgccgcacagaccctatggtgacgctgtcgtccatcttggagtctatcatcaatgacatgagagatcttccaaatacataccctttccacactccagtcaatgcaaaggttgtaaaggactactacaaaatcatcactcggccaatggacctacaaacactccgcgaaaacgtgcgtaaacgcctctacccatctcgggaagagttcagagagcatctggagctaattgtgaaaaatagtgcaacctacaatgggccaaaacactcattgactcagatctctcaatccatgctggatctctgtgatgaaaaactcaaagagaaagaagacaaattagctcgcttagagaaagctatcaaccccttgctggatgatgatgaccaagtggcgttttctttcattctggacaacattgtcacccagaaaatgatggcagttccagattcttggccatttcatcacccagttaataagaaatttgttccagattattacaaagtgattgtcaatccaatggatttagagaccatacgtaagaacatctccaagcacaagtatcagagtcgggagagctttctggatgatgtaaaccttattctggccaacagtgttaagtataatggacctgagagtcagtatactaagactgcccaggagattgtgaacgtctgttaccagacattgactgagtatgatgaacatttgactcaacttgagaaggatatttgtactgctaaagaagcagctttggaggaagcagaattagaaagcctggacccaatgaccccagggccctacacgcctcagcctcctgatttgtatgataccaacacatccctcagtatgtctcgagatgcctctgtatttcaagatgagagcaatatgtctgtcttggatattcccagtgccactccagaaaagcaggtaacacaggaaggtgaagatggagatggtgatcttgcagatgaagaggaaggaactgtacaacagcctcaagccagtgtcctgtatgaggatttgcttatgtctgaaggagaagatgatgaggaagatgctgggagtgatgaagaaggagacaatcctttctctgctatccagctgagtgaaagtggaagtgactctgatgtgggatctggtggaataagacccaaacaaccccgcatgcttcaggagaacacaaggatggacatggaaaatgaagaaagcatgatgtcctatgagggagacggtggggaggcttcccatggtttggaggatagcaacatcagttatgggagctatgaggagcctgatcccaagtcgaacacccaagacacaagcttcagcagcatcggtgggtatgaggtatcagaggaggaagaagatgaggaggaggaagagcagcgctctgggccgagcgtactaagccaggtccacctgtcagaggacgaggaggacagtgaggatttccactccattgctggggacagtgacttggactctgatgaatgaggcttcctttgggcctccttggtcagccttccctgttctccagcctaggtggttcacctttccccaatttgttcatatttgtacagtatctgatcctgaaatcatgaaattaactaacaccttagcctttttaaaagtagtaagtaaatgataataaatcacctctcctaatcttcctggggcaatgtcaccctttgatttaaaacaaagcaaccccctttcccctaccactacggaaaagagcaagctcatttttccgtgtcctcctttatttaactccatttattgcttttggtataatttttccctggggaaggaggggaaattatgaaagaactagtaactttatgtcctcttgatgtattaggaaatttccggccaggcgtggtggctcacacctgtaa

SEQ ID NO: 31162 - DNA, 3630 bp, Homo Sapiens
ggtattccagaagtgtttgaggatcccttccatgaaggaagagaggaaagtttttaagtaaacctcccactcccatgtgtcttcagctttcttttgcaaaggagaaaatccttgaagtttggtaaagaccgagttagtctatctctctttgcctatctcgagttgggctggggagaggaggagataggttcttttgtctttttctgtcttctcccttccccacttccttccctccagtccccactcactcacatgcacacactaaccttggagccgatgggattgagtgactggcacttgggaccacagagaaatgtcagagtgtttggttacagactcaaggaaacctctcattttagagtgctcatttggttttgagcaaaattttggactgtgaagcaaggcattggtgaagacaaaatggcctcgccggctgacagctgtatccagttcacccgccatgccagtgatgttcttctcaaccttaatcgtctccggagtcgagacatcttgactgatgttgtcattgttgtgagccgtgagcagtttagagcccataaaacggtcctcatggcctgcagtggcctgttctatagcatctttacagaccagttgaaatgcaaccttagtgtgatcaatctagatcctgagatcaaccctgagggattctgcatcctcctggacttcatgtacacatctcggctcaatttgcgggagggcaacatcatggctgtgatggccacggctatgtacctgcagatggagcatgttgtggacacttgccggaagtttattaaggccagtgaagcagagatggtttctgccatcaagcctcctcgtgaagagttcctcaacagccggatgctgatgccccaagacatcatggcctatcggggtcgtgaggtggtggagaacaacctgccactgaggagcgcccctgggtgtgagagcagagcctttgcccccagcctgtacagtggcctgtccacaccgccagcctcttattccatgtacagccacctccctgtcagcagcctcctcttctccgatgaggagtttcgggatgtccggatgcctgtggccaaccccttccccaaggagcgggcactcccatgtgatagtgccaggccagtccctggtgagtacagccggccgactttggaggtgtcccccaatgtgtgccacagcaatatctattcacccaaggaaacaatcccagaagaggcacgaagtgatatgcactacagtgtggctgagggcctcaaacctgctgccccctcagcccgaaatgccccctacttcccttgtgacaaggccagcaaagaagaagagagaccctcctcggaagatgagattgccctgcatttcgagccccccaatgcacccctgaaccggaagggtctggttagtccacagagcccccagaaatctgactgccagcccaactcgcccacagagtcctgcagcagtaagaatgcctgcatcctccaggcttctggctcccctccagccaagagccccactgaccccaaagcctgcaactggaagaaatacaagttcatcgtgctcaacagcctcaaccagaatgccaaaccagaggggcctgagcaggctgagctgggccgcctttccccacgagcctacacggccccacctgcctgccagccacccatggagcctgagaaccttgacctccagtccccaaccaagctgagtgccagcggggaggactccaccatcccacaagccagccggctcaataacatcgttaacaggtccatgacgggctctccccgcagcagcagcgagagccactcaccactctacatgcaccccccgaagtgcacgtcctgcggctctcagtccccacagcatgcagagatgtgcctccacaccgctggccccacgttccctgaggagatgggagagacccagtctgagtactcagattctagctgtgagaacggggccttcttctgcaatgagtgtgactgccgcttctctgaggaggcctcactcaagaggcacacgctgcagacccacagtgacaaaccctacaagtgtgaccgctgccaggcctccttccgctacaagggcaacctcgccagccacaagaccgtccataccggtgagaaaccctatcgttgcaacatctgtggggcccagttcaaccggccagccaacctgaaaacccacactcgaattcactctggagagaagccctacaaatgcgaaacctgcggagccagatttgtacaggtggcccacctccgtgcccatgtgcttatccacactggtgagaagccctatccctgtgaaatctgtggcacccgtttccggcaccttcagactctgaagagccacctgcgaatccacacaggagagaaaccttaccattgtgagaagtgtaacctgcatttccgtcacaaaagccagctgcgacttcacttgcgccagaagcatggcgccatcaccaacaccaaggtgcaataccgcgtgtcagccactgacctgcctccggagctccccaaagcctgctgaagcatggagtgttgatgctttcgtctccagccccttctcagaatctacccaaaggatactgtaacactttacaatgttcatcccatgatgtagtgcctctttcatccactagtgcaaatcatagctgggggttgggggtggtgggggtcggggcctgggggactgggagccgcagcagctccccctcccccactgccataaaacattaagaaaatcatattgcttcttctcctatgtgtaaggtgaaccatgtcagcaaaaagcaaaatcattttatatgtcaaagcaggggagtatgcaaaagttctgacttgactttagtctgcaaaatgaggaatgtatatgttttgtgggaacagatgtttcttttgtatgtaaatgtgcattcttttaaaagacaagacttcagtatgttgtcaaagagagggctttaatttttttaaccaaaggtgaaggaatatatggcagagttgtaaatatataaatatatatatatataaaataaatatatataaacctaacaaagatatattaaaaatataaaactgcgttaaaggctcgattttgtatctgcaggcagacacggatctgagaatctttattgagaaagagcacttaagagaatattttaagtattgcatctgtataagtaagaaaatattttgtctaaaatgcctcagtgtatttgtatttttttgcaagtgaaggtttacaatttacaaagtgtgtattaaaaaaaacaaaaagaacaaaaaaatctgcagaaggaaaaatgtgtaattttgttctagttttcagtttgtatatacccgtacaacgtgtcctcacggtgccttttttcacggaagttttcaatgatgggcgagcgtgcaccatccctttttgaagtgtaggcagacacagggacttgaagttgttactaactaaactctctttgggaatgtttgtctcatcccattctgcgtcatgcttgtgttataactactccggagacagggtttggctgtgtctaaactgcattaccgcgttgtaaaatatagctgtacaaatataagaataaaatgttgaaaagtcaaactggaaaaaaaa

SEQ ID NO: 31163 - DNA, 1581 bp, Homo Sapiens
ctcgccgctgccccggctccgccgctcgcagagagattcggaggagcccgggcgggggggaggaggagggggaggagggagcggagatctcggggctcggagccggccgccgctccgctccgatcgctgtggggcttggttttttgggggtgggggggcgggggggctcagatatggaggcaaatgggagccaaggcacctcgggcagcgccaacgactcccagcacgaccccggtaaaatgtttatcggtggactgagctggcagacctcaccagatagccttagagactattttagcaaatttggagaaattagagaatgtatggtcatgagagatcccactacgaaacgctccagaggcttcggtttcgtcacgttcgcagacccagcaagtgtagataaagtattaggtcagccccaccatgagttagattccaagacgattgaccccaaagttgcatttcctcgtcgagcgcaacccaagatggtcacaagaacaaagaaaatatttgtaggcgggttatctgcgaacacagtagtggaagatgtaaagcaatatttcgagcagtttggcaaggtggaagatgcaatgctgatgtttgataaaactaccaacaggcacagagggtttggctttgtcacttttgagaatgaagatgttgtggagaaagtctgtgagattcatttccatgaaatcaataataaaatggtagaatgtaagaaagctcagccgaaagaagtcatgttcccacctgggacaagaggccgggcccggggactgccttacaccatggacgcgttcatgcttggcatggggatgctgggatatcccaacttcgtggcgacctatggccgtggctaccccggatttgctccaagctatggctatcagttcccaggcttcccagcagcggcttatggaccagtggcagcagcggcggtggcggcagcaagaggatcaggctccaacccggcgcggcccggaggcttcccgggggccaacagcccaggacctgtcgccgatctctacggccctgccagccaggactccggagtggggaattacataagtgcggccagcccacagccgggctcgggcttcggccacggcatagctggacctttgattgcaacggcctttacaaatggataccattgagcaggtgctttcgttgccatctcactctgagagcatacctggatgtccaggcaagactgggcgaagtttctgagtggccctttgtttaggtgatgtcctcagacctggacccccaccagcctcactccccatcccaaccagagatggctcacttcggatcgagggttgactacatctcatcatctcacgaatctgctgtaatataagacaacagcttttaaatgtgtatataacccatgatttcggttttgttttgttttgtttttcttgatggtttccctctccctccctctcttcccattctccttttaaatctctttgaatcacatttggtagtgattttgacttagtccagtagtcacatagctttaatatctagttcaaagctaaccatagtataattgttatattaaggagttat

SEQ ID NO: 31164 - DNA, 2698 bp, Homo Sapiens
ggtaggttccacaatggtacaggcagcatcacgctgcacaatggtttccaggcagtgaaagagggtgattcagcaagccactcttcttctattttctttaacctccccttcactttttatttttatgggggtgggtggtgcttgctatatgcttacctttttcttttcttttttcatttttacaaatttccttttttgtcctcacccctcaattcctaggggcttgagtgagtttaagattgggttttcttggaaatcacctgtccatcgttaattttaaacaatctccatatctccaaagaatctcttccatgttagtctggaatgtggttaatgaaaaacaagtagggaggatttctggggcaaacactgccggatcaggatcgtagttctcaggcacggaatggctagtgtgagaaacaccaacagcaggcccatctcagatcttcactatggcaacttatgcaagaaactgttgaattagacccgtttcctatagatgagaaaccatacaagctgtggtatttatgagcctccatttcttatactactgcagtgaaccaacattggatgtgaaaattgccttttgtcaggtgtgtgttccttacaggtaaaacaagggattcgataaacaagtggatgtgtcatatattgccaaacattacaacatgagcaaaagcaaagttgacaaccagttctacagtgtggaagtgggagactcaaccttcacagttctcaagcgctaccagaatctaaagcctattggctctggggctcagggcatagtttgtgccgcgtatgatgctgtccttgacagaaatgtggccattaagaagctcagcagaccctttcagaaccaaacacatgccaagagagcgtaccgggagctggtcctcatgaagtgtgtgaaccataaaaacattattagtttattaaatgtcttcacaccccagaaaacgctggaggagttccaagatgtttacttagtaatggaactgatggatgccaacttatgtcaagtgattcagatggaattagaccatgagcgaatgtcttacctgctgtaccaaatgttgtgtggcattaagcacctccattctgctggaattattcacagggatttaaaaccaagtaacattgtagtcaagtctgattgcacattgaaaatcctggactttggactggccaggacagcaggcacaagcttcatgatgactccatatgtggtgacacgttattacagagcccctgaggtcatcctggggatgggctacaaggagaacgtggatatatggtctgtgggatgcattatgggagaaatggttcgccacaaaatcctctttccaggaagggactatattgaccagtggaataaggtaattgaacaactaggaacaccatgtccagaattcatgaagaaattgcaacccacagtaagaaactatgtggagaatcggcccaagtatgcgggactcaccttccccaaactcttcccagattccctcttcccagcggactccgagcacaataaactcaaagccagccaagccagggacttgttgtcaaagatgctagtgattgacccagcaaaaagaatatcagtggacgacgccttacagcatccctacatcaacgtctggtatgacccagccgaagtggaggcgcctccacctcagatatatgacaagcagttggatgaaagagaacacacaattgaagaatggaaagaacttatctacaaggaagtaatgaattcagaagaaaagactaaaaatggtgtagtaaaaggacagccttctccttcaggtgcagcagtgaacagcagtgagagtctccctccatcctcgtctgtcaatgacatctcctccatgtccaccgaccagaccctggcatctgacactgacagcagcctggaagcctcggcaggacccctgggttgttgcaggtgactagccgcctgcctgcgaaacccagcgttcttcaggagatgatgtgatggaacacacacacacgcagacacacacacacacacaaatgcagacacacaacatcaagaaaacagcaagggagagaatccaagcctaaaattaaataaatctttcagcctgcttcttccccagggttctgtattgcagctaagctcaaatgtatatttaacttctagttgctcttgctttggtcttcttccaatgatgcttactacagaaagcaaatcagacacaattagagaagccttttccataaagtgtaattttaatggctgcaaaaccggcaacctgtaactgcccttttaaatggcatgacaaggtgtgcagtggccccatccagcatgtgtgtgtctctatcttgcatctacctgctccttggcctagtcagatggatgtagatacagatccgcatgtgtctgtattcatacagcactacttacttagagatgctactgtcagtgtcctcagggctctaccaagacataatgcactggggtaccacatggtccatttcatgtgatctattactctgacataaacccatctgtaatatattgccagtatataagctgtttagtttgttaattgattaaactgtatgtcttataagaaaacatgtaaagggggaatatatggggggagtgagctctctcagacccttgaagatgtagcttccaaatttgaatggattaaatggcacctgtatacca

SEQ ID NO: 31165 - DNA, 4004 bp, Homo Sapiens
ctgctccatctagctctttccagtgcagccactgccgccgcccaggagccctcgtcccctgccttgtccccctactcgttcccgctcccacggcatggagcaggacactgccgcagtggcagccaccgtggcagccgcggatgcgaccgccactatcgtggtcatagaggacgagcagcccgggccgtccacctctcaggaggagggagcggccgccgcggccaccgaagccaccgcggccacggagaagggcgagaagaagaaggagaaaaacgtttcttcatttcaactcaaacttgctgctaaagcgcctaaatctgaaaaggaaatggacccagaatatgaagagaaaatgaaagccgaccgagcaaagagatttgaatttttactgaagcagacagaactttttgcacatttcattcagccttcagcacagaaatctccaacatctccactgaacatgaaattgggacgtccccgaataaagaaagatgaaaagcagagcttaatttctgctggagactaccgccataggcgcacagagcaagaagaagatgaagagctactgtctgagagtcggaaaacatctaatgtgtgtattagatttgaggtgtcaccttcatatgtgaaaggggggccactgagagattatcagattcgaggactgaattggttgatctctttatatgaaaatggagtcaatggcattttggctgatgaaattcctggacctcacatggttttagttccaaagtctactttacacaactggatgaatgaatttaaacgatgggtcccatctctccgtgtcatttgttttgtcggagacaaggatgccagagctgcttttattcgtgatgaaatgatgccaggagagtgggatgtttgcgttacttcttatgagatggtaattaaagaaaaatctgtattcaaaaagtttcactggcgatacctggtcattgatgaagctcacagaataaagaatgaaaaatctaagctttcagagattgttcgtgagttcaagtcgactaaccgcttgctcctaactggaacacctttgcagaataacctgcatgaactgtgggccttactcaactttttattgcctgatgtctttaattctgcagatgactttgattcttggtttgacactaaaaattgtcttggtgatcaaaaactcgtggaaagacttcatgcagttttaaaaccatttttgttacgccgtataaaaactgatgtagagaagagtctgccacctaaaaaggaaataaagatttacttggggctgagtaagatgcaacgagaatggtatacaaaaatcctgatgaaagatattgatgttttaaactcttctggcaagatggacaagatgcgactcttaaacattctgatgcagcttcgaaagtgttgtaatcatccatatctgtttgatggtgctgaacctggtccaccttataccactgatgagcatattgtcagcaacagtggtaaaatggtagttctggataaactattggccaaactcaaagaacagggttcaagggttctcattttcagccagatgactcgcttgctggatattttggaagattattgcatgtggcgtggttatgagtattgtcgactggatggacaaaccccgcatgaagaaagagaggataaattcctagaagtggaatttctgggtcaaagggaagcaatagaggcttttaatgctcctaatagtagcaaattcatctttatgctaagtaccagggctggaggtctcggaattaacctggcaagtgctgatgtggttatactatatgattcagactggaacccacaggttgatctacaagctatggatcgagcacatcgtattggtcagaagaaaccagtacgtgtattccgtctcatcactgacaacactgttgaagagaggattgtagaaagagctgagataaaactgagactcgattcaattgttatacaacaaggaagactcattgaccaacagtctaacaagctggcaaaagaggaaatgttacaaatgatacggcatggagccacccatgtttttgcttctaaagagagtgagttgacagatgaagacattacaactattctggaaagaggggaaaagaagactgcagagatgaatgaacgcctgcaaaaaatgggagagtcttctctaagaaattttagaatggacattgaacaaagtttatacaaatttgagggagaagattatagagaaaaacagaagcttggcatggtggaatggattgaacctcctaaacgagaacgcaaagcaaactacgcagtggatgcctactttagagaggctttgcgtgtcagcgagccaaagattccaaaggctccacggcctccaaaacagccaaatgttcaggattttcaatttttcccaccacgcttatttgagctcctggaaaaggaaattctttattatcggaagacaataggctataaggttccaaggaatcctgatatcccaaatccagctctggctcaaagagaagagcaaaaaaagattgatggagctgaacctcttacaccagaagagactgaagaaaaggaaaaacttctcacacagggtttcacaaactggactaaacgagattttaaccagtttattaaagctaatgagaaatatggaagagatgacattgataacatagctcgagaggtagagggcaaatcccctgaggaggtcatggagtattcagctgtattttgggaacgttgcaatgaattacaggacattgagaaaattatggctcaaattgaacgtggagaagcaagaattcaacgaaggatcagtatcaagaaagccctggatgccaaaattgcaagatacaaggctccatttcatcagttgcgcattcagtatggaaccagcaaaggaaagaactatactgaggaagaagatagattcttgatttgtatgttacacaaaatgggctttgatagagaaaatgtatatgaagaattaagacagtgtgtacgaaatgctccccagtttagatttgactggtttatcaagtctaggactgccatggaattccagagacgctgtaacactctgatttcattgattgagaaagaaaatatggaaattgaggaaagagagagagcagaaaagaagaaacgggcaactaaaactccaatggtaaaattttcagcattttcctaacttttagatttaacattgttgggccatttaaaatgtgcatattggagcagaacattaaatctgtttccattttagtcacagaaaagaaaagcagagtcagctactgagagctctggaaagaaggatgtcaagaaggtgaaatcctaaagcctagaaataaagttttaaatgggaaactgctattttcttgttcccatcttcaaatgctaattgccagttccagtgtattcatggtactctaagaaaaatctctttggttttgatttcttgcatattttatatattttacaatgctttctacctgaaatgtgtagctttatattttatggcattctagtatttttgtgtactgtattttgtgcatttcatgtcttcatcaaaatcctctcagtccttgttcttttgaagcttgtgctgaggttttagcttttctatgttttatatgccgctgctttgaaagagaacctagattctatagttgtattattgttgtttcatactttaaatttatatggctgtggaaaaacgaattaaaatgttttgaggagaaagactttttcacttctttgttgctttcttttctattgagtctgggcttgtttgtgttactgcatactgtgattagcataataattgtttctttgaggtcatctaaatatttttttcctaaaggaataaagggtgaggaaagaaaaatattaaaaaagctaatatttgatactgtgcttgctgtcagtatgcattacatttaaattattctctattcaagtgggaaaatataataaagaaatgtctataagaaatttaa

SEQ ID NO: 31166 - DNA, 3208 bp, Homo Sapiens
ctatcccatagtctcgctgccctgagcctcccgtgccggccggccggccgggggaacaggcgggcgctcggggggcgctcggggggcggggggagttccggttccggttctttgtgcggctgcatcggcggctccgggaagatggcggcccgggcgggtttccagtctgtggctccaagcggcggcgccggagcctcaggaggggcgggcgcggctgctgccttgggcccgggcggaactccggggcctcctgtgcgaatgggcccggctccgggtcaagggctgtaccgctccccgatgcccggagcggcctatccgagaccaggtatgttgccaggcagccgaatgacacctcagggaccttccatgggaccccctggctatggggggaacccttcagtccgacctggcctggcccagtcagggatggatcagtcccgcaagagacctgcccctcagcagatccagcaggtccagcagcaggcggtccaaaatcgaaaccacaatgcaaagaaaaagaagatggctgacaaaattctacctcaaaggattcgtgaactggtaccagaatcccaggcctatatggatctcttggcttttgaaaggaaactggaccagactatcatgaggaaacggctagatatccaagaggccttgaaacgtcccatcaagcaaaaacggaagctgcgaattttcatttctaacactttcaatccggctaagtcagatgccgaggatggggaagggacggtggcttcctgggagcttcgggtagaaggacggctcctggaggattcagccttgtccaaatatgatgccactaaacaaaagaggaagttctcttccttttttaagtccttggtgattgaactggacaaagacctgtatgggccagacaaccatctggtagaatggcacaggaccgccactacccaggagaccgatggctttcaggtgaagcggccgggagacgtgaatgtacggtgtactgtcctactgatgctggattaccagcctccccagtttaaattagacccccgcctagctcgactcctgggcatccatacccagactcgtccagtgatcatccaagcactgtggcaatatattaagacacataagctccaggaccctcacgagcgggagtttgtcatctgtgacaagtacctgcagcagatctttgagtctcaacgtatgaagttttcagagatccctcagcggctccatgccttgcttatgccaccagaacctatcatcattaatcatgtcatcagtgttgacccgaatgatcagaaaaagacagcttgttatgacattgatgttgaagtggatgacaccttgaagacccagatgaattcttttctgctgtccactgccagccaacaggagattgctactctagacaacaagacaatgactgatgtggtgggtaacccagaggaggagcgccgagctgagttctacttccagccctgggctcaggaggctgtgtgccgatacttctactccaaggtgcagcagagacgacaagaattagagcaagccctgggaatccggaatacatagggcctctcccacagccctgattcgactgcaccaattcttgatttgggccctgtgctgcctgcctcatagtatctgccttggtcttgcttggggcgttccaggggatgctgttggttcaaggacaacaccagaatgaagagggtctcacaagacacctgttatcctcttctttcaccctatctcttcccacccccagcttccctttgccccacaaagttcccatgtgcctgtaccctcccctggtctacataggacctctagatagtgttagagagagaacatgtagtggtaatgagtgcttggaatggattgggcctcaggccaggtggtcttcaaggggaccagctaactgatcctgcccttcagagacccaggagttgggagctttcgctccttctccaagactcaggcctgtgggcactctataagctagttgatcttggctctcctgataacagaatccaatttccttccttccctccacaggtttggaacaaactctcccttcacttgttgccctgtagcactacagaaaccctggttcttgggctccactgagccccaggtcagtccccagccctctgggttggcctgctgtcagtgcttctctcactccttagttggggtccacatcagtattggagttttgttctttattgctccctcccagacactccctgtggctgccctttgtgattccctcagatctgccctaatcccgggcatttgggtgggggaatcttgcctttccctttcagagccccagggatctcatctggggaactgtcattgccagcagaggctgttccttcctgctgtttggagatgtgactcattcattcactcactccaccctgcctctgcatcccttaatggagaaacgggcctaaaaccaaacgggtaaaaagccctgggccatccctgtcttcctgtcccttgtctgcccagttgacacctactggtgacttctagggcactgaggagtgaaagcgcctagggctggagaatagcgctgagttgggtttgtgactcttccctctccctgcctcacaggattgtgactccccagcccctgccctcaaagcttcagacccctcaggtagcagcaggaccttgtgatcttggccccttggatctgagatggtttttgcatctttccaggagagcctcacattcttcttccaggttgtatcacccccgagttagcatatcccaggctcgcagactcaacacagcaagggtgggagacagctgggcacaaagggggaattccgttcagcatgggctctaaacccacagaactgacaaagcccctgcttccccaccccctcctcaggctcctgcgagcacacccccacccccaaatccctccctgttctacactggggacagcagaattttctccccgtcttccccttcctgccattttccctcccttgaaaggttgacactggacaaccttggggcagctgagccctggccgcctcctggctggaaccatgagaaggaagctcagtacttcccacagtgtccctgttgataactgtttttattaactgaattgtttttttcatggaccaaacttttttttgtactgtccccttattgatgttacccagttttaataaaagaatcttctgaa

SEQ ID NO: 31167 - DNA, 2066 bp, Homo Sapiens
gcggccgcgtggggcccagcacaaagacctgtccccaggggccgccgcctccgccgctgctgctgccgccagcctagagccgcccgccgaagcagagccggcgccggggtcctcatccccaccggtcccgaggggcggctgctgcccgtcgccacgaggcccaggggcccgagtgccgagccctttgctccctcggccgcgcggggacagggctgctgagcagcctccgcctctcccggctgtgggggccccactgagtatgtcggaggagagcgacatggacaaagccatcaaggaaacttccattttagaagaatacagtatcaattggactcagaagctgggagctggaattagtggtccagttagagtctgtgtaaagaaatctactcaagaacggtttgcgctgaaaattcttcttgatcgtccaaaagctagaaatgaggtacgtctgcacatgatgtgtgccacacacccaaacatagttcagattattgaagtgtttgctaacagtgtccagtttccccatgagtccagccctagggcccgactcttaattgtaatggagatgatggaagggggagagctatttcacagaatcagccagcaccggcactttacagagaagcaagccagccaagtaacaaagcagatagctttggctctgcggcactgtcacttgttaaacattgcgcacagagacctcaagcctgaaaatctgctttttaaggataactctttggatgccccagtgaagttgtgtgactttggatttgccaagattgaccaaggtgacttgatgacaccccagttcaccccttattatgtagcaccccaggtactggaggcgcaaagaaggcatcagaaggagaaatctggcatcatacctacctcaccgacgccctacacttacaacaagagctgtgacttgtggtccctaggggtgattatctatgtgatgctgtgcggataccctcctttttactccaaacaccacagccggactatcccaaaggatatgcgaagaaagatcatgacaggcagttttgagttcccagaggaagagtggagtcagatctcagagatggccaaagatgttgtgaggaagctcctgaaggtcaaaccggaggagagactcaccatcgagggagtgctggaccacccctggctcaattccaccgaggccctggataatgtgctgccttctgctcagctgatgatggacaaggcagtggttgcaggaatccagcaggctcacgcggaacagttggccaacatgagaatccaggatctgaaagtcagcctcaaacccctgcactcagtgaacaaccccattctgcggaagaggaagttacttggcaccaagccaaaggacagtgtctatatccacgaccatgagaatggagccgaggattccaatgttgccttggaaaaactccgagatgtgattgctcagtgtattctcccccaggctggtaaaggagagaatgaagatgagaaactgaatgaagtaatgcaggaggcttggaagtataaccgggaatgcaaactcctaagagatactctgcagagcttcagctggaatggtcgtggattcacagataaagtagatcgactaaaactggcagaaattgtgaagcaggtgatagaagagcaaaccacgtcccacgaatcccaataatgacagcttcagactttgtttttttaacaatttgaaaaattattctttaatgtataaagtaattttatgtaaattaataaatcataatttcatttccacattgattaaagctgctgtatagatttagggtgcaggacttaataatagtatagttattgtttgtttttaagaaaagctcagttctagagacatactattactttaggactgtgtagttgtatatttgtaagatgacagatgatgctgtcaagcaatattgttttatttgtaataaaatatacaaaaatcacttgccagcagtagaaaaaggaccgactataccgacctttctgattagtaaacagttgaatcaaggactctggaaaaaaaaaaaaaaaaaaaaaaa

SEQ ID NO: 31168 - DNA, 2707 bp, Homo Sapiens
gcggggccaagatggcgccgagcgccgggtgagcagcgtctcggctgccgctagagttttcctgctccccgcgctcgggtggcgggggcgggtctgagtggtaccccggaggagaccctttgaaggtcccttgtggggactggaaagaggacggttggttgtgtgtctgtgctcgtggggaccccgtgtgtgtgcctgcattggagagatgttgcaggagatggggtgggctctctgaacctcctttcgcgctgcccggggatcttcgacctgcttctctgctgggatctcgcttaagttaacccttccctgggacgccttcctgccgcctccactgatctgaggagatcctgtgactgtagcgtgttttatgagcctttactggcagagggtaccgccgggtattgaaggattcgtaggagttcgccagggaagtgggacacgaccccctcttgtaaacccggcgccaggcacagaggtctccgtctctccaccgggggcttcatccttccagggaggagaagagggactccagaatggctgaggagaagaagctgaagcttagcaacactgtgctgccctcggagtccatgaaggtggtggctgaatccatgggcatcgcccagattcaggaggagacctgccagctgctaacggatgaggatgccttgaagttcatgcacatggggaagcggcagaagctcaccaccagtgacattgactacgccttgaagctaaagaatgtcgagccactctatggcttccacgcccaggagttcattcctttccgcttcgcctctggtgggggccgggagctttacttctatgaggagaaggaggttgatctgagcgacatcatcaatacccctctgccccgggtgcccctggacgtctgcctcaaagctcattggctgagcatcgagggctgccagccagctatccccgagaacccgcccccagctcccaaagagcaacagaaggctgaagccacagaacccctgaagtcagccaagccaggccaggaggaagacggacccctgaagggcaaaggtcaaggggccaccacagccgacggcaaagggaaagagaagaaggcgccgcccttgctggagggggcccccttgcgactgaagccccggagcatccacgagttgtctgtggagcagcagctctactacaaggagatcaccgaggcctgcgtgggctcctgcgaggccaagagggcggaagccctgcaaagcattgccacggaccctggactgtatcagatgctgccacggttcagtacctttatctcggagggggtccgtgtgaacgtggttcagaacaacctggccctactcatctacctgatgcgtatggtgaaagcgctgatggacaaccccacgctctatctagaaaaatacgtccatgagctgattccagctgtgatgacctgcatcgtgagcagacagttgtgcctgcgaccagatgtggacaatcactgggcactccgagactttgctgcccgcctggtggcccagatctgcaagcattttagcacaaccactaacaacatccagtcccggatcaccaagaccttcaccaagagctgggtggacgagaagacgccctggacgactcgttatggctccatcgcaggcttggctgagctgggacacgatgttatcaagactctgattctgccccggctgcagcaggaaggggagcggatccgcagtgtgctggacggccctgtgctgagcaacattgaccggattggagcagaccatgtgcagagcctcctgctgaaacactgtgctcctgttctggcaaagctgcgcccaccgcctgacaatcaggacgcctatcgggcagaattcgggtcccttgggcccctcctctgctcccaggtggtcaaggctcgggcccaggctgctctgcaggctcagcaggtcaacaggaccactctgaccatcacgcagccccggcccacgctgaccctctcgcaggccccacagcctggccctcgcacccctggcttgctgaaggttcctggctccatcgcacttcctgtccagacactggtgtctgcacgagcggctgccccaccacagccttcccctcctccaaccaagtttattgtaatgtcatcgtcctccagcgccccatccacccagcaggtcctgtccctcagcacctcggcccccggctcaggttccaccaccacttcgcccgtcaccaccaccgtccccagcgtgcagcccatcgtcaagttggtctccaccgccaccaccgcaccccccagcactgctccctctggtcctgggagtgtccagaagtacatcgtggtctcacttcccccaacaggggagggcaaaggaggccccacctcccatccttctccagttcctcccccggcatcgtccccgtccccactcagcggcagtgccctttgtggggggaagcaggaggctggggacagtccccctccagctccagggactccaaaagccaatggctcccagcccaactccggctcccctcagcctgctccgtgatgctccacctgccagcccccggattcccacacatgcagacatgtacacacgtgcacgtacacacatgcatgctcgctaagcggaaggaagttgtagattgcttccttcatgtcactttctttttagatattgtacagccagtttctcagaataaaagtttggtttgt

SEQ ID NO: 31169 - DNA, 1520 bp, Homo Sapiens
aggtcacagactgcggagtgggtcaggggctgcgagggctgccccaagtcctaccgggtttgcacgggcgcgcccggctccgcccgcaagtgcgccttcctgacttactgctgggtgcgcggggctgggggtgcgagtaccacccctgaagtctcttcctgggcgacctccggggcctcattctaggcctccttaaagagaaggatctaaattaggaaaaggaagtgcccttatccacgaccaagctcttccacctgcggagctcgcttagtctgcacctcaaccgtgcggaaagtgactgccctgtttactgaggaaaaactggggctcagaaagataccatggagtagtttgaaacaggaacaaaatcttctgaaagctcggagcagaagcctttttggtcaacatggaggaaaaaagacggcgagcccgagttcagggagcctgggctgcccctgttaaaagccaggccattgctcagccagctaccactgctaagagccatctccaccagaagcctggccagacctggaagaacaaagagcatcatctctctgacagagagtttgtgttcaaagaacctcagcaggtagtacgtagagctcctgagccacgagtgattgacagagagggtgtgtatgaaatcagcctgtcacccacaggtgtatctagggtctgtttgtatcctggctttgttgacgtgaaagaagctgactggatattggaacagctttgtcaagatgttccctggaaacagaggaccggcatcagagaggatataacttatcagcaaccaagacttacagcatggtatggagaacttccttacacttattcaagaatcactatggaaccaaatcctcactggcaccctgtgctgcgcacactaaagaaccgcattgaagagaacactggccacaccttcaactccttactctgcaatctttatcgcaatgagaaggacagcgtggactggcacagtgatgatgaaccctcactagggaggtgccccattattgcttcactaagttttggtgccacacgcacatttgagatgagaaagaagccaccaccagaagagaatggagactacacatatgtggaaagagtgaagatacccttggatcatgggaccttgttaatcatggaaggagcgacacaagctgactggcagcatcgagtgcccaaagaataccactctagagaaccgagagtgaacctgacctttcggacagtctatccagaccctcgaggggcaccctggtgacgtcagagctttgagagagaagcttcactgaaacggagcaaaccttccactgagaagccacttcaagaggctggtgctgctagatctcatgatgtggctgttgggaagatggtggggtttgtttgccagcttggagtcctattaaatgaaagccagcaactcatgttggtaataggtctactgtgggaacagttatccctaaccacagctcaaaatcgctatcatctttaggcaaattaaaatctatgtggca

SEQ ID NO: 31170 - DNA, 4074 bp, Homo Sapiens
gggtttcggcccttccagaccgtctctcctcagggttggagacttcggggccaagatggcgacgggaacgggcaaacacaagctgctaagcactggccccacagagccatggtccatccgagagaagctatgtttagcatcttctgtcatgagaagtggcgatcaaaattgggtatcagttagcagagcaatcaagccctttgcagaacctggccgccctccagactggttctctcaaaaacattgtgcttcccagtactcggagcttttagagaccactgagacaccaaaacggaaacgaggtgaaaagggagaagtggtggaaactgttgaagatgttattgttcggaaattgactgctgagcgagttgaagaactaaagaaagtgataaaggaaacccaggagagatatagacggctaaagagagatgcagaactaattcaagctggacacatggacagcagactggatgagctttgcaatgacattgcaacgaaaaagaaattggaagaagaggaggctgaagtaaagaggaaggctacagatgctgcataccaggctcgtcaagcagtaaaaacacccccccggaggttacccactgtgatggttcgctctcctatagattctgcctccccaggaggtgattatccacttggggacttgactccaaccactatggaagaggctacctctggggtcaatgagagtgaaatggctgtggcttctggccacctgaacagtacaggtgtcctcctggaggtaggcggggtccttcccatgatacatggtggggagatacagcaaacacccaatactgttgcagcctcccctgctgcatcaggtgctcccactctttcccggcttttagaagctggtcctacacagttcaccacacctcttgcttccttcactactgttgccagtgagcctccagttaaacttgtgccaccccctgtagagtctgtgtcccaagctaccattgtcatgatgcctgcgctgccagcaccatcctctgctccggctgtctccactactgaaagtgtagctccagtgagtcaacccgacaactgtgttcccatggaggctgtgggggatccacatactgtgactgtttccatggacagcagtgaaatatccatgatcatcaattctatcaaagaagagtgttttcgatcaggggtagcagaggctcctgttggatcaaaggctcccagcatagatgggaaggaagaattagatctggctgagaagatggatattgctgtgtcttacacaggtgaagagctggattttgagactgttggagacatcattgccatcattgaggacaaggtagatgatcatcctgaagtgctggatgtggcagcagtggaagcagcactgtcattttgtgaagaaaatgatgatcctcagtccctgcctggcccctgggagcatcctatccagcaggagcgggacaagccagtacctctccctgcaccagaaatgacggtcaagcaagagagactggactttgaggaaacggaaaacaagggaatacatgaactggtggacatcagggagcccagtgcagagatcaaggtggaacctgcagaaccagagccagtcatttcaggagccgaaatagtagctggagttgttccagccacaagtatggagccaccagaactcaggagtcaggacttagatgaggaactgggaagtactgcagctggagagattgttgaagcagatgttgccattgggaaaggcgatgagactccacttacaaatgtgaagacagaggcatcccctgaaagcatgttgtctccatcacatggctcaaatcccattgaagatcctttagaggcagagactcagcacaagtttgaaatgtcagactcattgaaagaagaatcagggactatttttggaagccagataaaggatgccccaggtgaggatgaggaggaagatggtgtcagtgaagcggccagcctagaggagcctaaggaagaggatcaaggagaaggctacttgtcagaaatggataatgaacctcctgtgagcgagagtgatgatggcttcagcatacacaatgctacactgcagtcacacacactggcagactccatccccagcagccctgcttcttcacagttctctgtctgtagtgaggatcaggaagctattcaggcacagaaaatttggaagaaagccatcatgcttgtatggagagctgcagctaatcataggtatgccaatgtcttcctgcagcctgttacagatgacatagcacctggctaccacagcattgtgcagaggcctatggatttgtcaactattaagaaaaacatagaaaatggactgatccgaagcacagctgaatttcagcgtgacattatgctgatgtttcagaatgctgtaatgtacaatagctcagaccatgatgtctatcacatggcagtggagatgcagcgagatgtcttggaacagatccagcaattcttggccacgcagttgattatgcaaacatccgagtctgggatcagtgctaaaagtcttcgagggagagattctacccgcaaacaggatgcttcagagaaggacagtgtcccaatgggctctcctgccttccttctctctctctttatgggacacgagtgggtttggctggattctgaacaagatcatcccaatgactctgagttgagcaatgactgcaggtccctcttcagctcatgggactccagtctggatcttgatgtgggcaactggagggaaactgaggatccagaggctgaggaactagaggaaagcagcccggagagagaacctagtgaactgcttgttggggatggaggcagtgaggaatctcaggaagcggcaaggaaagccagccaccagaacctcctccactttctctctgaggtagcttatttaatggagcccttgtgcatcagcagcaacgaatcaagtgaaggctgctgccctccatctggtaccagacaagaaggaagggaaattaaagctagcgaaggagaaagggagctctgcagagagactgaagagctttcagctaaaggagaccccttagtagctgaaaagccactgggagaaaatggaaagccagaggtggcttcagctccctcagttatttgtacagttcagggactactcacagagagtgaagagggggaggctcagcaagaatccaaaggggaggaccagggtgaagtatatgtgtcagagatggaagaccagcccccttcaggcgagtgtgatgatgcctttaacattaaggagactcccttggtggatacacttttcagccatgctacctcctcaaagctgactgatctaagccaggatgaccctgttcaggatcatttgctatttaagaagactctcctgccagtctggaagatgattgccagtcacaggttcagcagtccatttctgaagcctgtgtcagaaaggcaggccccagggtacaaggatgtggtgaaaagacccatggacttaactagcctgaagagaaatctctctaagggtcggattcgcaccatggcccaattcctgcgagacctgatgctgatgttccaaaatgctgtaatgtacaatgactctgatcatcatgtataccatatggctgtggagatgcggcgagaagtcctggagcagattcaggtactgaatatctggttagacaaaagaaaaggctcaagtagtctggaaggagaaccagctaacccagtggatgatggaaaacctgttttctaacctggagctgctatcctgactttttctagagtttgaatctctcccggaactctgacctagagaggatcctggtacttctttgccatgtcctcattttcttttccaacaagaataataccttaactcacaaccaacgagtcaaagatgcatgtggacataatataaagaaaaaaaggggaagctgaggtttggatttatgccataaatgttgcccacatctttgttccatcggcttgatttaaagacaattccattagatcttttctaagccttttactctataaataaatgtatttacacaataaaaaaaa

SEQ ID NO: 31171 - DNA, 2264 bp, Homo Sapiens
gaagcgccgccgccaccgccgcctttgctgtcccccggcctctagttccccgcaggtgggaggtgggagccatgtcgaaacggctccggagcagcgaggtgtgcgctgactgcagcgggccggatccttcctgggcatcagtaaataggggaacgtttttatgtgatgagtgctgcagtgtccatcggagtctagggcgccatatctcccaagtgaggcatctgaaacacacaccgtggcctccaacactgcttcagatggttgagaccttgtataataacggtgctaactctatatgggagcattctttgctggaccctgcgtctattatgagtggaagacgtaaagctaatccacaggataaagtacatcccaataaagcggaattcatcagagccaagtatcagatgttagcgttcgtccatcgcttgccctgccgggatgacgatagtgtgactgccaaagatcttagcaagcaactccattcgagcgtgagaacagggaatcttgaaacctgtttgagactgttatctttaggagcacaagccaacttctttcatcctgaaaaaggaaacaccccactccatgttgcctccaaagcagggcagattttacaggctgaattattggcagtatatggagcagacccaggcacacaggattctagtgggaaaactcccgttgattatgcaaggcaaggagggcaccatgagctggcagagcgcctcgtggaaatacagtatgagctaacggacagactagccttctatctctgtggcaggaaaccagatcacaaaaatggacagcactttataatacctcaaatggcagacagcagcctggatttgtctgaattggcaaaagctgctaagaagaaacttcaatctctaagtaatcatttgtttgaagaacttgccatggatatgtacgatgaagttgacaggcgagagacggatgcagtctggcttgccacgcaaaaccacagcgccctggtaaccgagacaacggtcgtcccctttcttccggtcaatcctgagtactcatcaacacgaaatcagggcagacagaagttagctcggttcaacgcccatgagtttgccacgctggtcattgacattctcagtgacgccaagaggagacagcagggcagttctctctcgggttcaaaagacaatgtggagctcatactgaaaaccatcaataaccagcacagcgttgagagtcaagacaacgatcagcccgactatgacagcgtggcatcagacgaagacacagatttggaaaccactgcaagcaaaacaaaccggcagaagagcctagattcagatttatcagatggaccagtcactgtacaggaatttatggaggtcaaaaacgctctagtggcttctgaggccaagatacagcagctaatgaaggtgaataacaacttgagtgacgagctgagaattatgcagaaaaagttgcttggaaaagatgctaattaatgaagaggagcaactactattggtgtatttttcacagattggtgctttctaaataaaaattgaaagtaactcctaacattgaatgggtttgctactgaaaaagtaatgatcttctggtgcaaacagttgcttgtggacttaaaccttggcactggtggggaatttggtcagattttacaatctctgtcaaagagtagacagctgaactcacaccacacccagcttatagaatgtccatggaagatgaaggcgcaccagaagggaaggaccctgcgcagaatggacgtggtgaatggtgtttaaaatgccagatgccaaagagtaacacgattccctgctgaccccttaactctaatccatccagcaccatggagcagcctgcatgtgaggaatggaaggagcattcagggcctccaagtgacagtctctaaaatggggtggtgccaggcagattagcatgttcaaagctgacaccactgaggtcgtgttttttgggtgacaaagccaaaggagagaaaggccaaatattccagccctggccgaaagatgatcactcaccagacggaagcaagcgtgctgcgtggagcatccatgcgaagatgtcaattccatagatcaataggtttccagttttcttcgtgatatgttaatatagcaaacttaccatgatccggttttctcttttttctttttttttttacaaagtgctgaattgtttggaatatcaagagtattatgtaataaaaacttgttgatcataaaaaaaaaaaaaaaaaa

SEQ ID NO: 31172 - DNA, 4832 bp, Homo Sapiens
agcggaccgccgcggcccgcgctgtaaccgcggctgccgctgctgctccgggcgggcgttggtgccgtgtgccgaggcgccctgtcaggcgatggggagcggctgggcggggagagccgacggccgcggcggcgcctgaggaacgcagccgggctcgggagcggcgagggcgggccggtccagcggcggaggagcgaggcggggcgaggcaggcggcgcggggacccgcgccaagcagcggcggcctcggaggaagaggggtcgccgcccaggtttcttgcggccgccgctcttgtcgtcgcagtatttcctgttcggattatcttttgcttccccccagctgcctccttaccctcacactcccactcctccgtttccgcggtcgaagctgccttcggccccgggtggtctcccccgcccggggaccccctgtgcctcccctcccgggctgcgggggagcccctccgagaccatgaggaaattcaacatcaggaaggtgctggacggcctgaccgccggctcgtcctcggcgtcgcagcagcaacagcagcagcatccgcctgggaaccgggagccggagatccaggaaacgctccagtccgagcactttcagctctgcaagactgttcgccatggatttccctatcaaccctcagccctggcctttgatcctgtacagaagatcctggcagtgggaactcagactggtgctttaaggctctttggtcgtccaggagtagaatgttattgccagcatgacagtggagctgcagtaatccagctccagttcctgattaatgagggagcgcttgtgagtgccttggctgatgacaccttacacttatggaatttacgtcagaagaggcctgccatactacattcgcttaaattttgcagagaaagggttacattttgccatctgcctttccagagtaagtggctctatgtgggcactgaacgaggtaatatacatattgtcaatgtggagtccttcacactctcaggctacgtcattatgtggaataaagccattgaactgtcatctaaatctcacccaggacctgtggtccatataagtgataatccaatggacgagggaaagcttttgattggctttgaatctggaacagtagttttatgggacctcaaatcaaagaaagccgactacagatacacatatgatgaggctatccactctgttgcttggcatcatgaaggaaaacaatttatttgcagtcattcagatggcaccttgactatatggaatgtaaggtcccctgctaaaccagtacagacaatcactccacatggaaaacagttaaaggatgggaagaagccagaaccatgcaaacctatcctcaaggtggaattcaaaacgactagatctggggagccttttattattttatcaggaggtttgtcatatgatactgtaggaagaagaccttgcttaacagtgatgcatgggaaaagcactgctgtgctagaaatggactattcaattgttgattttctaacgctgtgtgaaacaccatacccaaatgattttcaagaaccatatgctgtggttgttcttctagaaaaggatttagtacttatagaccttgcacaaaatggatatcctatatttgaaaatccctaccctttgagtatacatgagtcccctgttacatgttgcgaatattttgcggattgtcctgtggaccttattcctgcactttattctgttggagctagacagaaacgtcaaggttacagcaaaaaggaatggcccatcagcggaggtaattggggcttgggtgctcaaagttacccagaaataattattacagggcatgctgatgggtcagttaagttctgggatgcttctgcaataactctacaagtattatataagctaaagacatctaaagtatttgaaaagtcaagaaataaagatgacaggccaaacacagacattgtagatgaagatccatatgccattcagatcatctcctggtgtccagaaagtagaatgctgtgcatcgctggagtttcagctcatgtcattatttatagattcagcaagcaggaagtaatcacagaagtcattccgatgcttgaagttcgattattatatgagataaatgatgtggaaactccggagggtgagcagccaccacctttgccaacacccgtgggagggtccaaccctcagcccatccctcctcagtctcatccatctaccagtagcagttcatctgatgggcttcgtgataatgtaccttgtttaaaagttaaaaactcaccacttaaacagtctccaggttatcaaacagaactagttattcagttggtttgggtgggtggagaaccaccacaacaaataaccagcctggcagtcaattcttcctatggactggtggtttttggcaattgcaatggcattgctatggttgactacctccagaaagcagtgctgctcaacctgggcactattgaattatatggctctaatgatccttatcggagagaaccccgatctcctcgtaaatctcgacagccttcaggagccggtctgtgtgatattagtgaagggactgttgttccagaggatcgctgcaaatctccaacctctgcaaagatgtcaaggaagttaagcttacctactgacctaaagcctgatttagatgtaaaggataactcctttagccgatcacggagttcaagtgtaacaagcattgacaaagaatcccgagaagcgatctccgctcttcatttctgtgaaacgtttactcgaaagacggactcgtccccttccccttgtctgtgggttggaacaacgctaggaacagtgcttgtcattgcactgaaccttcccccagggggagagcaaagacttcttcagccagtaattgtgtctccaagtggtactatattgaggttaaaaggtgcaatcttgagaatggcatttctggataccacaggctgcttaataccacctgcgtatgaaccctggagagagcacaatgttcctgaagaaaaagacgaaaaggagaaattgaaaaaacggcggcctgtctcagtatccccctcctcttctcaggaaattagtgaaaaccagtatgcagtgatatgttctgaaaagcaagcaaaagtaatctcactgccaacccagaactgtgcttataagcaaaatattacagagacctcgtttgtgcttcgtggagatattgtagcattgagtaacagtatctgccttgcctgtttctgtgccaatggacatataatgacttttagtttgccaagtttaagacctctgttggatgtgtattacttgccccttaccaatatgcggatagccagaacgttctgctttaccaacaatggacaagcattataccttgtttcacctacagaaatccagagacttacttatagtcaagagacctgtgaaaatcttcaggaaatgttgggtgaactcttcactcctgtagaaacacctgaagcaccaaacaggggattctttaaaggcttatttggaggtggtgcacaatctcttgacagagaagaactatttggagaatcgtcctcaggaaaggcttcaaggagccttgcacagcatattcctggccctggtggcattgaaggcgtaaaaggggcagcatctggagttgttggtgaattagcacgagccaggctggcactagatgaaagagggcagaaacttggcgatctggaagaaagaactgcggccatgttatcaagtgcagagtcattttctaaacatgctcatgagattatgttgaaatacaaagataagaagtggtaccagttctgacaaccagaatccaataagtccaacttcagccagaaggaaaaaagttttccatttttattacattctttaggaaagttaacgttaaagggatgttcgtcactgaatactgttctttcctagcacagtcatgcactgttttacctcagtcatgtggctttaactgaggagtgttcacacgcactcgaaatggagtatatggtgtgtgccagttatgagttgaccatttgggaattaaacaggtcacacgtgacagatgaagaaaccaagggggctgctgaggagacctggtgcagggactaatcctggatcattcctgtattaaactttcatatgccaaaagggtttgtgccgttttatctgccatcagtgtttgacctgtttagggcagaggcaataagtcagaagtcttgaagttgaaatagttatatgtgtgtcattggactggattataaacagctgtcttggactttccctctcttaacactgactggtcatcagtatcattagtgaaaaagaaacaaattgtttgttatcatctctttagacagataagctgaatggtgggctttaaataataaaaacatacacatagttgacttgtgtatgagctactcttggattcttgttattatagacttgtatttagttcatattttgtcaaaagcaaaacaagaagatacatcacttttcattgaaaagaaaagtgtagagcatgactgaattgctcatcattctgggagtttccatgtagtggctatgcagtgtggaaagtgagaaaaacctccattgtggtgaggagaatacttcaatgtcccttgtccttgttctcattaattcagctaaaggtggatttgaccaaaataatgctggttaaatttgtagaaatgttgaaattggctgtgttttaaattttgcttgaatttttataaaatgtttaaccaaatgtacctttgcattctttaattaaaattgcttaaaaaaaaactttcattatttcagtaaaaaaaaaaaa

SEQ ID NO: 31173 - DNA, 2762 bp, Homo Sapiens
agcggggcggggcgccagcgctgccttttctcctgccgggtagtttcgctttcctgcgcagagtctgcggaggggctcggctgcaccggggggatcgcgcctggcagaccccagaccgagcagaggcgacccagcgcgctcgggagaggctgcaccgccgcgcccccgcctagcccttccggatcctgcgcgcagaaaagtttcatttgctgtatgccatcctcgagagctgtctaggttaacgttcgcactctgtgtatataacctcgacagtcttggcacctaacgtgctgtgcgtagctgctcctttggttgaatccccaggcccttgttggggcacaaggtggcaggatgtctcagtggtacgaacttcagcagcttgactcaaaattcctggagcaggttcaccagctttatgatgacagttttcccatggaaatcagacagtacctggcacagtggttagaaaagcaagactgggagcacgctgccaatgatgtttcatttgccaccatccgttttcatgacctcctgtcacagctggatgatcaatatagtcgcttttctttggagaataacttcttgctacagcataacataaggaaaagcaagcgtaatcttcaggataattttcaggaagacccaatccagatgtctatgatcatttacagctgtctgaaggaagaaaggaaaattctggaaaacgcccagagatttaatcaggctcagtcggggaatattcagagcacagtgatgttagacaaacagaaagagcttgacagtaaagtcagaaatgtgaaggacaaggttatgtgtatagagcatgaaatcaagagcctggaagatttacaagatgaatatgacttcaaatgcaaaaccttgcagaacagagaacacgagaccaatggtgtggcaaagagtgatcagaaacaagaacagctgttactcaagaagatgtatttaatgcttgacaataagagaaaggaagtagttcacaaaataatagagttgctgaatgtcactgaacttacccagaatgccctgattaatgatgaactagtggagtggaagcggagacagcagagcgcctgtattggggggccgcccaatgcttgcttggatcagctgcagaactggttcactatagttgcggagagtctgcagcaagttcggcagcagcttaaaaagttggaggaattggaacagaaatacacctacgaacatgaccctatcacaaaaaacaaacaagtgttatgggaccgcaccttcagtcttttccagcagctcattcagagctcgtttgtggtggaaagacagccctgcatgccaacgcaccctcagaggccgctggtcttgaagacaggggtccagttcactgtgaagttgagactgttggtgaaattgcaagagctgaattataatttgaaagtcaaagtcttatttgataaagatgtgaatgagagaaatacagtaaaaggatttaggaagttcaacattttgggcacgcacacaaaagtgatgaacatggaggagtccaccaatggcagtctggcggctgaatttcggcacctgcaattgaaagaacagaaaaatgctggcaccagaacgaatgagggtcctctcatcgttactgaagagcttcactcccttagttttgaaacccaattgtgccagcctggtttggtaattgacctcgagacgacctctctgcccgttgtggtgatctccaacgtcagccagctcccgagcggttgggcctccatcctttggtacaacatgctggtggcggaacccaggaatctgtccttcttcctgactccaccatgtgcacgatgggctcagctttcagaagtgctgagttggcagttttcttctgtcaccaaaagaggtctcaatgtggaccagctgaacatgttgggagagaagcttcttggtcctaacgccagccccgatggtctcattccgtggacgaggttttgtaaggaaaatataaatgataaaaattttcccttctggctttggattgaaagcatcctagaactcattaaaaaacacctgctccctctctggaatgatgggtgcatcatgggcttcatcagcaaggagcgagagcgtgccctgttgaaggaccagcagccggggaccttcctgctgcggttcagtgagagctcccgggaaggggccatcacattcacatgggtggagcggtcccagaacggaggcgaacctgacttccatgcggttgaaccctacacgaagaaagaactttctgctgttactttccctgacatcattcgcaattacaaagtcatggctgctgagaatattcctgagaatcccctgaagtatctgtatccaaatattgacaaagaccatgcctttggaaagtattactccaggccaaaggaagcaccagagccaatggaacttgatggccctaaaggaactggatatatcaagactgagttgatttctgtgtctgaagtgtaagtgaacacagaagagtgacatgtttacaaacctcaagccagccttgctcctggctggggcctgttgaagatgcttgtattttacttttccattgtaattgctatcgccatcacagctgaacttgttgagatccccgtgttactgcctatcagcattttactactttaaaaaaaaaaaaaaaagccaaaaaccaaatttgtatttaaggtatataaattttcccaaaactgataccctttgaaaaagtataaataaaatgagcaaaagttgaa

SEQ ID NO: 31174 - DNA, 2532 bp, Homo Sapiens
ccggggcggcggttgcatcagattctaggaagtgtctgtagccgcagctgcgggtccgggattcccagccatggcagattcctccgggcagcagggcaaaggccggcgtgtgcagccccagtggtcccctcctgctgggacccagccatgcagactccacctttacaacagcctcaccaggaacaaggaagtgttcatacctcaagatgggaaaaaggtgacgtggtattgctgtgggccaaccgtctatgacgcatctcacatggggcacgccaggtcctacatctcttttgatatcttgagaagagtgttgaaggattacttcaaatttgatgtcttttattgcatgaacattacggatattgatgacaagatcatcaagagggcccggcagaaccacctgttcgagcagtatcgggagaagaggcctgaagcggcacagctcttggaggatgttcaggccgccctgaagccattttcagtaaaattaaatgagaccacggatcccgataaaaagcagatgctcgaacggattcagcacgcagtgcagcttgccacagagccacttgagaaagctgtgcagtccagactcacgggagaggaagtcaacagctgtgtggaggtgttgctggaagaagccaaggatttgctctctgactggctggattctacacttggctgtgatgtcactgacaattccatcttctccaagctgcccaagttctgggagggggacttccacagagacatggaagctctgaatgttctccctccagatgtcttaacccgggttagtgagtatgtgccagaaattgtgaactttgtccagaagattgtggacaacggttacggctatgtctccaatgggtctgtctactttgatacagcgaagtttgcttctagcgagaagcactcctatgggaagctggtgcctgaggccgttggagatcagaaagcccttcaagaaggggaaggtgacctgagcatctctgcagaccgcctgagtgagaagcgctctcccaacgactttgccttatggaaggcctctaagcccggagaaccgtcctggccgtgcccttggggaaagggtcgtccgggctggcatatcgagtgctcggccatggcaggcaccctcctaggggcttcgatggacattcacggaggtgggttcgacctccggttcccccaccatgacaatgagctggcacagtcggaggcctactttgaaaacgactgctgggtcaggtacttcctgcacacaggccacctgaccattgcaggctgcaaaatgtcaaagtcactaaaaaacttcatcaccattaaagatgccttgaaaaagcactcagcacggcagttgcggctggccttcctcatgcactcgtggaaggacaccctggactactccagcaacaccatggagtcagcgcttcaatatgagaagttcttgaatgagtttttcttaaatgtgaaagatatccttcgcgctcctgttgacatcactggtcagtttgagaagtggggagaagaagaagcagaactgaataagaacttttatgacaagaagacagcaattcacaaagccctctgtgacaatgttgacacccgcaccgtcatggaagagatgcgggccttggtcagtcagtgcaacctctatatggcagcccggaaagccgtgaggaagaggcccaaccaggctctgctggagaacatcgccctgtacctcacccatatgctgaagatctttggggccgtagaagaggacagctccctgggattcccggtcggagggcctggaaccagcctcagtctcgaggccacagtcatgccctaccttcaggtgttatcagaattccgagaaggagtgcggaagattgcccgagagcaaaaagtccctgagattctgcagctcagcgatgccctgcgggacaacatcctgcctgagcttggggtgcggtttgaagaccacgaaggactgcccacagtggtgaaactggtagacagaaacaccttattaaaagagagagaagaaaagagacgggttgaagaggagaagaggaagaagaaagaggaggcggcccggaggaaacaggaacaagaagcagcaaagctggccaagatgaagattccccccagtgagatgttcttgtcagaaaccgacaaatactccaagtttgatgaaaatgtaagcatggtctgcccacacatgacatggagggcaaagagctcagcaaagggcaagccaagaagctgaagaagctcttcgaggctcaggagaagctctacaaggaatatctgcagatggcccagaatggaagcttccagtgagggggcacaggactgactttttaaaccattgtggactagtggctgctgtctgcctcagtgacaatgtcccagcgctcctatcatgtttacagtcacccttgggtcctaaattaagagttgtgttcatgtaggttcgtgtcgtcgttggctctgagacattgataataaatttttctcaacagtgaaaaaaaaaaaaaaaaaaaaaaa

SEQ ID NO: 31175 - DNA, 2814 bp, Homo Sapiens; identical to SEQ ID NO: 24019

SEQ ID NO: 31176 - DNA, 8645 bp, Homo Sapiens
ccgcacggccaggcgaagcggagccggccgtgcggtgtgtgtgtatgtgttcgcggggcgccgtctcagccccgggaagatggtggctgcagcggcggcaactgaggcaaggctgaggaggaggacggcggcgacggcagcgctcgcgggcaggagcggcgggccgcactgggactgggacgtgaccagggctgggaggccggggctgggggccgggctgcgcctcccgcggctgctgtctccaccgctgcggccacggctgctgctgctgctgttgttgctctcgccgccgctgctgctgctgctgctgccctgtgaggccgaggccgcggcggcggcggcggcggtgtcgggctcagccgcagccgaggccaaggaatgtgaccggccctgtgtcaacggcggtcgctgcaaccctggcaccggccagtgcgtctgccccgccggctgggtgggcgagcaatgccagcactgcgggggccgcttcagactaactggatcttctgggtttgtgacagatggacctggaaattataaatacaaaacgaagtgcacgtggctcattgaaggacagccaaatagaataatgagacttcgtttcaatcattttgctacagagtgtagttgggaccatttatatgtttatgatggggactcaatttatgcaccgctagttgctgcatttagtggcctcattgttcctgagagagatggcaatgagactgtccctgaggttgttgccacatcaggttatgccttgctgcatttttttagtgatgctgcttataatttgactggatttaatattacttacagttttgatatgtgtccaaataactgctcaggccgaggagagtgtaagatcagtaatagcagcgatactgttgaatgtgaatgttctgaaaactggaaaggtgaagcatgtgacattcctcactgtacagacaactgtggttttcctcatcgaggcatctgcaattcaagtgatgtcagaggatgctcctgcttctcagactggcagggtcctggatgttcagttcctgtaccagctaaccagtcattttggactcgagaggaatattctaacttaaagctccccagagcatctcataaagctgtggtcaatggaaacattatgtgggttgttggaggatatatgttcaaccactcagattataacatggttctagcgtatgaccttgcttctagggagtggcttccactaaaccgttctgtgaacaatgtggttgttagatatggtcattctttggcattatacaaggataaaatttacatgtatggaggaaaaattgattcaactgggaatgtgaccaatgagttgagagtttttcacattcataatgagtcatgggtgttgttgacccctaaggcaaaggagcagtatgcagtggttgggcactctgcacacattgttacactgaagaatggccgagtggtcatgctggtcatctttggtcactgccctctctatggatatataagcaatgtgcaggaatatgatttggataagaacacatggagtatattacacacccagggtgcccttgtgcaagggggttacggccatagcagtgtttacgaccataggaccagggccctatacgttcatggtggctacaaggctttcagtgccaataagtaccggcttgcagatgatctctaccgatatgatgtggatacccagatgtggaccattcttaaggacagccgatttttccgttacttgcacacagctgtgatagtgagtggaaccatgctggtgtttggaggaaacacacacaatgacacatctatgagccatggcgccaaatgcttctcttcagatttcatggcctatgacattgcctgtgaccgctggtcagtgcttcccagacctgatctccaccatgatgtcaacagatttggccattcagcagtcttacacaacagcaccatgtatgtgttcggtggtttcaatagtctcctcctcagcgacatcctggtattcacctcggaacagtgtgatgcgcatcggagtgaagccgcttgtttagcagcaggacctggtattcggtgtgtgtggaacacagggtcgtctcagtgtatctcgtgggcgctggcaactgatgaacaagaagaaaagttaaaatcagaatgtttttccaaaagaactcttgaccatgacagatgtgaccagcacacagattgttacagctgcacagccaacaccaatgactgccactggtgcaatgaccattgtgtccccaggaaccacagctgctcagaaggccagatctccatttttaggtatgagaattgccccaaggataaccccatgtactactgtaacaagaagaccagctgcaggagctgtgccctggaccagaactgccagtgggagccccggaatcaggagtgcattgccctgcccgaaaatatctgtggcattggctggcatttggttggaaactcatgtttgaaaattactactgccaaggagaattatgacaatgctaaattgttctgtaggaaccacaatgcccttttggcttctcttacaacccagaagaaggtagaatttgtccttaagcagctgcgaataatgcagtcatctcagagcatgtccaagctcaccttaaccccatgggtcggccttcggaagatcaatgtgtcctactggtgctgggaagatatgtccccatttacaaatagtttactacagtggatgccgtctgagcccagtgatgctggattctgtggaattttatcagaacccagtactcggggactgaaggctgcaacctgcatcaacccactcaatggtagtgtctgtgaaaggcctgcaaaccacagtgctaagcagtgccggacaccatgtgccttgaggacagcatgtggagattgcaccagcggcagctctgagtgcatgtggtgcagcaacatgaagcagtgtgtggactccaatgcctatgtggcctccttcccttttggccagtgtatggaatggtatacgatgagcacctgcccccctgaaaattgttcaggctactgtacctgtagtcattgcttggagcaaccaggctgtggctggtgtactgatcccagcaatactggcaaagggaaatgcatagagggttcctataaaggaccagtgaagatgccttcgcaagcccctacaggaaatttctatccacagcccctgctcaattccagcatgtgtctagaggacagcagatacaactggtctttcattcactgtccagcttgccaatgcaacggccacagtaaatgcatcaatcagagcatctgtgagaagtgtgagaacctgaccacaggcaagcactgcgagacctgcatatctggcttctacggtgatcccaccaatggagggaaatgtcagccatgcaagtgcaatgggcacgcgtctctgtgcaacaccaacacgggcaagtgcttctgcaccaccaagggcgtcaagggggacgagtgccagctatgtgaggtagaaaatcgataccaaggaaaccctctcagaggaacatgttattatactcttcttattgactatcagttcacctttagtctatcccaggaagatgatcgctattacacagctatcaattttgtggctactcctgacgaacaaaacagggatttggacatgttcatcaatgcctccaagaatttcaacctcaacatcacctgggctgccagtttctcagctggaacccaggctggagaagagatgcctgttgtttcaaaaaccaacattaaggagtacaaagatagtttctctaatgagaagtttgattttcgcaaccacccaaatatcactttctttgtttatgtcagtaatttcacctggcccatcaaaattcagattgccttctctcagcacagcaattttatggacctggtacagttcttcgtgactttcttcagttgtttcctctctttgctcctggtggctgctgtggtttggaagatcaaacaaagttgttgggcctccagacgtagagagcaacttcttcgagagatgcaacagatggccagccgtccctttgcctctgtaaatgtcgccttggaaacagatgaggagcctcctgatcttattggggggagtataaagactgttcccaaacccattgcactggagccgtgttttggcaacaaagccgctgtcctctctgtgtttgtgaggctccctcgaggcctgggtggcatccctcctcctgggcagtcaggtcttgctgtggccagcgccctggtggacatttctcagcagatgccgatagtgtacaaggagaagtcaggagccgtgagaaaccggaagcagcagccccctgcacagcctgggacctgcatctgatgctggggccagggactctcccacgcacgagctagtgagtggcacaccagagccatctgcagggaagggcgtggcggggaaatggctgtgcggtgcgggacggaagactggaaaccctcaaagcatctgactcacctgcatgatcacaagctttctttgacggtttctcccatccgtgttccagcatctaaccttttacttttgcataggaaatacttgatttaattacaggtccagggatgagctgatggttgctggaggaggccagtgtagagccagtgagagaactaggaatgacactcaggttcactgtggaaaactgttcttgggactgtctcaactgtgcaaaaaacaaaagatggagtgtttacaagtagacattcgtcatcagttgttcttgaacatggtcttttaaaaactagtcagatgaattaacttgttttcatctgaagcctgctatcttttttaaaagatgtgctatttattcttgcacgatttaggcaattatctctcttccagggagtacctttttttctagttgagaattaataatggtccatctcttttgatcatatcaagctaggatagaaggggggctattttaaatgtcaaggtcagcagtgttactttgaatgtaaactggtataataggtagttttctatagtaacttgattaatttagtcttaatccatttgaaactctctcttcctttctctctgcctgtccctctccttctccatctcaccctccctctctcacacatacacacacaaacacatacacacaacactaagtgcctagactttaaatagatctagcaattggaaagttagtaagcctaagtttttacataattgcattcctacattcttgtaaaatttaaatagctaccattggcaatctgctttttttctaaaatctgatttgcagccaggaaagaattttctcacccaaggaacatttgatctagcagcagggatgagaggaaagcagaaatgaatgaactgtgaaagctcctgtttttattatcaaaaaggacactgtcaagaaggcgccccctgcccccacccccgtgtcaccctaggcctgataagcgatcagaggaaaggactcattcatgtcacgcttccttgagcagaaaagagcactgagagcacttgggacccctggatcagagagcatctgtgtgtcctgcagcctcctctgaacttgtggttcattctcaggctggggtggactcagatgccaggaaagggacagcctcccattgtcaggcagaagctgcccaaagcctggagaaggacttgtttgccctctttcccccaggaggggctcgacccacccaccctccctctcagaccaaggtggtggctgtgaggagggcagcaaatgctgacaaggatgaaaagcacatggaaaaaaatggatgaggagggaaaactctgccaaatggaaaatgaccaaatttaagagggtgggacagtcccctgctcctctcccagagggcactgcttggaaattgtgttttccccatttatggtgctctgtattctggcattatgcagcagcctcccagaagctctcttctgcttcaaaacctgggatctctggcattaccctattgggatggaccgctggacagcaatgctcgagtttgtgaatttggagagatactcaaaagagctaaaactgcagcattttacctttaaatgcagtgcctagagagagagtattgtctcttccccaacactaaccccactcccatgaagaattgcctggaaagatgttttcaaggaatttgaaccataaaacactatctgatgcacagaacacctctactttgagactcacctctcataaagcttctttttcacattactgttaaagaccagacgttctagaaaagacccctcctctcatgagctcccccatccctgctacagaacacagcacccatggcgcctgcagtggactggccccttaattcccacaggcccccccagcaaggccaaagggaggcccctgggtattgtcctcctacaaggaagatcctctttgtttgttcaaaggaccagttttcctaggccaaagaagtctcttccccatgttagtcctatgccttgaaatatcatgcaccatgacccacagccatctggttatgtcttatttttttcctaaaagataatgtttatttttaaaaaggaaggaaggagcaagtgaagtttcattctgctccagcggtggggaagccgctgaatccacctgcttctcctttgcaaccgacagcaaacagctttctccggcctcagggcagaaaaagggaatggcagggagtaagaggcgctgggctcggagcctgtttccaagaaggaattggttgtcatctggcagtgttgcgcgtcacaagagagcctgtatataaattaaaatagtcaagacaacactgaccttgcacttgtacataactatacagtagtgtccagaatgttcagacattcggagtgtacataaaacagaaaaaatcttcatgtatttttattaaatataacaatgtctgagtttcacctaagatgtttttgtgccatatgctggatatccaggttctcgccaggccccgatacatgaataacaaacccaagaaacgcatccccattgtgtgatgtgttcagatgcatctggcaccaattaggtatttcttaaaacaggactcatctgtcagagtgcacatgaaaaatcaggcagggaatcgaaacgacagcgctggaggagactcaggaagcagaggcgtccctgccgctgcccttggccctgcaagcacatcatgaccctttctggcagcctcttggtgctctgggtagtgagggatgaccagtcttgtcctgagaaatgtttctcttagtctttaagttcaaagactaacctgtagcaatcagactttccaaaagggggttctccattttttgtagttttgtctaaatttttaatgaccatttcctggaatcagtttattatactgaaaactgggggtgggagtagggagctagtttgttgataaatagttcccatttccccgtggagaatttgacataccctggactcctgtgtgcctcctgccatccctgcacacagcctggggagaagcctgtgcctccccgtgtggagagaaggcaaccccagatcccctgagctaacccggaggaaaggcagtcctggacagaagactgtcagcagaaggaaagtactggactacccgtgggtaagtcctgccattcaagactggagacacctgggaaataaaaagagcagggcactgctggtgggaagaggcattttaccttccagtgcaaatcctgctcctttgatttaatggggtgtactggggccaggggctgattcacttccttgggagatggtggtgttttcatgaacatctttgatccttccatttcatttattcatccatccattcaacaagtatttgctaaacactaacttaagctaatgctagggtagtgactgagatgtaaaaatagattttagaattaaaacaaaatccaagtcctcacacccctgtcatcccaggagatctttccttgtggtggtttctgtgagaattggccatcctgaggacacagccaggacggcagaggcctcctggcctcagggcatgccctgcctaccttctgaaatgtttaccccattgaccaaacttggctccagccattgcggtggtttctagatagccaggcccaccaagagatattgccccttgatgagagtcaaacaccctgcctacaaggagatgttttgaaatggagaggaaaattggcacctcatcttttaaaggcagtaatggaattgattttcagtaactgaatttgtgcacaaaacattctaaacactagtgaagcctgtttcgttgaactaattctggctctggaaatgtttttgttttatagttatttacgatttcgtttgtttggattcaagcttagtttgttaatatgtataatttagcatctattacactcatgtaaatatggagtaagtattgtaaactatttcattgcggggattgtgggtgttatacatacatttaggactgcaattttttggtattttttgtattgtaaaataacagctaatttaagcaggaacaagagaactaagggaggtctgtgcattttaaacacaaatgtgaagaacttgtatataaacaaaagtaaatactataatacaaacttccttctgaaataaaagtagatctggtaaaaa

SEQ ID NO: 31177 - DNA, 3741 bp, Homo Sapiens
gtccaaaccggaagaccgtgggtagctgcggcggggctgacccgtcccgagtgccaaagctggggttctacttgagatttccctcgtggtgccagggtccggcgagcatcacgccgaggcccattttccagacgaccacgacgaggccggggtcacctggcgagacgcactgactctgccagaggcccagccccagaactcagagaatggggcactgcatgtgaccaaggacctgctgtgggagccggcaacccctgggcctctccccatgctgcctcccctcatcgatccctgggaccctggcctgactgcccgggacctgcttttccgcggagggtgccggtatcggaagcggccccgagtcgtgctggatgtgactgagcagatcagccggttcctcttggatcatggagacgtagcctttgcgcccctggggaagctgatgctggagaatttcaagctggagggagcggggagccgcactaagaagaagacagtggtcagtgtgaagaagctgctccaggacctcggtggacaccagccctgggggtgtccctgggcttacctcagcaaccgacagcgccgcttctctatcctcgggggccccatcctgggcacgtcggtggcgagccacttggcagagctgctgcacgaggagctggtgctgcggtgggagcagctgcttctggatgaggcctgcactgggggcgcgctggcctgggttcctggaaggacaccccagttcgggcagctggtctaccctgctggaggcgcccaggacaggctgcatttccaagaggtcgttctgaccccaggtgacaatccccaattccttgggaaacctggacgcatccagctccagggacctgtccggcaagtggtgacatgcaccgtccagggagaaactctgctggccgtccgctctgactaccactgtgccgtgtggaagtttggtaaacagtggcagccaacccttctgcaggcaatgcaggtggagaaaggggccacggggatcagcctcagccctcacctgcccggggagctggccatctgcagccgctcgggagccgtctgcctgtggagccctgaggatgggctgcggcaaatctacagggaccctgagaccctcgtgttccgggactcctcttcgtggcgttgggcagacttcactgcgcaccctcgggtgctgaccgtgggtgaccgcaccggagtgaagatgctggacactcagggcccgccgggctgtggtctgttgctttttcgtttgggggcagaggcttcgtgccagaaaggggaacgtgtcctgcttacccagtacctggggcactccagccccaaatgcctcccccctactcttcatctcgtctgtacccagttctctctctacctagtggacgagcgccttcccctggtgccgatgctgaagtggaaccatggcctcccctccccgctcctgctggcccgactgctgcctccgccccggcccagctgcgtgcagcccctgctcctcggaggccagggtgggcagctgcagctgctgcacctggcagaaggggcgtcggtgccccgcctggcaggccccccccagtctcttccttccaggatcgactccctccctgcatttcctctgctggagcctaagatccagtggcggctgcaggagcgcctgaaagcaccgaccataggtctggctgccgtcgtcccgcccttgccctcagcgcccacaccaggcctggtgctcttccagctctcggcggcgggagatgtcttctaccagcagctccgcccccaggtggactccagcctccgcagagatgctgggcctcctggcgacacccaacctgactgccatgcccccacagcttcctggacctcccaggacactgccggctgcagccagtggctgaaggccctgctaaaagtgcccctggctcctcctgtgtggacagcacccaccttcacccaccgccagatgctgggcagcacagagctgcggagggaggaagaggaagggcagcggctgggtgtgctccgcaaggccatggcccgagggcagctcctgctgcagagagacctgggctccctccctgcggcagagccaccccctgcacccgagtcaggcctagaggacaagctcagtgagcgcctgggggaagcctgggcaggccgaggggctgcctggtgggagaggcagcagggcaggacctcggagcccgggagacagaccaggcggcccaagcgccggacccagctgtccagcagcttttcgctcagtggccatgtggatccctcagaggacaccagctcccctcatagccctgagtggccacctgctgatgctctgcccctgccccccacgaccccgccctcccaggagttgactccggatgcatgcgcccagggcgtcccatcagagcagcggcagatgctccgtgactacatggccaagctaccaccccagagggacaccccaggctgtgccaccacacctccccactcccaggcctccagcgtccgggccactcgctcccagcagcacacacccgtcctctctagctctcagcccctccggaagaagcctcgaatgggcttctgaggacacaaggtgggctgccctcaagccccagagagcccctcatccttcctctgggaccagatgtgccttccacagttgaaacttgagaagcagagctcgccaccttctggaggccactgtgatgatgagccaagcaatttggagccaagttgaagggacagggcaacaaaatacagtagtagtttcttttgtattttgtatattcgcctgaagatcatcccgcaaggcaggctggaggtgccggtgggcctgtgttgctgggattttagtctgtgctgggaggcagggctccgctgcgcctcagctgtgggggcctcaggcaggtccctcagttctcacgccttcctgtccagtggaatgggggccaggagtgctggctcctcgtgtttggtgagggtggagtgaggcccctgcagagctgctgatgaggtgggcacagcggccgttggcagctgctgttgtgggttgctttgtcaatctctgccccggtctgatgtttcctacagggagatgccttggatccaggttcagggactaaatacacttggcagctgaagatgaattggaatggtcacgttttttaggctggacagcgtcccgccacagctactacctgacactgagctcatgcagagagatgatggctgatgttccttctcccttgggacatgggtctggcacctgtgggctgtcgatagtgccctctgagcagagggtcacggtcatgtcagtttgggggaattctctgttgtgcctcacagactcccccctttctttcctccctccccttctcattttgatgtctaaagcatcaagtccctcttcctcggagtttctctagctgcagtggaagattctgttttcctgtggggaaaatgctcacttgagattttgcagggacccgggtctgtctggtttctgatgacatagtaagagaaaggtcttttttcaggttggctggtgaaaggaattgcatgtgactcacacaaacaggagctagcccaatcatacactgactcgcgtgggtgttaaaatgtttatcatgcctaagggagacatttatgattaaaccatttatgctacataaaaaaaaaaaaaaaaaaaaaaaaaaaaaaaaaaaaaaaaaaaaaaaaaaaaaaaaaaaa

SEQ ID NO: 31178 - DNA, 6287 bp, Homo Sapiens
ggcagctccgagggcacctccggttctcccccatcctccgggagtgtctgggcgctcagtccgctctgatcccgccgaaaccacctgcggttggcaggcaggagactaggcgtctgccggggagggcagggacccgctaagctgatctcctgtacagtagtgctacttaaaatatgctggggaccatcaccatcacagttggacagagagactctgaagatgtgagcaaaagagactccgataaagagatggctactaagtcagcggttgttcacgacatcacagatgatgggcaggaggagacacccgaaataatcgaacagattccttcttcagaaagcaatttagaagagctaacacaacccactgagtcccaggctaatgatattggatttaagaaggtgtttaagtttgttggctttaaattcactgtgaaaaaggataagacagagaagcctgacactgtccagctactcactgtgaagaaagatgaaggggagggagcagcaggggctggcgaccacaaggaccccagccttggggctggagaagcagcatccaaagaaagcgaacccaaacaatctacagagaaacccgaagagaccctgaagcgtgagcaaagccacgcagaaatttctcccccagccgaatctggccaagcagtggaggaatgcaaagaggaaggagaagagaaacaagaaaaagaacctagcaagtctgcagaatctccgactagtcccgtgaccagtgaaacaggatcaaccttcaaaaaattcttcactcaaggttgggccggctggcgcaaaaagaccagtttcaggaagccgaaggaggatgaagtggaagcttcagagaagaaaaaggaacaagagccagaaaaagtagacacagaagaagacggaaaggcagaggttgcctccgagaaactgaccgcctccgagcaagcccacccacaggagccggcagaaagtgcccacgagccccggttatcagctgaatatgagaaagttgagctgccctcagaggagcaagtcagtggctcgcagggaccttctgaagagaaacctgctccgttggcgacagaagtgtttgatgagaaaatagaagtccaccaagaagaggttgtggccgaagtccacgtcagcaccgtggaggagagaaccgaagagcagaaaacggaggtggaagaaacagcagggtctgtgccagctgaagaattggttgaaatggatgcagaacctcaggaagctgaacctgccaaggagctggtgaagctcaaagaaacgtgtgtttccggagaggaccctacacagggagctgacctcagtcctgatgagaaggtgctgtccaaaccccccgaaggcgttgtgagtgaggtggaaatgctgtcatcacaggagagaatgaaggtgcagggaagtccactaaagaagctttttaccagcactggcttaaaaaagctttctggaaagaaacagaaagggaaaagaggaggaggagacgaggaatcaggggagcacactcaggttccagccgattctccggacagccaggaggagcaaaagggcgagagctctgcctcatcccctgaggagcccgaggagatcacgtgtctggaaaagggcttagccgaggtgcagcaggatggggaagctgaagaaggagctacttccgatggagagaaaaaaagagaaggtgtcactccctgggcatcattcaaaaagatggtgacgcccaagaagcgtgttagacggccttcggaaagtgataaagaagatgagctggacaaggtcaagagcgctaccttgtcttccaccgagagcacagcctctgaaatgcaagaagaaatgaaagggagcgtggaagagccaaagccggaagaaccaaagcgcaaggtggatacctcagtatcttgggaagctttaatttgtgtgggatcatccaagaaaagagcaaggagagggtcctcttctgatgaggaagggggaccaaaagcaatgggaggagaccaccagaaagctgatgaggccggaaaagacaaagagacggggacagacgggatccttgctggttcccaagaacatgatccagggcagggaagttcctccccggagcaagctggaagccctaccgaaggggagggcgtttccacctgggagtcatttaaaaggttagtcacgccaagaaaaaaatcaaagtccaagctggaagagaaaagcgaagactccatagctgggtctggtgtagaacattccactccagacactgaacccggtaaagaagaatcctgggtctcaatcaagaagtttattcctggacgaaggaagaaaaggccagatgggaaacaagaacaagcccctgttgaagacgcagggccaacaggggccaacgaagatgactctgatgtcccggccgtggtccctctgtctgagtatgatgctgtagaaagggagaaaatggaggcacagcaagcccaaaaaagcgcagagcagcccgagcagaaggcagccactgaggtgtccaaggagctcagcgagagtcaggttcatatgatggcagcagctgtcgctgacgggacgagggcagctaccattattgaagaaaggtctccttcttggatatctgcttcagtgacagaacctcttgaacaagtagaagctgaagccgcactgttaactgaggaggtattggaaagagaagtaattgcagaagaagaaccccccacggttactgaacctctgccagagaacagagaggcccggggcgacacggtcgttagtgaggcggaattgacccccgaagctgtgacagctgcagaaactgcagggccattgggtgccgaagaaggaaccgaagcatctgctgctgaagagaccacagaaatggtgtcagcagtctcccagttaaccgactccccagacaccacagaggaggccactccggtgcaggaggtggaaggtggcgtacctgacatagaagagcaagagaggcggactcaagaggtcctccaggcagtggcagaaaaagtgaaagaggaatcccagctgcctggcaccggtgggccagaagatgtgcttcagcctgtgcagagagcagaggcagaaagaccagaagagcaggctgaagcgtcgggtctgaagaaagagacggatgtagtgttgaaagtagatgctcaggaggcaaaaactgagccttttacacaagggaaggtggtggggcagaccaccccagaaagctttgaaaaagctcctcaagtcacagagagcatagagtccagtgagcttgtaaccacttgtcaagccgaaaccttagctggggtaaaatcacaggagatggtgatggaacaggctatcccccctgactcggtggaaacccctacagacagtgagactgatggaagcacccccgtagccgactttgacgcaccaggcacaacccagaaagacgagattgtggaaatccatgaggagaatgaggtcgcatctggtacccagtcagggggcacagaagcagaggcagttcctgcacagaaagagaggcctccagcaccttccagttttgtgttccaggaagaaactaaagaacaatcaaagatggaagacactctagagcatacagataaagaggtgtcagtggaaactgtatccattctgtcaaagactgaggggactcaagaggctgaccagtatgctgatgagaaaaccaaagacgtaccatttttcgaaggacttgaggggtctatagacacaggcataacagtcagtcgggaaaaggtcactgaagttgcccttaaaggtgaagggacagaagaagctgaatgtaaaaaggatgatgctcttgaactgcagagtcacgctaagtctcctccatcccccgtggagagagagatggtagttcaagtcgaaagggagaaaacagaagcagagccaacccatgtgaatgaagagaagcttgagcacgaaacagctgttaccgtatctgaagaggtcagtaagcagctcctccagacagtgaatgtgcccatcatagatggggcaaaggaagtcagcagtttggaaggaagccctcctccctgcctaggtcaagaggaggcagtatgcaccaaaattcaagttcagagctctgaggcatcattcactctaacagcggctgcagaggaggaaaaggtcttaggagaaactgccaacattttagaaacaggtgaaacgttggagcctgcaggtgcacatttagttctggaagagaaatcctctgaaaaaaatgaagactttgccgctcatccaggggaagatgctgtgcccacagggcccgactgtcaggcaaaatcgacaccagtgatagtatctgctactaccaagaaaggcttaagttccgacctggaaggagagaaaaccacatcactgaagtggaagtcagatgaagtcgatgagcaggttgcttgccaggaggtcaaagtgagtgtagcaattgaggatttagagcctgaaaatgggattttggaacttgagaccaaaagcagtaaacttgtccaaaacatcatccagacagccgttgaccagtttgtacgtacagaagaaacagccaccgaaatgttgacgtctgagttacagacacaagctcacgtgataaaagctgacagccaggacgctggacaggaaacggagaaagaaggagaggaacctcaggcctctgcacaggatgaaacaccaattacttcagccaaagaggagtcagagtcaaccgcagtgggacaagcacattctgatatttccaaagacatgagtgaagcctcagaaaagaccatgactgttgaggtagaaggttccactgtaaatgatcagcagctggaagaggtcgtcctcccatctgaggaagagggaggtggagctggaacaaagtctgtgccagaagatgatggtcatgccttgttagcagaaagaatagagaagtcactagttgaaccgaaagaagatgaaaaaggtgatgatgttgatgaccctgaaaaccagaactcagccctggctgatactgatgcctcaggaggcttaaccaaagagtccccagatacaaatggaccaaaacaaaaagagaaggaggatgcccaggaagtagaattgcaggaaggaaaagtgcacagtgaatcagataaagcgatcacaccccaagcacaggaggagttacagaaacaagagagagaatctgcaaagtcagaacttacagaatcttaaaacatcatgcagttaaactcattgtctgtttggaagaccagaatgtgaagacaagtagtagaagaaaatgaatgctgctgctgagactgaagaccagtatttcagaactttgagaattggagagcaggcacatcaactgatctcatttctagagagcccctgacaatcctgaggcttcatcaggagctagagccatttaacatttcctctttccaagaccaacctacaattttcccttgataaccatataaattctgatttaaggtcctaaattcttaacctggaactggagttggcaatacctagttctgcttctgaaactggagtatcattctttacatatttatatgtatgttttaagtagtcctcctgtatctattgtatatttttttcttaatgtttaaggaaatgtgcaggatactacatgctttttgtatcacacagtatatgatggggcatgtgccatagtgcaggcttggggagctttaagcctcagttatataacccacgaaaaacagagcctcctagatgtaacattcctgatcaaggtacaattctttaaaattcactaatgattgaggtccatatttagtggtactctgaaattggtcactttcctattacacggagtgtgctaaaactaaaaagcattttgaaacatacagaatgttctattgtcattgggaaatttttctttctaacccagtggaggttagaaagaagttatattctggtagcaaattaactttacatcctttttcctacttgttatggttgtttggaccgataagtgtgcttaatcctgaggcaaagtagtgaatatgttttatatgttatgaagaaaagaattgttgtaagtttttgattctactcttatatgctggactgcattcacacatggcatgaaataagtcaggttctttacaaatggtattttgatagatactggattgtgtttgtgccatatttgtgccattcttttaagaacaatgttgcaacacattcatttggataagttgtgatttgacgactgatttaaataaaatatttgcttcactt

SEQ ID NO: 31179 - DNA, 3889 bp, Homo Sapiens
aaaaactcagggaagcccagggcccgtgttgtgcttttggcccaggtaggtggacagacatgtcccaggcgggggacgtagaaggccccagcacaggagaccctgtgctcagtccccaacacaactgtgagcttttacagaacatggaaggagccagctccatgccaggcctgtcaccagatgggccgggagcaagctctgggcccggagtcagggctggcagcagaaggaagatccccaggaaggaggcccttcgaggtggcagctcccgggctgcaggtgctgctgaggtccggccaggggtcttggagctgctagctgtggtacagagccggggctcgatgctggctcctgggctccacatgcagctgccctcggtgcctactcaggggagagctctgacctccaagaggctccaggtttctctgtgtgacatcttagatgacagttgccccaggaaactttgtagcaggtctgctggcctcccagagagagctctggcctgcagggagaggcttgcaggagtggaggaggtgagctgcctcaggcccagggaggccagagacggtggaatgagttctccagggtgtgacagaagaagccccacactcagcaaagaggagccccctggaaggcccctgacatcctcaccagacccagtccctgtgagggtaagaaagaaatggaggaggcaaggggctcattcagagtgtgaggaaggggctggtgacttcctgtggcttgatcagagccctcgtggggacaacctcctgtctgtgggagaccctccccaagttgctgacctggagtccttgggaggcccttgcagacctccctctccaaaagacactgggtctgggcctggagagccaggtggaagtggggcaggatgtgcctcagggactgagaaatttggatatttgcccgctacaggggatgggccccagccaggcagcccctgtggccctgtcgggttcccagtgcccagtggaggggagtccctcagttcagctgcacaggctcctccacagagcgcagcactgtgcctgggggcgtcagcacaggcctctgcagagcagcaagaagctgtgtgtgtcgtgcggactggcagcgatgaaggccaggctccagcacaggaccaggaggagctggaggccaaggctcagccagcttccaggggaaggctggagcaaggactcgctgcccccgctgacacctgtgccagctcccgggagcccttgggcggcctcagctcctccctggatactgaagccagcagggcctgctcaggcccattcatggagcagagaagatccaagggcactaagaacctgaagaaaggtccagtgccctgtgcccaagaccggggcacagacagaagctcagacaactcccaccaggacaggccagaggaacccagcccaggaggctgccccagactggaggaagtgaaaataccccatggagtgaagcttgtgtgctacctgggttccgggccagtgatccagctcctgggggccatcagccacggccaggcaggggggcagctgccaccaaagctggaggttctagaggacttgatggaggtcagctcaccctcacctgcccagaggctcagaaggaagaaaaggcccatggtgcagggccctgctgggtgccaggttttccagccttctccttcaggaggcacagcaggggaccctggtggcctctctgaccccttctaccctccaagaagcggttccctggcccttggcgaccccagctcggaccctgcatgttcccagagtggcccaatggaggctgaagaggattctcttccggagcagccagaggactcagctcagctccaacaggagaagccatccctgtatattggggtgcggggcactgttgtccgttccatgcaggaggtactatggactcgccttcgggagctcccagacccagtgctgagtgaggaggtggtggagggcattgctgctggcattgaggcagccctctgggacctgacacaaggcaccaatggccggtacaagaccaagtatcgcagcctgctgttcaacctgcgggaccccaggaacctggacttgtttctcaaagtggttcatggagatgtcaccccctacgacctggtgcggatgagctcgatgcagctggccccccaggagctggcccgctggcgggaccaggaggagaaaaggggcctgaatatcattgagcagcaacagaaggagccgtgcagacttccagcctccaaaatgacccacaagggcgaagtggagattcagcgggacatggaccagacactgaccctggaggatctggtgggaccgcagatgttcatggactgcagcccacaggccctgcccatcgcatcagaggacaccacggggcagcatgaccaccacttcttagaccccaactgccacatctgcaaggactgggagccctcgaatgagctgctaggctccttcgaagccgccaagagctgcggggacaatatcttccagaaagccctaagccaaactcctatgcctgctccagagatgcccaaaaccagggagttgtctcccacggaaccacaggacagggtccctccatctgggctccatgtgcctgctgcacccacaaaggccctgccctgcctgccaccctgggaaggtgttctggacatgttctccatcaagcggttccgggccagggcccagctggtctcgggacacagctgtcggcttgtccaggctctgcccaccgtgatccgctcggcaggctgcatcccctccaacattgtctgggaccttctggccagcatctgcccagccaaggccaaggacgtctgcgtggtcagactgtgcccacatggggcccgggacacccagaactgccgcctgctctactcatacctcaatgataggcagcgccacgggctggcctctgtggagcacatggggatggtcctgctgcccctgcctgccttccagcccctgcccaccaggctgcgccctttggggggcccaggcctttgggctcttcctgtctcccctctcctttccccaggtctggaggtcactcactcaagtctgttgctggctgtgctgctccccaaggaagggcttccagacacagcagggtccagcccctggttggggaaggttcaaaagatggtctccttcaacagtaaggtggagaagagatactatcagccagatgacaggaggccgaatgtgcccctgaagggcacccctcccccaggaggtgcctggcagcagagccagggcaggggcagtatagctccaaggggaatctctgcttggcagaggccccccagaggcagggggaggctctggccagagcctgaaaactggcagcatcctgggcgagggcagtggcccccagagccaggcttgcgccagtcccagcatccctattcagtagcaccagctggtcatggctttggccgtggccagcacttccacagggactcctgtccccaccaagccctgctccggcacctcgaatccctggcgaccatgagtcaccagctccaagccttactgtgcccccagaccaagagctccatcccccgccctctgcagcgtttgtctagcgcccttgcagctccagagccccctggcccagcccgtgactcctctttggggcctacagatgaagctggctctgagtgtcccttccctagaaaggcctgaccctccttacccaccagaacaggggttttgatgccctcactagtgttgaagcctgttccagagagaggtgggactgcaaggagaggatggtcagccctacccacctgccctgtttgagcttcctgtttgacaatgtttgctgttgattttttgttcaataaagaatttggtaaaattgg

SEQ ID NO: 31180 - DNA, 1942 bp, Homo Sapiens
caggaactgtgaagggtagatttgctgaaatggagaaacaaagacaagaggaacaaaggaagagaacggaggaggaacgaaaacgcagaattgagcaggatatgttagaaaagaggaaaatacagcgtgaattagcaaaaagggctgaacagattgaggacataaacaatacgggaactgaatcagcatcagaggaaggagatgattcactacttataactgtggtacctgtcaaatcatataaaacatctggaaaaatgaaaaagaattttgaggatctagaaaaagaacgtgaagagaaagaaaggatcaagtacgaggaagataaaagaataagatatgaagaacaacgaccatctctcaaggaagcaaagtgtctttcattagttatggatgatgaaatagaaagtgaagcaaaaatttttaaagggtaccgccctggtaaactcaaactcagttttgaagaaatggaaaggcaaagaagagaagatgaaaaaaggaaagcagaagaagaagccagaaggagaatagaggaagaaaagaaggcgtttgctgaagcaaggagaaatatggtagtagatgatgactccccagagatgtataagacaatctctcaagaatttcttacaccgggaaaactggaaattaattttgaagaattattaaaacaaaaaatggaagaagaaaaacgacgaacagaggaggaacggaagcataagctagaaatggagaaacaagaatttgaacaactgagacaggaaatgggagaggaagaggaagaaaatgaaacctttggattgagcagagaatatgaagaactgatcaaattaaaaaggagtggctctattcaagctaaaaacctaaaaagcaagtttgaaaaaattggacagttgtctgaaaaagaaatacagaaaaaaatagaagaagagcgagcaagaaggagaacaattgaccttgaaattaaagagcgagaagctgaaaattttcatgaggaagatgatgttgatgttaggcctgcaagaaaaagcgaggctccatttactcacaaagtgaatatgaaagctagatttgaacaaatggctaaggcaagagaagaagaagaacaaagaagaattgaagaacaaaagttactacgcatgcagtttgaacaaagggaaattgatgcagcactacaaaagaaaagagaagaggaggaggaggaagaaggtagcatcatgaatggctccactgctgaagatgaagagcaaaccagatcaggagctccatggttcaagaagcctcttaaaaacacatcagttgtagacagtgagccagtcagatttacggttaaagtaacaggagaacccaaaccagaaattacatggtggtttgaaggagaaatactgcaggatggagaagactatcaatatattgaaaggggagaaactcactgcctttacttaccagaaactttcccagaagatggaggagagtatatgtgtaaagcagtcaacaataaaggatctgcagctagtacctgtattcttaccattgaaagtaagaattaatcactctttttatcttttattctattaatttttttttccttaaaatcacttttcttcttctcttttttagctgatgactactagctcccctcccctctccctggaactttctctttcactccaactttcttactacatccatcttttctgtggcggggccaaaaaaggaaaccaggagtgccactatgctgacttcttattccttttcataacagtcttcaaagcacagctcatctaaagaatgcctacttcttttccaaataagcatcagatttatcgcctattatgcagtaacagtcaataaaatgtacttatgggggggaattactcaattattctatcagaacctattataaagactgtatttcccatagacgtttacagcaactatgttt

SEQ ID NO: 31181 - DNA, 4191 bp, Homo Sapiens
aactacactccccacaacgccttgcgcctcccgctcgctgcggttgattagggccaatcgggagaggcagctgtggcgggggccgaggagggacattttaaaagggccggagattgcgggcgtcagaaagtggccatggcggatacagcgactacagcatcggcggcggcggctagtgccgctagcgcctcgagcgatgcacctcctttccaactgggcaaaccccgcttccagcagacgtccttctatggccgcttcaggcacttcttggatatcatcgaccctcgcacactctttgtcactgagagacgtctcagagaggctgtgcagctgctggaggactataagcatgggaccctgcgcccgggggtcaccaatgaacagctctggagtgcacagaaaatcaagcaggctattctacatccggacaccaatgagaagatcttcatgccatttagaatgtcaggttatattccttttgggacgccaattgtagtcggtcttctcttgcccaaccagacactggcatccactgtcttctggcagtggctgaaccagagccacaatgcctgtgtcaactatgcaaaccgcaatgcgaccaagccttcacctgcatccaagttcatccagggatacctgggagctgtcatcagcgccgtctccattgctgtgggccttaatgtcctggttcagaaagccaacaagttcaccccagccacccgccttctcatccagaggtttgtgccgttccctgctgtagccagtgccaatatctgcaatgtggtcctgatgcggtacggggagctggaggaagggattgatgtcctggacagcgatggcaacctcgtgggctcctccaagatcgcagcccgacacgccctgctggagacggcgctgacgcgagtggtcctgcccatgcccatcctggtgctacccccgatcgtcatgtccatgctggagaagacggctctcctgcaggcacgcccccggctgctcctccctgtgcaaagcctcgtgtgcctggcagccttcggcctggccctgccgctggccatcagcctcttcccgcaaatgtcagagatygaaacatcccaattagagccggagatagcccaggccacgagcagccggacagtggtgtacaacaaggggttgtgagtgtggtcagcggcctggggacggagcactgtgcagccggggagctgaggggcagggccgtagactcacggctgcacctgcagggagcagcacgccaaccccagcagtcctgggccccctgggagagtgctcaacctacagtggagggagactgacccattcacattttaacataggcaagaggagttctaacacatttcgtacaaaaaaataatcaagtgcatttctgggccttatgtggggttgtcaaaactccactcagcacaattatgtgtgaagctgaaaaattgtagagtgcccatggggtagaagtagaatccttttatactttggttccttttttatttttattttttatcagaatcaaatctgagccttagtttcagctgaccagaagtggcaggaggacaggtggaggcgagccagattaggcctggagttgggctggtttggtggccaggctggtaaatttaggatattacaatggccagcccagatggctccctgggctggcatggggaggggagagaaggtggtctgcaccccacaggatgaactagccatgactagggtcctcaggcagtggcccagggaatcagggagcactggaggcctctgcaagattctgtgggcagctggctctgaatgtagccagcccacatccattccagagctgcagaaccagtccctctgagtgaagtccagtgaccctggagctagggtcccccttcgtggagctctaactgattcagggcccctgaagtgaccccagctccaggcaggaaaccccgagaaggaatggtgcttggcaggaaccatggacctgcacttggcctcttcgggaagatcctccttccaggccccaggctggatgctgggttctggggctgagagtggggctagactgggctggctgccttctgcggagcttctccagccaccaaggctgcctgccccatcccatccctttctaagcaggaaggtctcatgcctgagaatgcctaggccagctccttagacacctatcagagaagcagcatcaacctaggagcagtgggccctggctctgtcactaaatggcagtgagatgtcagacaaattcattcccttctctcagcctccactccctgtctgaaaccagaagactggatcaaggggttcccactggctcctccagcaagacctcgtctttgcttgtcctgctcagatgctggtcatcctgggcatgtccccagtgtggactctggactgggaagggggcaggcccctttggacctgcagttggcctcagcagaaggccttgccttgtgtaygtgactccatatcccgggagcagttgacctttgccaaacactttacagttctggaggaggaggtaacatagatgcctgggcctgatggtggggccatacccatgtgtygcctctcactctggcagcctcagaggccccttgctgctggctcccatctccctcccatttgcagaccaggaaggaagagcaagctgtacaaagggaagcagagcctggggtgggtgtgagcagggtgacccctcatctgaaaggcccaaaccagggggaagcaccagcctcagtgcagccccctcctgaccccacctagaatggaagcctccacctgcagccccaggcctccctcccccggggtctccacctcaggggagacttaggccagaggtgaacattcatgtgtaggaagaggccgctgcagggtggcatcttagggtaggggaagtgtgctgaggtgggccttccatgggcatggccgttgcctctctgccagccgctggtgcccaccagctggctctgcagcacattgccctgaggggcctgccactctcctgaggagcagcccacctgctgcccgtgaggagggggagaagggttagacaagcctggaggacaaaacagcgggagtgtgggggtgccatggtgttggaggggcaggcctttttgagccaatcccaccataatgtgaatatgccagtgactgctgcgctgtgctggtctctaggcctgaactaggtgctggcatgtctgggtcgtcttttgaaaagctcacttcaagctcaccctgctcctacctatcataaggtcttattcttgtgcactttatcttgggaccaaaactgcctacccaccccttcccgccctccccctgccagaggcctggtgccctggcccagcctgtggcctcagcatctcataactcatttgctttgtctcccggatgatttccgtcatgctcccaaatgcagcttcaggtgagccaaggggtctgctcctgtggcggtgcagtggcaaaggatccagatagcctagggtgagggtgacagagggacagtgggctatgccactaggccctggtctggctttggaaagacctgtgaggggaaaccttcacccagcacccatgccccactctgctgaggccagaggaagggaggcctgaggggcagattggttcatgcctggggtggaggctaagcctggacacagtcagggcggggctggccagctgtgcgagaacacaagccacgcctgcgatggtgctgcacccctggtgtccctgcctggccctcctctggtcacttcaaacatgccctcaggcttggggatgcccttcttccattcccagacagcagtgtgagggtgcagggaccaagatgtcaagctggccgtggagtcgagctggccgacggacccctttcacctggttatgagccgacttctttggtgttctggcctctggcctgggaaaagggcaggagcctagaggaggaaaaaggctggtggacagacccagggtggtcttcaagcctggcccagtgagagtgaggcccccgcacgcaagcctcagccactcccaggggcctttgcagcgtctttttaacctcagaaaatttctcaatctatgtgatttgtgtaatactaatgagctttgggcaataaatacgggatttaaagccaaaaaaaaaaaaaaaaaaaaaaaaaaaaaaaaaaaaaaaaaaaaaaa

SEQ ID NO: 31182 - DNA, 3074 bp, Homo Sapiens
cccctaccgcgcggcccgcgccccgccggctcccgtcactgggtaagagaagactggaagcatgtcggagttttggttaatttctgcccctggcgataaggaaaatttgcaagctctggagaggatgaatactgtaacctccaagtccaacctgtcttataataccaaattcgctattcctgacttcaaggtggggaccttggattccctggttggcctctctgatgagttggggaaactcgacacctttgctgaaagcctcataaggagaatggctcagagcgtggtggaagtcatggaggactcaaaggggaaggtccaggagcacctcctggcaaacggagttgacttaacatcctttgtgacccactttgaatgggacatggccaaatatcctgtcaagcagccgctcgtgagtgtggtggacacaatagccaagcaactggcgcagatcgagatggacctgaagtcccgaacggccgcctacaacactctgaagacaaacctggagaacctggaaaagaaatccatggggaacctcttcacccggacactgagtgatattgtgagcaaagaggacttcgtgctggattctgaatatctcgtcacacttctggtcatcgtccccaaaccaaactactcacaatggcaaaaaacctacgaatctctctcagacatggtggtccctcgatcaaccaaactcattactgaggacaaggaagggggccttttcactgtgactctgtttcgaaaagtgattgaagatttcaaaaccaaggccaaagaaaacaagttcactgttcgtgaattttactatgatgagaaggaaattgaaagggaaagggaggagatggccagattgctgtctgataagaagcaacagtatggccccctgctgcgctggctcaaggtgaacttcagtgaagccttcattgcctggatccacatcaaggccctgagagtgtttgtggagtccgtgctcaggtatggactaccagtgaacttccaggcagtgctcctgcagccgcataagaagtcatccaccaagcgtttaagagaggttctaaactctgtcttccgacatctggatgaagtagccgctacaagtatactggatgcatctgtggagatcccgggactgcaactcaataaccaagactattttccttatgtctacttccatattgaccttagtcttcttgactagaaaggccagctggcacctctgtctcatgttcgtgcagattattacagacacctctttcctttagccagagaatggttcaaatgtcttacagaactaagatctttttcagagaaattgctcacaaaagttagtgacagttgtatttatttttttaagttacaataaaatgctctcaagtcctttgaatgttccaacaaattcaaaacttcattttctgaatgttttacataaatgcgaactacctgttcgcattggtaacctgctgctgtatttcatgtcttaacggctattttgaggttcattaacaacatagaaagccttgaactgtataaccagctagattccttaataattagtcactagagacagcccaaagacaaatattgggcaggaaatcagttctcactgagcccggtttccatgtaaaatctctgttgtggtgggcataggtggcaccatctaaagaaaagaggtcttgttttttgtttaaaaaagtttgtggggaggaaagacatctgtgtatcacttcaaaatattgatttactgctaaacatcactctgaatttatgatgtggatactaacttcatacatttatcggcattgtccaaaatattttattctttaatggaaaaagccattaatattcaaatgaagggatcacattaaaaaaaacccatacataagaaacagcctccaagaacattcaagcagcagtcagagagaaaaatgtttcgacagccaagttttcttcaaaatattatgtgacagaatacgactcaattcaccggctacaacaattcatagaatttttcaatgttttcttgagatgcaaaagttcactgttgcagtgttttcaaatgaccaatcaagtactacttcttggttaaaaggccactggtagagtcatctgagtgtagagaatgtcccttcactgctggaaaaatccactggctcccaagaaaagaaaatggtctgaagcctctgttgtggctctcacaactcatctttccctaagtcatcaagctccacatcactgaggtcaatgtcatcctccacgggaagctgggagacgacagaaagccactgttagatctgcagaaggggacaccctggaaggtcaacatctcattttatggaagagcgactctctggagctactcctgctacaatccaggttctcctcagtctgactcctaccctgaccttcgtacctatgattatacggatggaaaagctcagaactcaggtgaaacatttcaacatcacatcactcaccattttaacactggaagccacttgaacgtgtccttttgaggagggtgggacacaacagtacagaaataagtgctaatttcaaagctatcattttctatttttctaagataaagtaaatgaattccaggttaaatgttcactttaaggtaataatcaggaaagcaaccttactactgaaatgtatcttggctgtcaagagtatcaaatgccatgcagcacttaaacttgtgataaggaagatgaagggtcttcagagaagaacctcttaaaaggcccacgggtgcaccagggctgaggtctgatgggaaggacttgactccaggtgcagagatgcacaggctcaagagagtaaaccaggactgctgcccgcacagcttccctcccgggcactcacctcgccatccctgccgtcccaaggctctctctcaacgatggtagggaaagccccgcctcctacaggtgccgtggagccacgcccaaaagagagctcccttagggaaaaatgaccaaaacacacacacacatttacaatggactgctggtgcagaagaataaacaactttaaaaataaaaaaaaaaaaaaaaaaaaaa

SEQ ID NO: 31183 - DNA, 1867 bp, Homo Sapiens
gtttttaggcctttgccacgcctcgggagcgccacgaactcaacagccgcccaagccgccttccggctcgcggtctgcggacgcgctcggagttgggggccttcgccaacagctgccgtaccgtgccgcgtcgcagccgcacgctagcggggtcaacggcgcggcaggcgcaggggtcctcgccaaggttcggaagaggaccttgaaaatggcttctgggcatgcgccacagcggccgttacgagacgcaaaaccgacgccttggaactgagagcctagagggacggagctcggcgcaccatgaggctcccggggcccaaggccgaccgtgagagcgcacgagctgagtcagtgctgattctctcaaatagagcttgaaggataaatcttcatttttgtttcaacaaaacttcgaaacaaaatggaagaaaataatctacagtgcagtagtgtggttgacggtaattttgaagaagttcccagggagacggcaattcagtttaaacctccactatacagacagcggtaccagttcgttaaaaatttagtggatcaacatgagcctaagaaggttgcagacctgggatgtggtgatacttcactcttaaggctgctaaaagtcaatccatgcattgaattgcttgttggagtagatattaatgaggataaattacgatggagaggggattcgttagctcctttcctgggggattttctgaaacctcgggatctgaatttgaccatcacattgtatcatggctccgttgtggagagagactctcgtttgcttggatttgacttgataacgtgtattgaattaatagaacatttggattcaggtgatctggccagatttcctgaagtggtatttgggtacctgtttccatccatgattgtcatcagcacaccaaactctgaattcaatcccctgtttccatcagtgaccttaagagattcagatcataaatttgagtggaccagaatggagtttcagacctgggctttatatgtggcaaatcgctatgattactctgtggagtttactggtgtcggggaaccaccagctggagctgagaatgttggatactgtacccagataggaatcttccggaaaaatggaggaaaggcaacagaatcatgtctttcagagcagcatgatcagcatgtttataaagctgtttttaccacctcatacccaagcttacagcaggaaaggttctttaaacttgtgttggttaatgaggtgtcccaacaagtggaaagcttaagagtgagccacctgccaaggcggaaagaacaggctggggaacggggtgataagcccaaagacattggtggctcaaaggcccctgtcccatgctttggaccagtcttcacagaggttgagaaggccaagatagagaactctcccacacccttctgtgttggagataaatttttcgtacctctgcagagactccttgcgtatcccaagttgaaccgcttatgtgctaatgaagagatgatgagatcagccattgctgactcaattcctctgagcagtgatggttctgcagtggtggctgacctgcgtaattattttgatgaacagtttgagttttgaaccatgtttatttcctgaaatttcagggtctcagcgatagttgtgctcacttagaatttagttttttttgtgtaatcctaattcaagtaatgtttttaaagtttcactgcaaaagtctatgttccaagccattggacagacctgcttgagatatggccagactgcagtgagccctgagaaagatatgagggtttaaaacgggtgctttcctttgattttggacttttttgttttctcaagaataaagaagttggatgtggtaat

SEQ ID NO: 31184 - DNA, 1848 bp, Homo Sapiens
aggaaaccaaggcaagctccccctgtcaaagcaccttggcccataagaagaaaagggggagccccagatgtgatgagcgcttccaggcttcaggctcagaaggcgcccccagctctcctgtaactcagaggccagtgtgatgggagttcctccactcagcacacttcccctgtaaacacgcctgtggtgggcaaaagggctttggaacggttgcttgtcttttctctcctgcgtaatttccactttcattcatgataatgtcgaacacgcacaaagctcggctggaacgccgggtcactggctcaaccaaccggtggcgtttgcccaaacagcctttctctggggacctgctctcactttcccagatgtgcaaggctctgagcatagactttgaggaagctttgaggaacccagacaggttatgcatttcacaaatccagaagtttttctttgagaatttcaagaacaaggacatccaaagtggggaagcagatgtgattctcgagtgcctgggcttcaaatgggagctccatcagccccagctttttcagtctgagaccttggccaagctctacctgaaagccctggcgcagggcaccacacaccccctgagggagctggaggagcttctgcgagctcaatcacctaagaagaccaaagaaaaatcccctgcaaagaggatcatcatttccttgaagatcaatgacccactggtcactaaagtcgccttcgccacggccctgaagaacctctacatgagtgaggtggagattaacttggaagacctactgggagtgctggcttccgcccacatcctccagttcagtggcctgtttcaaaggtgcgtggatgtgatgatagccagactcaagccaagcaccatcaagaaattctacgaggccggctgcaagtacaaggaagagcagctcaccaccggctgcgagaagtggctggaaatgaacttggttcctctaggggggacgcagatccacctccacaaaatcccacaggacctgctccacaaagtgctgaagtcccccaggttatttacctttagtgaattccatcttctgaaaacaatgcttttgtgggtcttcttgcaactgaactacaagattcaggcaattccgacttatgaaaccgtgatgacattttttaagagctttcctgagaactgttgctttctggaccgggacataggacggagcttgaggccgctcttcctctgcttgcgtctgcacggcatcaccaaaggcaaggatctggaggtgctgcggcaccttaacttcttcccagagtcatggctcgaccaggttacagtcaaccattaccacgcactggagaatgggggcgacatggtccacctgaaagatcttaacacccaggctgtgagatttgggctgctctttaaccaggagaatacaacttattcgaaaacgattgctctatatggattcttctttaagataaagggactcaaacatgatactacctcttatagtttttacatgcagagaataaagcacacagacctggaatctccctctgcggtctacgagcacaaccacgtcagcctgcgagcggcacgcctggtgaagtatgagatcagagcagaggccctggttgacggcaagtggcaggagttcaggacaaaccagatcaagcagaagtttgggttgaccacgtcatcctgcaaaagccataccttgaaaatccaaactgtgggcatcccaatctatgtaagttttgcattcatcttcccagcatcttgacagtttccagaagaatctatgggattttccccccactggtctgcataaaagaaaataaaatgacataaaagggagc

SEQ ID NO: 31185 - DNA, 6565 bp, Homo Sapiens
ggctcggagggcgggcgcgggcggaatggggactgcagctgcggcagcggcggcggcggcggcggcggcggccggggagggggcgcgtagcccgagccccgccgccgtgtcgctcggcctgggcgtggccgtcgtgtcgagcctggtgaacgggtccacgttcgtgctacagaagaagggcatcgtgcgtgccaagcggcgaggtacttcctatttaacagacattgtgtggtgggctggcacaatcgcaatggctgttggccagattggaaacttcctggcttacacggcggtccccacggtcctggtaacccccctgggcgcccttggagtaccgttcgggtccattttagcttcctatctcctgaaggaaaagctcaacatcttgggcaagttggggtgcctgctaagctgtgcaggctccgtcgtgctgattatccactccccaaagtctgagagtgtgacgactcaggctgagctggaggaaaagctgaccaacccagtgtttgtgggctacctgtgcatcgtgctgctcatgctgctgctgctcatcttctggatcgcgccggcccatgggcccaccaacatcatggtctacatcagcatctgctccttgctgggcagtttcaccgtgccttccaccaagggcatcgggctggcggcccaagacatcttgcataacaacccgtccagtcagagagccctctgcctgtgcctggtactcctggccgtgctcggctgcagcatcatcgtccagttcaggtacatcaacaaggcgctggagtgcttcgactcctcggtgttcggggccatctactacgtcgtgtttaccacgctggtcctgctggcctcagccatcctcttccgggagtggagcaacgtgggcctggtggacttcttggggatggcctgtggattcacgaccgtctccgtggggattgtccttatacaggtgttcaaagagttcaatttcaaccttggggagatgaacaaatctaatatgaaaacagactagattgcaataggagcttggatggttcgaggaataggcattggaggtggtttctggccgtgattggatgtgaagtagaagaggtcctcgatcatggtgttagaattgactggatagtaacaggtggtctggtggatagcggggagcatggctcagcaccagagcagaggcccagccagccctctgcagcccaaacgtccccaacggttgcctggcaccatctctctctgatgagacgaatctcattttcatttccattaacctggaagctttcatgaatattctcttcttttaaaacattttaacattatttaaacagaaaaagatgggctctttctggttagttgttacatgatagcagagatatttttacttagattactttgggaatgagagattgttgtcttgaactctggcactgtacagtgaatgtgtctgtagttgtgttagtttgcattaagcatgtataacattcaagtatgtcatccaaataagaggcatatacattgaattgtttttaatcctctgacaagttgactcttcgacccccacccccacccaagacattttaatagtaaatagagagagagagaagagttaatgaacatgaggtagtgttccactggcaggatgacttttcaatagctcaaatcaatttcagtgcctttatcacttgaattattaacttaatttgactcttaatgtgtatatgttcttagattagaataatgcaacttcgagtatgctttaatatttcaatattcaagttacaaatgtataaggcagttagaaataatacagtcacatgtcacttaatgatagggaaacattctgagaaatgcattgtaaggtgactttattgtgtgaacatcatggagtgcacttatacaaacctagatgggacacctatgacccacccaggccagatggtacagcctgttgctcctgggccacacacctgtacagcatgtgaccgcactgaataccgcaggcaattgtaacacagtggtgagtatttgtgtttacaaacataggaaaggtacagtaaaactatggtattacaatgttatgggaccaccgtcatgtaagtggtatgtctttgacagaaacatggttacgtggttcatgactgtatattcactggaagatagtcaagactaaagacacattagagcaaattgacccctttaacatgtgattattgtccaattaaagacagttgatttaagtagcatgaggtattattttatttgtattcgatctgtgttacctgggatccagtatcaaatatatccacattctttatcagcaagcattcatggccattcagaagaaataaattaggtaacttgataataaggctaagtgggagagtacctgttcaatagctcatatatcgagtaccctgtcatacaggaacaagttaaaggacacaattgaggttaggctagcttctacaaattgcaatatgcagtttttgaaagattttctaacaaaaagccaataaatgtagccatctccttgttgtttgcaatggcagagcatcctagagttcctcagctaacctctcattatgtgtcttaaatgcaaaagagccattaattatgccagtatttgaatcaaagaggtcattctctgtctatagtgttcccatccatgtgttccaaatgggagcatagcatgaagtgatgcacatatttcaccacggtatcatgtacttcatggccagtgttttatctcagcagggaactacgccaagttgaaagatggggttgggtaaagtagattaggtgaagtagaacataaaattgaatagtacccaattaaagttcctcagtaagaaaaaaaatgtgtttttgtaggcaaaaagaacatttctaaagtctcaaggaatagcttcctaaagtgttgagtaaagaggctaaataaaatgagactagtttaatatagagagaaaaatacctttatggagtaaacgtgtacatgatgatcatgggttgtcagtgatttgtgaactgagagcagcaacaacattattttttaaaaatcttaaatcctctcaatggatggttaacaaatgctcaaagtccattactctttttattggctcttgcaggttttgtgttttatcatcagtgcttttagaaatgcaggccttaacttactgaactgaactttctgaaaacgtaatgtagcagtatcaatatacttttgggcataaaaatagtttcctaggtaaggggtgtgagatattcaaagaatacatgtggctaacaagtgtaatgagaaagttcatgtgtcacatgaaaatgatcatgtttgtgttgctacagcttttgtgggaaatttagtttaaaggcagctcttggtgtaccttagtatattttaatccacaattataccattgatactgagaggtgatacccgatgatcttctctataatattcttagagtaaaacaaaatctcaaaagtattaatagctcttctacccttgaaggtgactggtcctgggacagttagaatctttcaggtttacctctgttcagcagatacttcagtaggatacatagcttttcttccagtgaaacaaagttcatatcatccattgtttttcaagcacgtgacaccagcctcaaagtaaatgacatgaccagtggttgaacagtctaattttcaaatttaatatagagcatataacttctgatttgatagtatttattttaaaaaattatgttttcatcattcatttgaaaatgaaaaagccccaaagtgagaactttgggggagggcctagaacatggatagatctcttagtggtctttccaaaagtacatgtacttgaaatattttcattatcatactattctttgaaaaaaaagatgcttactgtatacttgttttcaagcatcctctaaaatcaaaggttttgatcacaatatgcagatttctcttgatagatacttaaataggctatttctctcctcttcttgggcaatgccttgttttctcctctgaatatttgcatttgaaaggattgcttcctgttctgctcattgatcaaaggtagggccaattaaggattctaaccctaacccagcaccacaaagcccccctggagcatcttcccggctggcaggaccatgccatctctgtggagaaggtgctggggagggaagtccttccagtgccacatggagtgaggccctgcccatgctggggactttggggaggaatttggtattctggtggccttgctcagctctcattgagatcttttcctatcagaatgttagtgaatatacttcgcagctctttgttcagcaataaggaatattctttcaattcctgctcttcaagccaatttactacacccagttgtctttccagaagttcatcccagcggtaatatgttggtgtttgttcttctttggatttcacatctgttttctggtagaagtgagcactgttcacttgtgcagtcgtcttattttccttcttcctagatgactcagctctttgtaaatgttgtgctcaacttctaggggccagttctagactttggagatgcagtgtctcccaggtgtgcacggacacctggtccgtggaaacaggtgtgatgggcacaggctgctgcccttctgtctggtcgggggattcctcttcttcaagctgctcagctaacccagaagaggggagagagtactccggtggttcccagagcccctcccgttgtgccgcttcgacctgacacctgctcgatgctgacttaggcttcctgccaccaagcaggaaactagaaagagaacatttcagtgtaaggtctgttcccgacagcatggattagcttccgtgttctgaagttgttcttttcatggtgtctgacaccgagggcgttgttcgtccatcaggcgggattggatggagtcttggtgttttgccttctcagggaccaaaaatgtatcattgactccttaacagtgaccttcctcccaaggacatatccgtgttcatttttcataggttttactcatattcataggtagattctgttaatgtgagttggaaagaaaagaccaatttgtacaccagtcacaccacaagacagtttatcatataaaatacctcaattttttgtattcctcatttccacctcacaattgtactggtgatgaattttaagggtctgtcctttagcttataggtgatgtttcacatctggccagattcttatacctccattgtatacttgaaaaggttcagaattacaggaacagcagtgagaatttggcccactaccacgactcatttgtttcattcacattcctcacgtgcaacaacataattatattttaagaaaatgtaactttgttacatcaaaatatgttgtctagtaaaaagttgatattcagtagaacaaggatcatgtaaataaacatctatttcacatgtacccaaaagcatttaaaaagcagaatccagggcccagagcatgagccagggaggaggatgtttttcttcttttctctatttttccctaaattgtgcaaacataggtgagtctcttaacctttctgtgcctcagtttttctacctctaaaggggtgggatggttcttcaaattgtttctaaaacaccggcactttcagcagtgttctggtggcctgagatgagagcaccgtgttcagaagtgcctgggagtggcacagtggaaactccgcttgcacggaccatggagtctgctcaggaccatgctgtaggacacacagcctcatgcgctgagaaagcaaaggaagtgctgggtgtaaagtttgcatgattccatgaagctttagttttcctttttttgttttaaaagaaagggttttatatgttctattgtaaaatatggaaattaaacagggacttcagaaagccgcacagaaagatcaccttccgatggtgtgatgtgctcctgacattcggccgaggtctgtattctgaaaaagatttaatggcctgtgaaacacgtggattctgttgcactggatttgtaataaatgacgctgaacttcctgcttccaagcagctcaaccctgatgctgaactgacaccaggcgaatgtcagggctcccaaaccactagtgccaaagggtcatgttgaaaagttcagaatatttatttgtcagaatataataattgccccccaccttagtatttttgcactttacagaaatttagatactgtttttcagtggcttgagcgttttgccttttcaaaggataactattattttcttgaaaatggaatataatcatgagaggaagaagatgtaaaaaatgtcaaatgttgattggttgtgtaaaagttttgtcatagacatgtattggggagcttccaattagcatacatagacacatgtgtcagtggccaagacctgcttatattttgctttatagatgtagtcatagcatgttgttattgcctcatgtaaataaaaaggctattaagttttccagtaatatttattaatctgtatgtgttttaaaataaaataacttatttctagctgaa

SEQ ID NO: 31186 - DNA, 1755 bp, Homo Sapiens
gcgcgcctgggtctcggcggggctgcgggaccgcgagtgagtgtggtcgctcctggttctgccagctcccctgagagcctgaacccgggcttgagagcctcgccaccccgggtgacatccctgccgtgggcttgggggctctgggtgtgattccgccggtccgggtcccgcagcgaccacctacccagcgcagtcaggggcggggctgggacccagagcgggaccccggctgccgagtccaggtgtcccgcgggcctcgatttggggagcagaaaacgccaggtcttcaagggtgtctgccaccaccatgcctgacccatttggcagcagcctcgtgtgtggtggtctggtgtggacggtggaagcgtgattctgctgagtgtcagtgtgaccactcgtgctcagccgtatctcagcaggaggacaggtgccggagcagctcgtgcagctaagcagccaactgcagaaacgtcaggcctgttgcagtctccaaggcaccatgaatgccatcgtggctctctgccacttctgcgagctccacggcccccgcactctcttctgcacggaggtgctgcacgccccacttcctcaaggggatgggaatgaggacagtcctggccagggtgagcaggcggaagaagaggaaggtggcattcagatgaacagtcggatgcgtgcgcacagccccgcagagggggccagcgtcgagtccagcagcccggggcccaaaaagtcggacatgtgcgagggctgccggtcacttgctgcagggcacccgggatatatcagccatgataaagagacctccattaaatacgtcagccaccagcaccccagccacccccagctcttcagcattgtccgccaggcctgtgtccggagcctgagctgtgaggtctgccctggccgtgaaggccccatcttcttcggagatgagcagcacggctttgtgttcagccacaccttcttcatcaaggacagcctggccaggggcttccagcgctggtacagcatcatcaccatcatgatggaccggatctacctcatcaactcctggcccttcctgctggggaaggtccggggaatcatcgatgagctccagggcaaggcgctcaaggtgtttgaggcagagcagtttggatgcccacagcgtgctcagaggatgaacacagccttcacgccattcctacaccagaggaacggcaacgccgcccgctcgctgacatcgctgacaagtgatgacaacctgtgggcgtgcctgcacacctcctttgcctggctcctgaaggcgtgtggcagccggctgaccgagaagctcctggaaggtgctccgaccgaggataccttggtccagatggagaagctcgctggtgaggcaggggtgctgttgccggggccttggcccggatggccgtggggcggtaccagctgtctgctctcctggcaggaatcgctgagggagggaaacgcggctctgaatcagcccagaacgagccttcgggaagctcaccctccgatctcggtgtgattgttgtgattgttgtgatttcctgtctcgtttgccttgaccgccatgtgaaagaatctgttccccagctaggtggggaaaattcacaggtgggctgtctgtagagagaactggctgattaaaggcttctcgtcccgattttgtgatagccaagtgcttggcctggtcgacggtctttgctcctttacaaataaagtgttctgtttcaaaaaaaaaaaaaaaaaaaa

SEQ ID NO: 31187 - DNA, 1433 bp, Homo Sapiens
gatttagcagagagaggaggcagaggctgggaatgggagcagtaagctgtcggcaggggcagcacacccagcagggggaacacacccgggtggctgtccctcacaagcagggtggcaacatccggggtccctgggcccgaggctggaagagcctctggacaggtttgggaaccatcaggtcagatctggaagaactctgggaactacgggggcaccactatctgcaccaggaatccctaaagccagccccagtactggtagagaagcctctgccagagtggccagtgcctcagttcatcaacctctttctaccagagtttcccattaggcccattagggggcagcagcagctgaagattttaggcctcgtggctaaaggctcctttggaactgtcctcaaggtgctagattgcacccagaaagctgtatttgcagtgaaggtggtgcccaaggtaaaggtcctacagagggataccgtgaggcagtgcaaagaggaggttagcatccagcgacagatcaaccatccctttgtacacagcttgggggacagctggcagggaaaacggcaccttttcattatgtgtagctactgcagcacagatctgtactccctttggtcggctgttggctgctttcctgaggcttccatccgtctctttgctgccgagttggtgctggtactgtgttatctccatgacttgggcatcatgcatcgagatgtgaagatggagaatattcttctagatgaacgaggccatctgaaactgacagactttggtctgtcccgccacgtgccccagggagctcaagcctacactatctgtggcactcttcagtacatgggtgagagaggttaaagctgatgggatacaggaattagctggtcatgagggcgcacactgtggtcccagctactcgggaggctgagggggaagaattgcttgggcccaggagatggaggttgcggtgagtggggatcgtgccgctgcatccagcctgagcaacagagtgagatcttgtctcaggaaaaaaataaatttaattgctgtggatactgtaaagggtgtttatcgtaacagttcataatattctatttaagaatgcgtgggagaaattttctctggacccagttatgcttttcctgaattgctgtttggtttttaccttaaggacactaaatattcagctgattgtatttttctgtttgtactgatactagaccatttagagcccaatttgtggtctaccttcagcaagtgtttatgtattttgtatgctagtcatgttcttggttctgtcttccttttctacttttattttccttattctcatttttctaagttttaatcgttttatattactataatatctgcatcttgtaagcctttttgtaacaaggttgggatataaataaataaggcaatgtatccttt

SEQ ID NO: 31188 - DNA, 1655 bp, Homo Sapiens
gtgccccacctgctcggccctgccttctcggatcggatccagcacatccaggcttctcctcctcccgaggaaccagtggtgacagctgaggccatgtgagtaggatcctgaatgaggctttatctctggctgttcgtcccatcgtccaccgtggcaccagctccctcagccagccgggatgggaccagcgactgagagagccagaggcagagaggtgagggtgaccatatcctggactgtgagaggaatgggactctgggcctgtagctgccaagcaggtggcaggtgctccaggctgtgatctgcaccctctgacccctgacattgacctcctaccctgacccctgcctgaccaagccatgtctgaacaggaggctcaagccccagggggccgggggctgcccccggacatgctggcagagcaggtggagctgtggtggtcccagcagccgcggcgctcggcgctctgcttcgtcgtggccgtgggcctcgtggcaggctgtggcgcgggcggcgtggcactgctgtcaaccaccagcagccgctcaggtgaatggcggctagcaacgggcactgtgctctgtttgctggctctgctggttctggtgaaacagctgatgagctcggctgtgcaggacatgaactgcatccgccaggcccaccatgtggccctgctgcgcagtggtggaggggccgacgccctcgtggtgctgctcagtggcctcgtgctgctggtcaccggcctgaccctggccgggctggccgccgcccctgcccctgctcggccgctggccgccatgctgtctgtgggcattgctctggctgccttgggctcgcttttgctgctgggcctgctgctgtatcaagtgggtgtgagcggacactgcccctccatctgtatggccactccctccacccacagtggccatggcggccatggcagcatcttcagcatctcaggacagttgtctgctggccggcgtcacgagaccacatccagcattgccagcctcatctgacggagccagagccgtccttcttctcacagcggcctcagcgtccccagagccgagccagggtgtgagtgcatgtgaacgttgagtacacatgagtgcgtgtatgcccccaggctgggtcagctcttctgtggattgcatggcgtgtgattaaaagcccatgtgttcccacacatccacatcatgggaaggttaatgtgtgcctccttggaactgggtgttggtgtccatggaacttcctctctgtatctcaggtcagtaggcgcagaaacgcctcatgatgaagattcttgagccccatttccaagacccctcacatccaatcctgtcctgtaacatccatcaaggatttccataggggtgactggtgcccacccaagactgcaccagtgcctgctcattgaggagagtaactgctggccaggcagaaagaatatgggctctgcaatgagacagacctggaggggactctcccgttgagcactagcagctggaggagttgggagttcatggctatcatggttgtgttaatcgattgtggggatgaaatgtcattgtgtatggaaggcggggctcatggctgattggcaataaaatggcggctgccgttgtcattgtctccaaaaaaaaaaaaaaaaa

SEQ ID NO: 31189 - DNA, 2020 bp, Homo Sapiens
ccgatgccgagcgggtgctacgtcccgcggtcggagccgcgtcttctcccggctccgccaccagccggggctcgggtgggggcccggggccccggggcatggccctccggagtgcgcagggcgacggccccacctccggccactgggacggcggcgcggagaaggcagactttaacgccaaaaggaaaaagaaagtggcagagatacaccaggctctgaacagtgatcccactgatgtggctgcccttagacgcatggctatcagtgaaggagggctcctgactgatgagatcagacgaaaagtgtggcccaagctcctcaatgtcaatgccaatgacccacctcctatatcagggaagaacctacggcagatgagcaaggactaccaacaagtgttgctggacgtccggcggtcattgcggcggttccctcctggcatgccagaggaacagagagaagggctccaggaagaactgattgacatcatcctcctcatcttggagcgcaaccctcagctgcactactaccagggctaccatgacattgtggtcacatttctgctggtggtaggcgagaggctggcaacatccctggtagaaaaattatctacccaccacctcagggattttatggatccaacaatggacaacaccaagcatatattaaactatctgatgcccatcattgaccaggtgaatccagagctccatgacttcatgcagagtgctgaggtagggaccatctttgccctcagctggctcatcacctggtttgggcatgtcctgtctgacttcaggcacgtcgtgcggttatatgacttcttcctggcctgccacccactgatgccgatttactttgcagccgtgattgtgttgtatcgcgagcaggaagtcctggactgtgactgtgacatggcctcggtccaccacctgttgtcccagatccctcaggacttgccctatgagacactgatcagcagagcaggagacctttttgttcagtttcccccatccgaacttgctcgggaggccgctgcccaacagcaagctgagaggacggcagcctctactttcaaagactttgagctggcatcagcccagcagaggcctgatatggtgctgcggcagcggtttcggggacttctgcggcctgaagatcgaacaaaagatgtcctgaccaagccaaggaccaaccgctttgtgaaattggcagtgatggggctgacagtggcacttggagcggctgcactggctgtggtgaaaagtgccctggaatgggcccctaagtttcagctgcagctgtttccctgaaagccagagaagaccttcctcttacatcacattaaggcacccactcactaccttggcgtcgttttttgggtctgacttgactcgtcaactgctggtctctcccacctggttggaaatgtcgttggaaacttgcaaagactctccagaccttagggaacaagaggcatcactcagtccttctgggacagcttccctgcctcagaaaacggaatctctgtctgtgaccttctcctgccccatttcacttgctcaacaccagactttaatctgactgtagctcataagaccctcattccagagagggtgctgccccatacccggaaggaggaacgctgcacagagaggccaagaagcatctggacagacaggccttgctgggtttagaccttatgctttttgtccagtttcatctcaacacagctgccatgcttcagccatgcctatccaatgacgtctccataaaaggcccaggaacacgggagcttctgaagagctgaacatgtggagggaggggaacgagaacttgtccatgtgccaagagggtggcgcacccccactccatggggacagaagctccagcatttgcccaggacccgtccagacctcaccctgtgtgtatcttcatctggctgtttacttatttgtatccttttctaataatgtttgtaataaactggtaaacataaaaaaaaaaaaaaaaaaaaaaaaaa

SEQ ID NO: 31190 - DNA, 5106 bp, Homo Sapiens
cctgccacagccggggcggctggaactctctccctttctccctccatccttccacttcccctgctcggccccgccgtcaggccgggtcccccttccctgccgtcatcaggttccccttctcccttcttggcactttcctttcgaaccatccttctggacaaactttgatggagaatttcacaccacgctggaaaaatgccggttatgaaaggattactggcgccgcaaaacaccttcctggacaccatcgccacccgttttgacggaacacatagcaacttcatccttgccaatgcccaggtggctaagggtttccccatagtctactgttccgatggcttctgcgagcttgctggatttgcccgaactgaagtcatgcagaagagttgtagctgcaagttcttatttggggttgaaaccaatgagcaactgatgcttcaaatagaaaagtcactggaggagaaaacagaattcaaaggagaaattatgttctacaagaaaaacgggtctccattttggtgcctactggatattgttcccataaagaatgaaaaaggagatgtagtactttttctggcctcgttcaaagatataacagatacaaaagtgaagattactccagaagataaaaaagaagacaaagtcaaaggaagatcaagagcagggacccactttgactcagcccggagacggagtcgagcagtcctttatcacatctctgggcacctgcaaagaagagaaaagaacaaattgaaaataaataacaatgtttttgtagataaaccagcatttccggagtataaagtttctgatgcaaaaaagtccaaattcatacttctgcattttagcacttttaaagctggctgggactggcttattttgttggcaacgttttatgttgctgtgactgtaccttacaacgtttgctttattggcaatgacgacctgtccacaactcggagcacaaccgtcagtgacattgcagtggagattctttttattatagatattattttaaatttccgaacaacttatgtcagcaagtctggccaagttatctttgaagcaagatcaatttgcatccactatgtcacaacctggttcatcattgatttaatcgctgccctgccttttgatcttctgtatgctttcaacgtcacagtggtgtctctcgtgcatcttctaaagacagtgcgcctcttgcgtcttttgcgtctgctgcagaagttagaccgctattcccaacacagtactatcgtcctgactctgctcatgtccatgtttgcactccttgcacactggatggcgtgtatctggtacgtcattggaaaaatggagagggaagacaacagccttctgaagtgggaagttggttggcttcatgagttgggaaagagactggaatctccatactatggcaacaataccttggggggcccgtcgatccgaagtgcctatattgccgctctgtacttcacgctgagcagcctcaccagcgtgggttttgggaacgtctctgctaatacagatgcagaaaagatcttctccatctgcaccatgctgattggtgccttgatgcacgccttggtgtttggaaacgtgacagcaatcatacagaggatgtactccagatggtccctctatcacactagaactaaggatctgaaagatttcatccgtgtccatcacttgccccaacaactcaagcagaggatgctcgaatattttcaaacaacctggtcagtcaacaatggaatagattcaaatgagcttttgaaagactttccagatgaactgcgttctgacatcactatgcacttgaacaaggagatcttacagttgtccctttttgaatgtgccagccggggctgcctcaggtctctgtctctacacatcaaaacctctttctgtgctccgggggagtatctgctgcgtcaaggggatgctttgcaggccatctactttgtatgctcgggctccatggaagttcttaaagacagcatggtgctggctattcttgggaaaggggatttaattggagcaaatctatcaattaaggaccaagtgatcaagaccaatgcagatgtaaaggctttaacctactgtgatctccagtgtatcatcctcaaaggactctttgaagtgctagacctttacccagaatatgctcacaaattcgtggaagacattcagcatgacctcacatacaacctccgagaaggtcatgagagtgatgtgatatcaagactatcaaacaaatctatggtctcacagtcagagcccaagggaaatggcaacatcaacaagcgactcccatccattgtggaagatgaggaagaggaggaggagggggaggaagaggaggcagtctccctctctcccatctgcacaaggggatcttcttcgcgcaacaagaaggttggaagcaataaagcctacctgggcttaagcttaaagcaactggcctcgggaacggtgccctttcactcgcctatcagagtctccaggtcaaattcccccaaaaccaagcaggaaattgacccccccaaccataataaaaggaaagagaagaacttgaaattgcaactttcaactttgaataatgctggacccccagacctcagtccaaggattgttgatggaattgaagatggaaacagcagtgaagaaagtcagacttttgattttggctctgaacgaatcagatcagagcccagaatttctcctcctcttggagatccagagattggagctgctgttctcttcatcaaagcagaggagaccaagcagcagataaacaaactcaacagtgaggtaacaacattgactcaggaagtttctcagttgggtaaagacatgagaaatgtgatccagcttctggaaaacgttctgtcacctcagcagccatcacggttttgctctttgcacagcacctctgtgtgtccctccagggagagcttacagaccagaacgagctggagtgcacaccagccttgcctacacttgcaaacaggcggggctgcttatacccaagcacaactttgtagcagtaatatcacctcagacatttggagtgtggatccctcctctgtggggagcagcccccaacgaactggagctcatgagcaaaatcctgcagacagtgaactttatcattctccaagccttgattattcaccttcccactaccaggttgtccaagaaggtcatttgcaatttttaaggtgcatctctccacattcagattctacgttgacgcctctgcagtccatttcagcaactctctcatcttctgtctgctcctcttcggaaacatctttgcacctagttctcccaagcagatcagaggagggcagcttcagtcagggaactgtgagttccttcagtctggaaaacttaccaggatcttggaaccaggaaggaatggcatcagcttctacaaaacctttggagaaccttccactggaagttgtcacaagcacagcagaagtgaaagataacaaagccataaatgtatgatattagtgcccatgatgcagcagctaatttcaaacctaccactgcatgacagttttagtttgcctttttgcctctggtgggcatgaagactgagcaaagctgggaatcctgcagaaaagagtgtgaggagccagggaaaggcagaaccacctccatgctgtagcaaacaatttctagatactagaagcataatagaaacatttttctgtacaggtattaaactactggtctgtttgacagactttggtaacaatccaaagaccctgagggtctgagcagctagaagtcctagacaaagaacttgtggatgacttttgtcccatgtggcttttgtgaagtatggcaaaggtttttcatgagtgcctgattgttattcctgaacaatatccatagcactgttggcctcaggagtgcacagctcctgctgatgtatttttctttttgtgaaggcaaagggacaattatcactgcatgtcatctcctagacaatcagtcaaatagagctggtggccagtggttagctattcgcacgttatttgccatgtaaatgaaaacgtctttatttatcaaaaaaacacagaggctatttttatatccttggtatgaaatatgtatttaaactatttaaatatttataaagaaatgaatgttttcttttcattttggtaaaaaaaaagcttgctgttttaacaagaaatgcactactgttgtgtatagtagatcaaaaattatttattactaagaggatgtagtttccaaaggaatcccccattttttctgcatgcagtttgcaacaaatgtattctcatgcttctggattataaaagaaaagtgaagtcatattttgttaatgaaataaaaacatggactgagtgtcaactacatgagctttggcatggggatagagaggctccatctaggctctgccaactcatgtcaatgacatgatttaaggtcgttgtgccagcagaaatgtctctcctctaggtatcgtattttgttgctcaagaatccaaaatgggtctgtggacatagggcaatttggggctcaaagtgagggagaaaacctgggtgtgtcctttcccagtgcttttcttttacaagaggtagtagactagtggaaatccccaaatggagccaagacttctgagctataacttgtgggagtaataccagcttgcaatgggtcagcactttaccttttttctttaaggctcccaacaatgctatacagcgcagttgtttccattcctatttttaataaatctcaggggaagcctcagagattacacagttaggatgctgacacagtctagaatccataatgctccctacatctcacactaacaggcaaattcagatgctgggattggcaatgatttaagcaccttcactaaagtcttattttatgttttagaacagttacagtctaattgtcttggacattttgggaagatatattgggttcacattctggagttctctttattttccaccacaaaaaataatctgagaattgtatcattaaaagtatctaaacacacaaaaaaaaaaaaaaaaaaaaaaaaaaaaaaaaaaaaaaaaaaa

SEQ ID NO: 31191 - DNA, 2429 bp, Homo Sapiens
cttgccctcacctccgaatcctgacaacttcccggtcatcccgacccagcgttttccttgggattccgacctccccctcagagaagacaggaggtcgggaaggacctgcagcccaggggcttccaagatgaggcccagagactcggattatcaatgcagagaaatctgaattcaatgaggatcaagccgcctgtgggaagctgtgcatccggagatgtgagtttggggctgaagaagagtggctgaccctgtgcccagaggagttcctgacaggccattactgggcactgttcgatgggcacggcggtcctgcagcagccatcttggctgccaacaccctgcactcctgcttgcgccggcagctggaggccgtggtggaaggcttggtggccactcagccccccatgcacctcaatggccgctgcatctgccccagtgaccctcagtttgtggaggaaaagggcatcagggcagaagacttggtgatcggggcattggagagtgcctttcaggaatgtgatgaggtgatcgggcgggagctggaggcctcaggccagatgggcggctgcacagccctggtggctgtgtccctgcagggaaagctgtacatggccaatgctggggatagcagggccatcttggtgcggagagatgagatacggccactgagcttcgagttcaccccagagactgagcggcagcggatccagcagctggcctttgtctatcctgagcttctggctggtgagttcacccgactggagttccctcggcggctgaagggggatgacttgggacagaaggttttgttcagggatcaccacatgagtggctggagctacaaacgtgtggagaaatcggatctcaagtacccactgatccatggacagggtaggcaggctcggttactaggaacactggctgtctcccggggcctgggagaccatcagctcagagtcctggacacaaacatccagctcaagcccttcttgctctctgtgccacaggtgactgtgctggatgtggaccagctggagctacaggaggatgatgtggttgtcatggcaactgatggactctgggatgtactgtccaacgagcaggtggcatggctggtgcggagcttcctccctgggaaccaagaggacccacacaggtactgtagctgctggggacctgcctgggcctgggttggtgccagcagcaagcccaagtagttatggctgagaagacagagcactgacaatgagctggcagctggccaggatcagggctgtctcaagcttcttggaggaggcagggagaccgtgggttccgaaaatccctggatttagactctcatggtccagcccgtggccctcccagacttgctgcttgcttggtccacagtcggactgcattgcttgggtccccatgtccagccttgtgcagtgagttctcctaaggtctggccttgcccctttgctctgcccctgaagtctatctgcaggatggtcttcacaggttcccaaagctggcccagatgctgatacacagcacacagggaaaggaagacagtctcacagaggaagggcaggtgtcctacgatgacgtctctgtgttcgtgattcccttgcacagtcagggccaagagagcagtgaccactgaggattcagacactgtatcccagaactgctctagtgcccgggtgtggtctgggcatccctccagtgtgaccaagagcaaatcctgcctgccctatccctagccaccgcccagtgctctcactatccacctcaacacacatccatctcaagaggaacatttataccaggcagtcagagctggaagtgtatggagagcccagcccaccaggtcctgccttttgcggtgataaccttctctggcagagtgactttacaacttaactaggaaacccatgtgaggctcctcagacaggatcttgaacagcccaaagtatcattctcagataggggcacccaagctaagggtattagccaaagatgccaggatgggtagctagcccatgtttagatccaggtctccaattcatggttatcagggcatgtgttcaacaacccccaaagtccacgcaggtggcttgtagaaacctttgggcagcctcatgtctgctaaaacagccatcttcaagacagcccctgaaaagagaccagttcaggtcctgccctgctgttctttgctggagatgaggaacaggtgctggggctaaagtttggggtagagcacaagggacaagaggaactcttggagttggctgggtgagagggctctccatttgctacctgtagtagcctgcctcttaactggttgcttctccctagttccagccctgccctggtctgatgccccaacactgcccttgctttgttttccctgtcacctccctattattaaatgttttctacag

SEQ ID NO: 31192 - DNA, 2103 bp, Homo Sapiens
aaagtccatgggagccggagcgccgggacgccaagcacttcctgccgcgggcggcgcgccgcagctgcccaggccggaccgggccgggcgcccgcagatgagccccgctagggccgccccgcgctgagagcccagccccgccgctgcccgcccgccatgtctcagatgctgcacatcgagatccccaacttcgggaacacagtgctgggctgcctgaacgagcagcgcctgctgggcctctactgcgatgtgtccatcgtggtcaagggccaggccttcaaggcccaccgggcggtgctggccgccagcagcctctacttccgcgacctgttcagcggcaacagcaagagcgccttcgagctgcccggctccgtgccgcccgcctgcttccagcagatcctgtccttctgctacacgggcaggctcaccatgacggccagcgagcagctcgtggtcatgtacacggccggcttcctgcagatccagcacatcgtggagcgcggcaccgacctcatgttcaaggtgagctcgccccactgcgactcgcagaccgctgtgatcgaggacgccggctccgagccccagagcccctgcaaccagctgcagccggccgccgccgccgcggccccctacgtcgtgtccccctcggtgcccatcccgctgctgacccgagtaaagcatgaagccatggagctgccgccggccggcccaggcctggcccccaagcgcccgctggagacggggccccgggacggcgtggcggtggccgcgggggctgcggtggcggcgggcacagcccctctcaaactgccccgtgtctcctactacggggtgcccagcctggccaccctcatccccggcatccagcagatgccctacccccagggggagcggaccagtccaggcgccagcagcctgcccaccaccgacagccccacctcgtaccacaacgaggaggacgaggaggacgacgaggcctacgacaccatggtggaggagcagtacggccagatgtacatcaaggcctccggcagctatgcagtgcaagagaagcctgagccagtgccgctggagagccgctcctgcgtcctcatccgccgcgacctcgtggccctacctgccagcctcatcagccagatcggataccgctgccatcccaagctctactcggaaggggaccccggggagaagctggagctggtggcaggctctggggtctacatcacacgcggccagctgatgaactgccacctgtgtgcaggggtgaagcataaggtcttgctgcggaggctcctggccaccttctttgacaggaacacgctggccaacagctgcgggactggcatccgctcgtccaccagcgaccccagccggaagccgctggacagccgggtcctgaacgctgtgaaattgtactgtcagaacttcgcccccagcttcaaggagagcgagatgaacgtgatcgccgcggacatgtgcaccaacgcccgccgcgttcgcaagcgctggctgcccaagatcaagtccatgctgccggagggcgtggagatgtaccgcacggtcatgggctccgccgccgccagcgtgcccctcgaccccgagttcccgcctgccgcggcacaggtgttcgagcaacgcatctacgccgagcggcggggcgacgccgccaccatcgtggctctgagaactgacgccgtgaatgttgacctgagtgccgccgccaaccccgccttcgacgccggcgaggaggtggacggggctggctcggtcatccaggaggtggccgcccccgagccgctgcccgccgatggccagagccccccacagccctttgagcagggcgggggcggccccagcaggccccagacgccggcggccgcggcccggaggccggagggcacctatgcagggaccttgtaagcggagctgggtggctgcgcgagggaccgagtactagagctgcttgcatgcgttactaatacaaacaaatgtgatcaagccacttacctactgaactgctactgttgcctgagaaaaatgtgatttttattctgcttgtatttaaaattgatgaaggaaaaaaaaaaaaaaaaaaaaaaaaaa

SEQ ID NO: 31193 - DNA, 847 bp, Homo Sapiens
gtggggagccgggagcccagcagccccaggaaagacctggaagcacagggaccttttcaggaaacagagggctggagccaggttctgatcccgaccttgctcctggtcacgtgacctggccgtcgcttggcaacaggacgccgccgagtcccgcttctcctccaggcacaatggctgaggaatgccccagagcgtgcgcggagcctgtggcgcccaaggccacggccccgccggagaggaccagcgactactaccgcgtgagcgcggacctgccgggcaggttcaacaacccggggtggttccggggctacaggacccagaaggctgtctccgtgtacaggaccagtaaccaggcttacgggagcagagcccccaccgtgcacgagatgcctcgggtggaatgttccggaacaatactctcaatgtttacctggagaaaagcatcgtgactggccccgataactgcatcacctcctgtgaccggctcaacttccaccccagttacaacatcaacaggccatccatctgcgattgaggggctggaaactccctctaggagtcctctgaccccagggcctcctggaaaatcatcatccctcatcacccacagtcgcccgattgtgacggcacagactgcgctgccttccctgaaaatattattcgtctgcggagtaggaaaatatgcaaacggggccgtgaagtcctgccatttcacatctaataagtacatgggaaagatgctaatggttgactttgcattaaaaacgttgtcacatcctgaaaaaaaaaaaaaaaaaaaaaaaaaaaaaaaaaaaaaaaaaaaaaaaaaaaaaaaaaaaaaaaaaaa

SEQ ID NO: 31194 - DNA, 6639 bp, Homo Sapiens
ggcagtgagtccacccgcccgccgaggtccgcccgcccgccgagacccgcccgccgccgctgccatggccgaagtgcgcaaattcaccaaacggctcagcaagcctggcacggcggctgagctccggcagagcgtgtctgaggccgtgcggggctccgtggtgctggaaaaggccaaagttgttgagcccctggactatgagaatgttattgcccaaagaaaaacccagatttacagcgaccccctccgagatctgcttatgttcccaatggaagatatatctatctcggtgataggtcgtcaacgcagaacggtgcagtctactgtaccagaagatgctgaaaagagggcccagagtttatttgttaaagagtgtattaaaacctatagcacagattggcacgtggtaaactacaagtatgaggacttctctggggactttcgaatgttgccatgtaaatctttgagaccagaaaagattcctaatcatgtatttgagatagatgaagactgtgagaaagatgaggactcatcttctttatgttctcagaagggtggtgtgataaaacaaggctggttgcataaagcaaatgtaaatagtaccatcacagtaaccatgaaggtattcaagagacgatatttttacttgacccaacttcctgacggttcatatattctcaattcctataaagatgagaaaaattcaaaagaatcgaaaggttgcatctacttggacgcctgcattgatgttgttcagtgccccaaaatgcgccgtcatgcttttgaactcaagatgttagataaatatagccattatctggctgctgaaactgagcaggaaatggaggaatggttgataactttgaaaaagattattcagatcaacaccgacagtttagttcaagaaaaaaaggagacggtagaaacagcacaagatgatgaaactagcagccaaggaaaagccgagaacatcatggcaagtttggaaaggagcatgcatccggaactgatgaagtatggaagagaaactgaacaactaaacaaactcagtagaggagatggaagacagaatctcttttcttttgattcagaagttcagaggttggacttttcaggaattgaacctgatataaagccatttgaagaaaaatgcaataaacgtttcctggtgaattgccatgatttaactttcaatatcttgggccaaattggagacaatgcaaaaggaccacccacaaatgttgagcccttttttatcaatcttgccttatttgatgtaaagaacaattgtaagatttcagcagactttcatgtagacctgaatcccccatctgtccgtgaaatgctgtggggctcttcaacccaactggccagtgacggtagcccaaagggctcttcacccgaatcttacattcatggaattgccgaatctcagttacgctacatacaacagggaattttctcagtgacgaatccacatcctgaaatttttctagttgccagaattgaaaaggtactacagggaaacattacacactgtgcagaaccctatatcaaaaattctgatccagtaaagacggcccagaaggtgcacaggacagctaaacaagtgtgtagccgccttggacaatacagaatgcccttcgcttgggctgccagacccattttcaaagatactcaaggctctcttgatctggatgggagattttctcctctgtataaacaagacagtagcaagctttcaagtgaagacattctcaagttgctctcagaatataagaagccagaaaagaccaaactgcagattattcctgggcagctaaacatcacagtagaatgtgttcctgtggatttatcaaattgtattacttcttcatatgtgcccttgaagccttttgaaaagaattgccaaaatattactgtggaggttgaagagtttgttccagaaatgacaaaatattgttatccatttactatttacaaaaaccatctgtatgtatatcccctgcaattaaaatacgatagccagaaaacatttgccaaggcaaggaacattgcagtctgtgtggaattccgggattcagatgaaagtgacgctagtgccctaaagtgtatttatggaaaacctgcagggtctgtttttaccacaaatgcttatgctgttgtctcgcatcacaaccaaaatccagagttctatgatgagattaaaattgagcttcccattcacctacatcaaaaacatcgtttgcttttcactttttatcatgtaagttgtgaaattaacacaaagggaacaaccaaaaagcaagacacagttgaaactccagttgggtttgcctgggtacctttgctgaaagatggtagaatcatcacatttgagcagcagctgccagtttccgccaatcttcccccaggctacttgaatctgaatgatgcagaatcaagaaggcaatgtaacgtggatattaaatgggtagatggtgcaaagcctttgttgaagattaaaagccacttagaatctaccatttacactcaagatctgcatgtgcacaaattcttccatcattgccagctgattcagtcaggctcgaaagaagttccaggggagctcattaaatatttaaagtgtttgcatgccatggagatccaagtcatgatacagtttctacctgtaattcttatgcaactcttccgagttctcacaaatatgacccatgaagatgacgttcctatcaactgcaccatggttctcttacatattgtatcaaagtgccatgaagaaggcttggatagttatctaagatcattcataaagtatagcttccgacctgaaaaaccgagtgctcctcaggcccagctgatacatgaaaccctggctactacgatgatagcaatattgaaacagtctgcagattttttatcaataaacaaattgctaaagtactcatggtttttctttgaaataattgcaaagtcaatggccacatacttgttggaagagaataagattaagcttccccgaggccagagatttcccgagacatatcatcatgtcttacattcactgcttcttgcaataattccccatgtgactattcggtatgcggagattcccgatgagtccagaaatgtgaactatagtttggctagcttcctgaagcgctgtttgacactaatggatagaggatttattttcaatttaataaatgactatatatctggattcagccccaaagatcctaaggttctggctgaatacaagtttgaatttctgcaaacaatttgcaatcacgaacattacattcctctgaacttgccaatggcatttgcaaaacctaaactgcagcgggttcaagattcaaatcttgaatacagtttatcagatgagtattgcaagcatcacttcttggttggtctacttctgagggaaacttccattgctcttcaggacaattatgagatcagatatacagctatctctgttataaagaatcttttgataaaacatgcatttgacacaagataccagcacaagaaccaacaagccaaaatagcacaattgtacctcccctttgttggactacttttggaaaatatacagcgattagcaggtcgagataccttgtattcttgtgcagccatgcctaattctgcatccagagatgagtttccatgtggctttacttcacctgccaatagagggagtctgagcactgacaaagacaccgcttatgggtcttttcaaaatggacatggaattaagagagaagattcaagaggttccctcatcccagaaggagcaacaggatttccagatcagggcaacactggtgaaaatacccgacagagttctacaaggagtagtgtatcccagtataaccgcctggatcagtatgaaatcagaagcctcctgatgtgctacctgtatatagtaaaaatgatttcagaagatactctcttaacttactggaataaagtatcacctcaggagctcataaacattcttatacttttagaagtatgcttgtttcactttagatatatggggaaaagaaacatagcaagggtgcatgatgcctggctgtcaaaacacttcggaatagaccgaaaatcgcaaaccatgcctgctcttcgaaacagatcaggagtaatgcaggcccggcttcagcatcttagtagcctagaaagttcatttacacttaatcacagttctacaacaactgaagcagacattttccaccaggcacttcttgaaggcaatacagctactgaagtttccctaacagtactagacaccatatcatttttcactcagtgcttcaagacccaacttttaaataatgatggccataacccattaatgaaaaaagtgtttgatatacatcttgcttttcttaaaaatggacaatctgaagtgtcgctgaaacatgtatttgcctcactgagagctttcatcagtaagtttccttcagcatttttcaaaggaagagtaaacatgtgtgctgcattttgctatgaggttttaaagtgctgcacatcgaagattagctcaaccaggaatgaagcatctgcacttttgtatcttttgatgagaaacaactttgagtataccaaaaggaaaacctttttgaggacacatctacagataataattgctgtaagccaactgatagctgatgtagcactaagcggaggatcaagatttcaggagtctttattcattatcaataattttgcaaatagtgacagacctatgaaggcaactgcctttcccgcagaagtcaaagacttgaccaagagaatccgcactgttcttatggccactgcccaaatgaaggagcatgagaaagaccctgaaatgctaattgatctccagtatagcttagccaagtcctatgcaagcaccccagagctcaggaaaacctggcttgatagcatggccaagattcatgtaaaaaatggagatttttcagaggctgcgatgtgttatgtccatgtagcagctctagttgcagagtttcttcatcgaaaaaaattatttcctaacggatgttcagcgttcaagaaaattactcccaatatagatgaagaaggagcaatgaaagaagatgctgggatgatggatgtccattatagtgaagaggtcttgctggagttgctagaacaatgtgtggatggcttatggaaggcagaacgttatgaaataatttctgagatttccaagttgatcgttccaatttatgagaaacgtcgtgagtttgagaaacttactcaagtttatagaactcttcatggagcttacacaaaaattctggaagttatgcatacaaaaaagagacttttaggcactttcttcagagttgccttttatggccaatctttttttgaagaagaagatggaaaggagtacatctataaagaaccaaagctcactggcctctcagaaatttccttgagacttgttaaactttatggtgaaaagtttggtacggagaatgtcaaaataattcaggattcagacaaggtaaatgccaaagagcttgatccaaaatatgctcatatacaagttacttatgtgaagccttactttgatgacaaagaactcacagaaaggaagaccgagtttgaaagaaatcataatatcagcagatttgtttttgaggccccttacactttatcaggcaaaaaacagggctgtatagaagaacagtgcaaacgccgtacaatcttgacaacttcaaactcgtttccttacgtgaagaagaggattcctattaactgtgaacagcagattaatttaaaaccaattgatgttgccactgatgaaataaaagataaaactgcagagctgcaaaagctttgctcctctactgacgtggacatgattcagctccaacttaaattgcagggctgtgtttctgtgcaggtcaatgctggtccattagcatatgcaagagctttcttaaatgacagccaagctagcaagtatccacctaagaaagtgagtgagttgaaagacatgtttaggaaatttatacaagcatgcagcattgcacttgaactaaatgagcggctaattaaagaagatcaagttgagtaccatgaagggctaaagtcaaatttcagagacatggtaaaagaattatctgacattatccatgagcagatattacaagaagacacaatgcattctccctggatgagcaacacattacatgtattttgtgcaattagtggtacatcaagtgaccgaggttatggttccccaagatacgctgaagtgtgaggaaatgcagatgtacgtgacaatgagactgacctttctcaggaatatttggagctgtgcaaatgttaaaatttaaagatttgatatacatggagtgtttcttctcgacaccaaaattttcatgtgttccaacagggtgcttacatatttgtaaataagcaacttgaaagtgcctggaaaattgcaccactgtgcttggtttgtacttttttaggtaaatctatatgctgaaaagtagagctcaaaaacagtagttcaatttgcttaattattgcttaaaataatggtactatgtaaaattgtataatggaatacaataaaaggtaaaacttatttgtaaaaaaaaaaaaaaa

SEQ ID NO: 31195 - DNA, 1505 bp, Homo Sapiens
gtctcggaccgcggaggtgagcgggagctgaggctgaggagaggggagcttggggggcgcctgctgccaagggcagcggaggaggaaatggcaggtcctaatcaactctgcattcgccgctggactaccaagcatgtagctgtgtggctgaaggatgaaggcttttttgaatatgtggacattttatgcaataagcaccgacttgatggaatcacattgctaacattgactgaatatgatctccggtctcctcctctggaaatcaaagtcttaggggacattaaaaggttaatgctctcagtccgaaaattgcagaaaatacatattgatgttttagaagagatgggctacaacagtgacagtcccatgggttccatgacccctttcatcagtgctcttcagagtacagactggctctgtaatggggagctttcccatgactgtgacggacccataactgacttgaattctgatcagtaccagtacatgaatggtaaaaacaaacattctgttcgaagattggacccagaatactggaagactatactgagttgtatatatgtttttatagtatttggatttacatctttcattatggttatagtccatgagcgagtgcctgacatgcagacctatccaccactcccagatatattcttagacagcgttcctagaatcccatgggcctttgccatgacggaagtatgtggcatgattctgtgctatatttggctcctggttcttcttcttcacaagcacaggtcaatacttctgcgaaggctctgtagtctgatgggaactgtattcttgcttcgctgctttaccatgtttgtgacctccctctccgtgccaggacaacacctgcagtgtactggaaagatatatggcagtgtatgggagaaattacatcgagcctttgccatttggagtggctttggtatgaccctgactggcgttcacacatgtggagattacatgtttagtggccacacagtcgtcctaactatgctgaatttctttgtcaccgaatgtaagtatctttttagtgcttctatgcgtattaggtaactagctgcagtgaaggctgtgggaagggtgtcagatcctgtgaagaatggcaaaacagcctgacctgagaaacgtgactgagaagcattggaaggaatgtagctttaaaatgatctttctgtccttttcctagatacaccaagaagctggaatttcttgcacactttatcctgggttctcaacctctttggaatcttcttcatcttggctgcccatgaacattattctattgatgtgtttattgctttttatataacaacaagactctttttgtactaccatactctggccaataccagagcatatcagcagagtaggagagcaaggatttggtttcccatgttctctttttttgaatgcaatgttaatggcacagtacctaatgaatattgttggccattttcaaaaccagcaataatgaaaagactaattggatg

SEQ ID NO: 31196 - DNA, 3868 bp, Homo Sapiens
agcgggtggtgaggccctggtgggcgcgaggcagggggagggggaggaggaggagcccgcggcccgggcggcggcggctctcgggttctccgtagggccccgcctcggagcgggcggcggcggaggaggagactgaggagcaggatggcggcctcggccctgtacgcctgcaccaagtgtacccagcgttatcctttcgaggagctctcccagggccagcagctctgcaaggaatgtcggattgcacatcctattgtaaaatgtacttactgcagatcagaatttcaacaagagagcaaaactaacacaatttgtaagaagtgtgctcaaaatgtgaagcaatttgggacgcccaagccttgtcagtactgtaacataattgcagcatttattggtaccaagtgtcagcgttgcacaaattcagaaaaaaagtatggaccacctcagacctgtgaacagtgcaaacagcaatgtgcttttgatcggaaggaggaaggaagaagaaaggttgatggaaagttattatgctggctctgtactttatcgtacaaaagagttttacagaagacgaaagaacaaaggaagagcctgggatcttcacattcaaattcatcttcttcatctcttactgagaaagaccagcatcatccaaaacatcatcaccaccatcatcaccatcaccatcgtcacagcagtagccatcacaaaatcagcaatctaagtccagaagaagagcagggactgtggaaacagagccataaatcctctgcaacaattcagaatgaaactccaaagaaaaagcccaaattggaatctaagccatctaatggagataggagtatgtaatgtgtgccattagtaaggtaatttgccagttgcatccatttctgtcagtagctctataaatcagtcagcagatagtgggggaacagacaattttgtccttataagtcaactgaaagaagaagtgatgtcacttaagcgtctcttacagcagagagaccagaccattttagaaaaagataaaaagttaactgaactaaaggcagactttcagtaccaagagtcaaatttgagaacaaaaatgaacagtatggaaaaagcccacaaagaaactgtggaacaacttcaggccaaaaacagagaactactcaaacaggtcgcagcattatcaaagggtaaaaaatttgacaaaagtggaagcatactaacatctccttgagaaagtcatttgtttagcatttcttcttacaatgtaaatttggggaaaaaaaattctgtgaagcccttaaattctgtgtagtagaaaaatatttttgcacaccaaatgaattggtgtgtttcctgttcacttttgtaattgatatacagcattttttaagttgtaaaacattcaaataaaacttcaactggtttgaagtaactttttaattatttgatatccaggaacttttttgccagcaatagtattaaacagttgtaaaggagtgcatgagtagtgctctttatgaaacgcaacatgcaataatagagtaggtatggtttcagaagtcagagcagcagggtttttttgttttgtttttgttttacactatgctaatttcagacaaacagttttcaatttagaaatacaaaaacttttaaactcgaaaaatggcgaacactggttttttgggaattgtgtttttactttgcatcaagatgaatttaggagaaaatcacggtgcttttattaaatgaacttcagatatatgtaaatttgttttttaaagttacatcattaacattagtaacctagcattttcattattggtataggaattaatgtttattgtacagtatctaaggtaaaatgtgtttctgttttgtaaaaactactgtagatttttacttacaagtgcctttttgccacctaatgtttttatttataggaatgctgatcttttgtacatacattttgttttaaaatcatgtttaataaatgtttgtatataaatgcatatgtacagaagcctatttcaaaaggaaatcaaagttgctagtaaaatgtttgagattacatttagaactaactgataatgcatatagattgtagaaaattttgtgatttgtttctgtgtgataagggaagctgttggtctttgaattcatttaattatgtcaaaatagttccccaaagatttaattttaagttgcttcttaaagagtaattttattttttatgtcatgtggcttcatattagtattgtgtgagttacatgttttgctttatattttataaaattttttaaaaattttaatgtttctgcaatgatccatgtatctgctttccctatgtgtggttatctaagttaatatttatgtacaatgtaatttgtaaatttaaagcaaatctgaaaaaaattaaatgatctttttaatccaatctgtgataatctttgaataaattggcatctactataagattcaggcattataagtaaattgtcctaaagtctttaaaattgtctataaaaggttaaggtagggtgggataggttatatgaagttattgactatattctgatccagcggttttcagcctgaaatagaatttatctcctagttattatcagttcagagttttagtttgattttaaagtattgctagatacactgtatagagtgagttgcttctcttaataatttatgggcaaagataaatttgcttcatgtaaaactgttactaaatttataagttttaaaggttttgttttatacaagcattgattgtgaatgtcatatcaaagattggctttcttaagaacacatgattgaaacaatttttttttaacatgacgtgtttcaatagactgttctcatagttcattataaagtgaataccaaataattctttgtccattttgaaagcataatatagggtaattttcaagtgatacaaaaagattcagttagaatcttgtaaactaaaccagtttatttttatgggatcttcatgtaataattttcttaaatttagtactctcaaccatgatagataatgccttaacatggattttaacgtttgcaggatttgctaaattcataagatagttattacctttctttgaaatttgtaatgttttatattcttgtttcatagccatttgtcagtccacagtggtcattatggttttactttttgatagttcttacaccttgttggagaaactacaaaagaaagttgtcctcgtccttccccttagctaacatcaaaattaaaaagttgaatattaatattagctaacattaaaatggaaggtaattcagttttagtgttagctaacattaacagtctaataatttagctttgtaaattccaaggctaaaaccctttcatgggcttcacagtatttagtcctaattaaatacccttctttattccatgaccttattttataacttaaatttttttgcaattgtataaattagtaattcagtcccagtcctggatctctgtagtgttttgacataataaactgatattctttaaatgtggacctgtaaggagatactatggtgtggtgtattgtgcttttagcctgttttccactattaattagcatttaccagtaagggtcattttgactcaagttatttatgtattaatagcctgtgaatattgcagtcctttttagattatattggtctaaatatgcattctgcagtgaacctgttaagctgttcacatgtatagactattgaaatactgtacttgtacacatctgactgttgacattttgtacttttttctagatccaatatttcacaataaaaaacttgtcaaaggcaaaaaaaaaaaaaaaaaaaagaaaaaaaaaaaaaaaaa

SEQ ID NO: 31197 - DNA, 2297 bp, Homo Sapiens
caccggtaccgtggtggaagcgcgccctgggctgccgggggcgcggccgcggtggcacttggacccgaggaggcggcagctctaccgtcgcaggactctgcccttccccaagagaggaaccagaaggaggacctatcagcccttgaaattctaaaagtcatgtcccttgggtcagaattgttcagggatgtggccatagtcttctcccaagaagaatggcagtggttggcacctgctcagagggatttgtacagagacgtgatgttggagacctacagcaacctggtctcactgggtcttgccgtttccaaacctgatgtgatctccttcctagagcaaggcaaagagccctggatggtggagagagtggtgtctggaggcctgtgtccagtattggagtccagatatgataccaaggaattatttccaaagcagcatgtttatgaagtcgaatcaccccaatgggagataatggaaagccttacaagttatggtcttgagtgttcaagtttccaagatgattgggaatgcagaaaccagtttgacagacaacagggaaatccagacagacatttccatcagatgatcatcagacatgaagaaatgcccacttttgaccagcatgcatcccttactttttatcagaaaattcatactagagaaaaaccttttgggtataataaatgtagaaaagacttctggcaaaaggaactccttattaatcatcaaggaatttatactaatgagaaaccctataaatgtaaggaatgtgggaaggcctttaaatatggctcacgactaattcaacatgagaatattcattctggtaagaaaccatatgaatgtaaggaatgtggaaaggccttcaattctggttcaaattttatacaacatcagagagttcatactggtgagaaaccgtatgaatgtaaagattgtgagaaggcctttagtcgaagctcacagttgattgaacatcagcgaactcacacaggcgagaaaccctatcagtgtaaggaatgtggcaaggccttcaatcggatctcacatcttaaagtacattatagaattcatactggtgaaaaaccctatgcatgcaaggaatgtgggaaaacctttagtcatcgttctcagttgattcaacatcagactgttcatactggcaggaaactctatgaatgtaaggaatgtgggaaggcttttaatcaaggctcaactcttatacgacatcagagaattcataccggtgagaaaccctatgagtgcaaagtatgtggaaaggcctttagagtgagctcacaactcaagcaacatcagagaattcacactggagagaaaccctaccaatgtaaggtatgtggtagggccttcaaacgggtctcacatcttactgtacattacagaattcatacaggtgaaaagccatatgaatgtaaggaatgtgggaaggcttttagtcattgctcacaattgattcatcatcaggttattcacactgagaaaaagccctatgaatataaggaatgtgagaagaccttgagtcatgattcaactaccgttcaacctcagagaatgcataatagagaaacacatgtgaatataataaatgtagaaaagccttccatcagcagttaccccttactaatcatcagagaatttatgttggcaagcaaccatatgaatggaagtaatggggaaagcccattagcctaggctaattgtgactgtgacttacttctccctcttggagaaagacttgaagaatgtaatgccagtgacaatgccttcattcagaggtaagcctttatcctaagtctgaaaattcatatcaaagaaaattttatggatgtaaattgttcagatcataattgtcaaaaatgctgggaaaggttgggagaaattttatttctaacacattccagaaccacattttctaaccacagtgtagtaattttatcaagagcaaaagttatagttttcttacaagttaaaaaaacagccagattatcatttgcttaacaaagaaatcatgcaattaccataaatggtaatgaaaagaatgaattgagagtttaacatgccaagagatgtgaaatgtggccaaagagatgtgagggtaaggggaaagccaaagctacactggaggaatttttatagcctttgaatgcatgcatatacatgaaaatctgaaagataaactcatatgcactaaacatgctattcaagtctaccaaacatccaggcagtgaaagaagaaagtaacagaaaatgatgaaataaagagaccatcttacaat

SEQ ID NO: 31198 - DNA, 3716 bp, Homo Sapiens
agagcggccggaagcgcggagggagccgcgggatggaccgcagcctgccagttttctccattcaagatagtccctttggagatgcgcccctgggtcgaagccactactggccatcccagagccagacctggtgtcccaagaccctgagcccatccaggtctcagagatccaggctcccacaagctcccaaggctctagccacaggtcccaactcccctgagctgtttgaggagtcctggccatccagttcagggaccccctccctgcccagcaccactgagggacagatgtgggcctccccagcacccaccctgattgacagcggggactccgtggtggccaagtatataaacaggttccgccaggctcagcccaccagtcgagaggagcgccagcctgcaggcccaaccccagctgacttttggtggctgcagtctgactctccagaccccagcagtcaaagtgcagcaggagccaacaaaccagaaggaagaccccatacagctgtccctactgcggtcaacgtgaccagtgcatcccatgctgtggctccccttcaggaaataaagcagaacctccacacatggaactcatccctgctggacctggagacgctgagcctacagagcagagctgccaggctgctcaaacgcagctccagcgatgccagcacttcctcattccccaccagctctgatggcctctctcccttctcggagaccttcatccctgactccagcaagggccttggccccagggcacccgcatccccggcaccagcccaggcccagacccccacccctgctccagccccagcctcctcccaagcaccccttcggccagaggatgacattctgtaccagtggcggcagcggcggaagcttgaacaggctcagggaagcaagggtgacagagcttgggtgccgcctctgacccctgccctccgcacgttggtgagccgagggagggaggagcctggggggagctggaggaggggctgggtctgagggggactgaggaccctccaccctctctctctgtctcagatctctcttatctgtctacagacctctcctgctccagtggagaccctcagttctctggggacccagcctaaccatgtcccactgtggagcagtgtggcccagcctggtccaccagaggccttctatgtggagaggcctccttttccctcagtgtcctctccacacatcttttgggcccccagctcccacgggttcttctgggccccacagtctgggccttgggtatcccttggggctgttcctcccacgcagcaggcctccaccctagcacatctgggctctaccctcgcgcccccggcttccctggcctccaccctcgaacccccggcctccaccccagctcccctggcctccacccttgcacccccagcctccaccccggctcccctggcctgtacccctgcacctccagcctccaccctcgcatccccagctgtcccccagggcctgcccatccctgacccaagcagctgtgcccagcctaagagcctggggcccaagtctcggaggagcagagcccctcgcccagaggctgccgagcaagtccctgcagctggccagggacctggccctcagctcaggggtgtcctgggccaggtagtggcagctcggctgttccctgacagcctggaggacacgcctcctcacttcgagggcccccctccacccaaggctggatctccgaaagtccaggccacacaaccccaaaccaaggtcactccccctccatctgaatcccagtgtcgggccaaggccgagtctctgaaagtcaaggccttgccgcccgcagcggggtcagtgatacggaagagcgaagccactccttcccctggagcctgcctgcagcccgaggtcccactctctccagctgagcaggcaaccacagtcaacgcctcgccgccagccttccaggtggggtctccggaggccctggccccgcccccgcccgctgctgaccacgccccctcggaggccctgcttgcccaggccgccctgctgctgcaggctgcagaagactccgacggcagcgagttccaggacgatcccgtgctgcaggtgctaagagcccatagggcagagctgagtcggcagaaaagggaagcggatgcccgattatcgttcctgttggaccaggctgaagacctgggatcttggtcccctccagccgggtcgccccctaggtccccaaggaggctgctaagaagggaaggagattccctggaggccagaagactttgaattgtacagattctattttacccagtgaggctctttttttttttttcatacagttactggttatctgtgagaaaggggttgtttggaaaggccaaggggtcatgccaatttaaggaaatgccccccatcctccgctgccccatggctctgccctgccccccaccccttcctgaccacggaaacaagatctcctttctggttatatcttccttggggcagagggagtttcagacaagacttctggcaagactgggacccaccttatctggcttcactcaggagccctggctcaaatggaccaaaggactgccctccacggaggaagctactagggtcatcagagtgttggatgatggtcaggctatagcccacacatgcttgagcagcagcagcatctggtgcagctgacccctccctccttgaagcactttctctccctgcttccagcccttctctctgcacctctctggtcaggcctagtcactagcccagcatgtcaactttggcatgacccagggccatggcgttgacatctctatctgcacccacccataggtgctcttgtctagcttaatgactctaaaccccgtctctattctgataatcctcaaatttctgtctgtaacctagacctggccacgaaaccttgggctcctacctcatcaccatttctacccaagggtttaaaagacatctcaaattccataggtcctaaatggagtttccaatctttccccctaggcgtgcctctccccagcttctttttttttttttttttggatggagtctagctctgtcacccaggctggagtgccatagtgtgatctcggctcactgcaagcttcgcctcccgggttcacgccattctcctgcctcagcctcccgagtagctgggactacaggtgcccgccaccacggtcggctaattttttttgtatttttagtagagacggtgtttcactgtgttagccaggatggtcttggtctcctgacctcgtgatccacccgcctcggcctcccaaagtgctgggattgcaggcgtgagccaccgtgctgggccccccctccccaactttcttcggctctgtcctttgccgctcagaccaaaaaccttagagctgtctttgacttctgtctttcccttccacccacagttaaccaggaaatcctgccatctccgcctttattttattttattttttgagatggagtttcacccttgttgcccaggctgtagtacaatggcatgatctcggctcacggcaacctccacctcccgggttcaagcgattctcctgcctcagctactcgggaggctgaggcaagagaattgcttgaactcagaaggcagaggttgcagtggaaaaaaaaaaaaaaggtaatttctctctctttctctctctctctgacacttgctttagaggctacatt

SEQ ID NO: 31199 - DNA, 1682 bp, Homo Sapiens
actgcgccgagggccgccatcgctattgcggcattctccctcggctccggaggtaggggcaactcttctcttcctgtctgggaaaaagaccatagctcaaaaggaaggccgagggagaagttagaaagggatgatgaacgaagcgttttgaggggactgcaacgccgcggcaatacccgcccctgagctgcgcgcactaccgcctcggtagctgtcatggccgccgggtcacgtgactccggcttggcgccgtcctggttttccgtcaccctggttctgtagtctcggttctccgactccctctttttctcgcttgtggactccgatatattgcccttcttcccttagaagaactgctgaaccgactctgagaaatttgaaaacatctggagaaaatgacccattggtttcataggaacccattaaaagccacagctcctgtgtcttttaattactatggtgtagtcactggcccttctgcttcaaaaatatgcaatgacttgaggtcatccagggcacgactccttgaactgttcactgatttgagctgtaatccagaaatgatgaagaatgcagcagattcatatttctcacttttacaaggtttcataaattctttggatgaatctacccaagaaagcaagttacgatatattcaaaatttcaagtggactgatacattgcaaggacaggttccaagtgcccagcaggatgctgtttttgaattaatttccatgggatttaatgtagctttatggtataccaaatatgcttcaagactggctggaaaagaaaatataacagaagatgaagcaaaagaagttcatcgaagcctaaagattgcagctgggatttttaaacatttaaaggaaagtcatctcccaaaactcattacacctgcggaaaaaggaagagatttagagtcacgactcatagaagcatacgttattcaatgtcaggctgaagctcaagaagtaacaattgctcgagcaattgaactaaaacatgctcctggactaattgctgcactggcgtatgaaacagccaatttctatcaaaaagctgatcatactttatccagtttggagcctgcatattctgccaaatggagaaaatatcttcacttgaagatgtgtttctacacagcttatgcttactgttaccatggtgagactttattggctagtgataaatgcggtgaagcaatcaggtctctccaagaagcagaaaaattgtatgcaaaggcagaagcactgtgtaaagaatatggagaaaccaaaggacctggaccaacagtcaaaccttcaggacatctgttctttaggaaacttggaaaccttgtgaagaacaccctagaaaaatgtcagagagaaaatggatttatttactttcaaaaaactccaacagaagccccacagctggaactcaaagcaaattatggtctcgtagagcctatacctttcgaatttcctcctacaagtgttcagtggacaccagaaacattggctgcatttgatctcaccaaaagacccaaggatgacagtactaaacccaaaccagaagaagaagtgaaacctgtgaaagaaccagacatcaaacctcaaaaggacactgggtgctacatctcctaaaatacaacttgcacttagaatttctctagcagtaaataagataaaccacag

SEQ ID NO: 31200 - DNA, 3822 bp, Homo Sapiens
gctcagggacccaaacctgtcgggcaggttttgagagctgtggagagagggacagaggctggagaaggatgtatggcctgccctgggcttgtctgttccctcctgagcctgagccccttaccttcctgaccccatgaagcacacactggctctgctggctcccctgctgggcctgggcctggggctggccctgagtcagctggctgcaggggccacagactgcaagttccttggcccggcagagcacctgacattcaccccagcagccagggcccggtggctggcccctcgagttcgtgcgccaggactcctggactccctctatggcaccgtgcgccgcttcctctcggtggtgcagctcaatcctttcccttcagagttggtaaaggccctactgaatgagctggcctccgtgaaggtgaatgaggtggtgcggtacgaggcgggctacgtggtatgcgctgtgatcgcgggcctctacctgctgctggtgcccactgccgggctttgcttctgctgctgccgctgccaccggcgctgcgggggacgagtgaagacagagcacaaggcgctggcctgtgagcgcgcggccctcatggtcttcctgctgctgaccaccctcttgctgctgattggtgtggtctgtgcctttgtcaccaaccagcgcacgcatgaacagatgggccccagcatcgaggccatgcctgagaccctgctcagcctctggggcctggtctctgatgtcccccaagagctgcaggccgtggcacagcaattctccctgccccaggagcaagtctcagaggagctggatggtgttggtgtgagcattgggagcgcgatccacactcagctcaggagctccgtgtaccccttgctggcggccgtgggcagtttgggccaggtcctgcaggtctccgtgcaccacctgcaaaccttgaatgctacagtggtagagctgcaggccgggcagcaggacctggagccagccatccgggaacaccgggaccgcctccttgagctgctgcaggaggccaggtgccagggagattgtgcaggggccctgagctgggcccgcaccctggagctgggtgctgacttcagccaggtgccctctgtggaccatgtcctgcaccagctaaaaggtgtccccgaggccaacttctccagcatggtccaggaggagaacagcaccttcaacgcccttccagccctggctgccatgcagacatccagcgtggtgcaagagctgaagaaggcagtggcccagcagccggaaggggtgaggacactggctgaagggttcccgggcttggaggcagcttcccgctgggcccaggcactgcaggaggtggaggagagcagccgcccctacctgcaggaggtgcagagatacgagacctacaggtggatcgtgggctgcgtgctgtgctccgtggtcctattcgtggtgctctgcaacctgctgggcctcaatctgggcatctggggcctgtctgccagggacgaccccagccacccagaagccaagggcgaggctggagcccgcttcctcatggcaggtgtgggcctcagcttcctctttgctgcacccctcatcctcctggtgttcgccaccttcctggtgggtggcaacgtgcagacgctggtgtgccggagctgggagaacggcgagctctttgagtttgcagacaccccagggaacctgcccccgtccatgaacctgtcgcaacttcttggcctgaggaagaacatcagcatccaccaagcctatcagcagtgcaaggaaggggcagcgctctggacagtcctgcagctcaacgactcctacgacctggaggagcacctggatatcaaccagtataccaacaagctacggcaggagttgcagagcctgaaagtagacacacagagcctggacctgctgagctcagccgcccgccgggacctggaggccctgcagagcagtgggcttcagcgcatccactaccccgacttcctcgttcagatccagaggcccgtggtgaagaccagcatggagcagctggcccaggagctgcaaggactggcccaggcccaagacaattctgtgctggggcagcggctgcaggaggaggcccaaggactcagaaaccttcaccaggagaaggtcgtcccccagcagagccttgtggcaaagctcaacctcagcgtcagggccctggagtcctctgccccgaatctccagctggagacctcagatgtcctagccaatgtcacctacctgaaaggagagctgcctgcctgggcagccaggatcctgaggaatgtgagtgagtgtttcctggcccgggagatgggctacttctcccagtacgtggcctgggtgagagaggaggtgactcagcgcattgccacctgccagcccctctccggagccctggacaacagccgtgtgatcctgtgtgacatgatggctgacccctggaatgccttctggttctgcctggcatggtgcaccttcttcctgatccccagcatcatctttgccgtcaagacctccaaatacttccgtcctatccggaaacgcctcagctccaccagctctgaggagactcagctcttccacatcccccgggttacctccctgaagctgtagggccttgtgggagtgatctggtggccagaacaggattttgcacggccccttttatcctgcgcatgtggcctagggtcatccccagcccatccctgtgtcagccctgagtgctggacactgcgttccagaaatgaggaagaggagagagaagagatggacagacctcagatccattaaagtgttctcacttccctgagacttggttctgggtccttaaaaccaggtttcctaggctgggaccctgtacatagttggtgtttaatgagtgtttatggagaggagagttctaaggtcacctctggctgcaggcatccagggattattccagcaatctgcaggtagggagtgggtcccagcctgggagcctgctgtcaggagcaggcagacctggactcacagcctggctgtgatgcttgttcgctcagcttctccatttatgagatggggagaatagtcacagcctcctcaaagggttgtgaaaatcaaatgtgataatttgtggaaagcccttagcagtggcctggcacaaaacaaatgctcagtggatggaagctgcctattattattgtcgttgttgttgtttgccatgactgctctgggccgggggtagagctagcatccgggcatgtacgagggaagagggaggcaggcctctattcaaaggcagaaattcctttaagattgtggtctgctgggtttcagggagtgtctgtgttgtttgtttttgtttgtttgtttgttttgagacggggtctcgctctgtcacccaggctggagtgtagtggtgcagtcttggctcactgcagcctccacctcctgggctcaagcgattctcatgcctcagcctcccgagtagctgggactgcaggtgtgtgccactatgcctggctaatttttgtgttttttgtagagacggggttttgccatgttgcccaggctggaagtgtctatgtttaactgcatcttataaaccagcaacaagttttctactgggaattagaatggtgcatacacaatgtattattatcactgtcagatgagcatgcttgaatgtagcatgactgcctctttttgcttttcctagaggttttttttttgcttgttactcatctgttgacctacctgggggaagtagcacccttgcatttcaaaaataaaattgatggcattacaaatggaataga

SEQ ID NO: 31201 - DNA, 2097 bp, Homo Sapiens
gaaaaaaacgttgctgattagagctgccgggtcagaaacagctgtgagacactaaagtccccactgttataattattcaatatgttcccactgactgaggaaaacaagcatgtggcccagttgttgctcaatactggtacttgtccaagatgtatcttcagattctgtggtgtggattttcatgcaccttacaaacttccatacaaggagttgctcaatgaactacagaaatttctggaaactgaaaaagatgaattaattttggaagttatgaacccacctcccaagaaaattcgactgcaagaactggaagatagtattgataatctaagtcaaaatggagagggaaggatctctgttagtcatgttggaagcactgcttccaagaactcaaatttaaatgtatgtaatgtatgcctaggaattcttcaagaattctgtgagaaagatttcattaaaaaggtgtgccaaaaggttgaggcctctgggtttgaattcaccagcttggtattttcagtctccttcccaccacaactatctgtaagagagcatgctgcatggttgctggtaaaacaggaaatgggaaagcagagtctgtcgctgggaagagatgatatagttcagctaaaagaagcctacaaatggataactcaccccctgttttcagaggaactgggtgttcccattgatggaaagagcttgcttgaagtgagtgtggtctttgctcacccagaaacagttgaggattgccacttcctagctgcgatatgcccagattgttttaagccagccaaaaacaaacagtctgtattcactagaatggcagttatgaaagccttgaataagataaaggaagaggatttccttaagcagtttccttgtcctccaaactcaccaaaggctgtatgcgctgttcttgaaattgaatgtgctcatggtgctgtttttgtggctgggagatataataaatactccaggaatctaccacaaactccttggataattgatggagaaaggaagctggaatcttcagtggaagaattaatttcagatcatctgttggcagtatttaaagcagagagttttaatttttcatcctctggaagagaagatgtagatgtgagaacattaggaaatggaaggccctttgcaattgagctggtgaatcctcatagagtacatttcacttcacaagaaattaaggaacttcagcagaaaattaataactcatctaacaaaatccaagtacgtgacttgcagcttgtcacaagagaggcaataggacatatgaaagaaggtgaagaagaaaagacaaagacctacagtgccttaatttggacaaataaagcgatacagaagaaagacattgaattcctaaatgacataaaggacttaaagatcgaccagaaaacacctttgcgcgtccttcaccgaaggcccctggctgtgcgagctcgcgtcattcacttcatggagacacagtacgtggatgagcaccacttccgcctccacttgaaaactcaggctggcacctacattaaagagtttgtacatggagacttcgggagaaccaagccaaacattgggtccctgatgaatgtgactgcagacattctggagctggatgttgagtctgtagatgttgactggccacctgctctggatgactagctttcaaatttggagacaaagagtatggttttcctggcatgatgtggacatccatggagcacatgccgtaaaatggctgtttacccaccataacggtgtcttgaaaactatttggatcatgttgatctatataattgttaatttgttgtaacatctcaggatctatatatgtgtatattttgtgttaaattgttccaaggatgtcttaggatttttctcattccctctttcacccccacaaaccaaactatgaataatgaaataattctccttaattctttcatttagagaggtgcacaaacaggacacattctctgttaacctaagaagctgtaatttcagcaagatttccctccacaagagatataccacctttaaaatcatgttctaatttttgtaaattatctgaataaaagttatatctag

SEQ ID NO: 31202 - DNA, 5445 bp, Homo Sapiens
aacctgtggcgcgctccgcggttccggcgcctgaagttttagctgcggtggcggcggcagtcgggaccgactgcaaggcaggttgagatgatggatctgaggcttgcagctcgcagtcccaacgagccttagggaccagggctaccaaaagggtggggagaacggtggtggcatctgtctgttgcctgggatccaggcgcccggttggggaatccttacttcaggaagcgcagccgcggctctgtgttttgagagtgcaaatgtcatttgtcagagtgaaccgctgtggtccccgagttggtgtaagaaagacaccgaaagtaaagaagaagaaaacttcagtgaaacaagaatgggataataccgtgactgatctaaccgttcatcgggcaactcctgaagatctggtacgccgtcatgaaatacacaaatcgaagaatagagcattagtacactgggaactccaagaaaaagctttgaagagaaaatggaggaagcagaaaccagaaactttaaatcttgagaaaagaagattgtctatcatgaaggagattctttctgatcaataccagatgcaagatgtgttggagaaatctgatcatctaatagctgcagcaaaagagctgtttcctcgtaggcgcacagggtttccaaatgtaacagtggctcctgattcctctcagggtcccattgtggtaaatcaagaccctatcacccaatctatctttaatgagtctgtcatagaacctcaggctcttaatgatgtagatggtgaagaagaaggaactgttaatagccagtcaggagaaagtgagaatgagaatgagttggataactctctaaactctcagtctaacacgaatacagacaggtttctccaacaactaacagaagagaattttgagttaattagtaagttgtggactgacattcagcagaaaatagcaacccagtcacaaataactcctccaggaacgccatcatctgctctttcatcaggggagcaaagagctgctctgaatgctaccaatgctgtcaagagactccaaaccaggcttcagcctgaagaatctactgagactctagactcaagctacgttgtgggacacgtgctgaactcaaggaagcaaaaacagctgttaaataaagtgaaaaggaaaccgaatttgcatgctctttccaagccgaagaaaaacatatcatcaggtagcacaacctctgcagacttaccaaataggactaattccaacctggatgtcctcaaacacatgatacatgaagtggaacatgaaatggaagaatatgagcggtggacaggtcgcgaggtcaagggtctgcagagcagtcagggtcttacaggcttcactttgtcgctggtgagctccctctgtcgcctggttcggtaccttaaagagagtgagatccagctacgtaaagaagtagagacaaggcaacaactggaacaagtattaggtgatcatcgagagctcattgatgctctgacagctgaaattcttcgtcttagagaagaaaacgctgctacacaggcaagacttcagcagtacatggtcacaacagatgagcaactgatatcactcacacatgctattaagaactgtcctgtgataaataacagacaagaaattcaggcatcagaaagcggagccacaggtagaagagttatggacagtccagagcgtccagttgtaaatgccaatgtctcagtgccattgatgttcagagaggaagtggctgaattcccacaggaagagttgcctgttaaactgtctcaggtgccagaccctccagataacatgaatctggccaagaattttccagcacatatttttgagccagctgtgttgttaacaccacccaggcagaagagcaacttaaaattctctcctcttcaggacgtattgagaaggactgttcaaactcgtcctgctccacgacttcctccaactgtggaaataattgagaaggaacaaaattgggaagagaagaccttacctattgatacagacattcagaattcaagtgaagagaatcgtctcttcactcagagatggagagtctctcacatgggagaagatttggagaacaaaactcaggctccttttgttaacctctcacagcccctctgcaattcccattccaacactcaacagtcaagaagccccacattctcagaagagctcccagtactgggagatgggcagcagctgagaacaaatgagtcattaatacaaagaaaggacataatgacacgaattgctgatttgacattgcagaattcggctatcaaggcacatatgaataatattattgagcccagaggagagcaaggggatggactccgggagttgaacaaacaagaaagtgcaagtgacatgacttctacttttccagtagcacagtctctaacaccaggtagtatggaggaacggattgcagaattgaatcgacaaagtatggaggctcgtggaaaactactgcagttgatagagcagcagaaacttgttggtttgaatctttctccaccaatgtcacctgttcagttacctctcagagcatggactgaaggagcaaagaggacaattgaggtatctattccaggagcagaagccccagaaagctcaaaatgtagtactgtctctcccgtcagcgggataaatacaagaagatcttccggggctactggtaattcttgttctccactaaatgccacctcaggaagtgggagattcacacctcttaatccaagagcaaagattgagaaacagaatgaagaaggctggtttgctctttctacccatgtatcataagtgaagtcaagtctcactgagtttgttcttaataatttattactcccctttccctgctctgacttttaagtttttatatccttctttcagataaaacctacaaagatcctgtgaattagtactaatgaaacagagaaataaagcaattattttttgactttctcaaataagttttcaacaaccaactgacctacagctccctgtgaatgaaactttgactgtagagaagttaaagttttgtattttaatactttcttaagtattttaagggttttttttattaatacatttttacctttatctttattcagggttttttgaggtttagtatatcttagttgatccatttatttatttattttcctgaagaactaatttgctttgcatgtaacttacaataaaattcctctgtgtgattagagtctggctttcaggaatatgtaacacccacttttctttcttttttcttgggaagtcattgctgttcatcactttttccatcaagtgaaatatacagccttaaaaacaataggcctgggagtgtttgtttatatttgcttaagcaggtaagagtggttgcatttattataaaatcttatgtagtttttaaatgtgaaaatgtcatcaataatggtaatgcaaatcaaataaatatgattctagagctcaaatgcctaaatgtggtaacattgatttaatggtatatttaatgcttcaaacaattaaatagaaaaagttgctattaattttcccagccctgaatttaagcagatctttcagggtagatttctctcttttttttttttgagacagagtcttgctttattgcccaggctggagtgcagttgtataatctggttcactgccacctcagtctcctgggttcaagcaatcctcttacctcagcctcctgagtagctaggattataggttcatgccaccacgcccagctaatttgtgtattttcagtagagacggggtttcaccatgttggccaggctgatctcgaactcctgacctcaaatgatccacctgccttggtttcccaaagtgccgggattacaggtgtgagccactgcacccggctcaggatagatttttcagggtacccttttggttctgagatgtttatttctattttaaacttgttttttgaatgatctctgctccctggctctatgataggaattctcaacctgagtgaacaattcaaactgagattacttgtgtttagactcatatattttgataacatatgacttctccagtatgccccagaaagctgctaataacttgctcaacctgaaatttacagttttccaaattacaggttggcagagatactggattgataacaacatccacagttatcatataatcattcttatgctgtaaacaaaattattttggttagcagaatttaataattaactgttaactacatactaggcaatattgtagccactttatgtgcttcatgacaccttatgggataggtactattatcctcattttgcagatgaggaaactgaggtacaaggaggtattttctcaaggtcacacaactagggagtggtggcattagaatgggaacataggcagtctttctccaaagcctatgctgtgctgcctcttgttggagagtaaacctgttttacagtgtgtgtagtatggaagcagcataataataagaatagctgttccttattgagccattactgtggcagacaccgtactataagctgtggtatcaccattatctcatttgaatctcatagtagacctatcagttagaggtatgtaaatgcttcctcctctcccagcacctttacagatgaggatgctgagccctagaggtgaagaaagttgtctaatgacagagtgcttgtaagaggtaaagccaagacttgaagctctttcttgcagttactggatttctcctaatttacgggaactaatacagtacagtagctaaggatgcaagtactgaaaccagaaatcttgcctcaaatgccatttctgccacttgagctgcgtactttggacaaattaatctcatctttcccatttgaaagtcagacataatgtcttccctagaggcttgtgaggattaagtgaggcaagtgtatgtaaatgggctgagatcagagcttggctcacaacactcagtaatgatcactgccaattttttttggtatataaataaataaatacactatttcccccatgtttccaatttttaagacattgtatagtgaatttattgtatctttctcagattaacaattgcacacagtgcttgaaatttagaggtatttcacctgaaaagatgtctagagattgaaagaaaacatgctgggcatatgatttgaaaatataaataacatgctatttaaaaataagtttaccctatgttttctatcttttctggcacctagatataccatttaataagtaatagcaaggataatcatttttttaagccctggaaaatcttgattaaagaggacatttcagtattgcaaataaatgcatggtatttgtgtaacattgtggaaactaataaacacaaattgtattataaaaaaaaaaaaaaagaaaaaaaaaaaaaaaaaaa

SEQ ID NO: 31203 - DNA, 2385 bp, Homo Sapiens
gataccggtttcagagtcctgggcagcgtgcgcgctcttcctggcggctgcgcaggtgtgaaaatcacaaatgtcaaatgatggaagatccaggaatcgggacaggcgctacgatgaggtcccaagcgacctgccctatcaagataccaccataagaacccacccaattcttcatgacagtgagcgggcagtgagcgctgatcccttgccaccaccccctctcccattacagccaccattcggcccagacttctactcaagtgacacagaagaaccagctatagcgccagatctcaaaccagtaaggcgctttgtccctgactcctggaagaactttttcagagggaagaaaaaggaccccgaatgggataagccggtgtctgatatcaggtacatctccgatggagtggagtgttcaccaccagcctctccagcaagaccaaaccaccgttcgcccctcaactcctgcaaagatccctacggagggtcagaaggaacctttagttcccggaaagaggctgacgcagtgtttccccgggatccctatggatctctagaccgacacacacaaacagttcgaacatacagtgagaaggtggaggagtataacctgagatactcctacatgaagtcgtgggcaggcctgctgagaatactgggtgtggtggagctgcttttgggggccggtgtctttgcttgtgtcacagcttacattcacaaggacagtgagtggtacaacttgtttggatattcacaaccgtatggcatgggaggcgttggtggattgggcagtatgtatgggggctattactacactggccctaagaccccttttgtactcgtggttgctggattagcttggatcaccaccattattattctggttcttggcatgtccatgtattaccggaccattcttctggactctaattggtggcccctaactgaatttggaattaacgttgccttgtttattttgtatatggccgcagccatagtctatgtgaatgataccaaccgaggtggcctctgctactatccgttatttaatacaccagtgaatgcagtgttctgccgggtagaaggaggacagatagctgcaatgatcttcctgtttgtcaccatgatagtttatctcattagtgctttggtttgcctaaagttatggaggcatgaggcagctcggagacatagagaatatatggaacaacaggagataaatgagccatcattgtcatcgaaaaggaaaatgtgtgaaatggccaccagtggtgacagacaaagagactcagaagttaatttcaaggaactgagaacagcaaaaatgaaacctgaactactgagtggacacatccccccacgcccagctaatttttttgtatttttagtagagatggggtttcaccgtgttagccaggatgatctcgatctcctgacctcatgatccacccgcctcagcctcccaaagtgttgggattacaggcgtgagtcaccgcgcccagctggtattgcttttctattccctttggacatacatgctacagtcccacaatgtagcatttccttggaaactccctttttttttttttttgagatggagtttcgctcttgttgcccaggctggagtacagtggtatgatcttggctcactgcagcctctgcctcctgggttcaagcgattctcctgcctctgcctcccaagtagctgggattacaggcacccaccaccatgcccagctaattttttgtatttttagtagagacaggatttcactatgttggccaggttggtctcaagctcctgacctcagatgatctaccagcctcggccttctgaagtgctgggattcaggtgtgagccactgtgcccagcagggatgcttcatctttctaagaattatcttggctttggactttattcataaatgttttatttctgttagtatgaacaatagactgccttaacaaagtttttttttaaacaaaatcgttcttgttggattttattcagcagcatctatcatgtagataaattcccaggtgtagcattacagcttctgactaatatagctgccattcagacaattaatgttcaaagagttttctaaagtgataaaaccaaagaaaagcatgtggaaaagcagaagcttagaaagttgtggtcactgaatgcactccctggtttttatttgtcagtgaaatctttatgcattcattgttaatattttaattccatggctttgtaggctgtgctgtgtctgaaggggtaacacctagggaaacatgaggccccttatgggaccccccaaatggaacaacttcactttctcttttatgtattgagccctgtgttaacatttcacttaagaagagcaccagtgcttt

SEQ ID NO: 31204 - DNA, 4731 bp, Homo Sapiens
agcaacagagtttagactgtctttgcttcatcatctgaaggtaaaattttccagatacggcagacggctttcagagtacaataaacagggaatgagaactatttacatggaagtttctttctcatgatgcggtggagaagcctcggccacttggttctgccagatgttcctggggttactgtaaatgggaaggacaggcagagctaaacaaggtttatcatttaaaagtgcctgtgtgaagtcacttttgctggaaaactgcagcttgggagctttctttgtattcacatcccactcttctgtcaagtacactttaccctgaccttatgagtggatgaagatacctcagttgtctgactttgccaattgcttaatttcagaatttaaaaaggggaaagaaaaacatcctgctaaaatatgaacatctgagtgtcttattttccaacatcgtcaatagctgtgagcgtcagcattaaatattctcccaaggagtgccatgatattgaagtcactttattaataacagctgtatctgcaaaacagtcaagagactcggacgttgaaagccagagatgacactgagcatgcttttattgcggcctaccatctttaagtgggacatattgattgatgagtgattgcctgtccatacactctctcatcatcctgttccttggattggacttcactaagcaatttatcactcaccttcagacttacatgtgggagttttcacaacagtagttttggaatcattagaacttggattgatttcatcatttaacagaaacaaacagcccaaattactttatcaccatggctttgaacgttgccccagtcagagatacaaaatggctgacattagaagtctgcagacagtttcaaagaggaacatgctcacgctctgatgaagaatgcaaatttgctcatccccccaaaagttgtcaggttgaaaatggaagagtaattgcctgctttgattccctaaagggccgttgttcgagagagaactgcaagtatcttcaccctccgacacacttaaaaactcaactagaaattaatggaaggaacaatttgattcagcaaaaaactgcagcagcaatgcttgcccagcagatgcaatttatgtttccaggaacaccacttcatccagtgcccactttccctgtaggtcccgcgatagggacaaatacggctattagctttgctccttacctagcacctgtaacccctggagttgggttggtcccaacggaaattctgcccaccacgcctgttattgttcccggaagtccaccggtcactgtcccgggctcaactgcaactcagaaacttctcaggactgacaaactggaggtatgcagggagttccagcgaggaaactgtgcccggggagagaccgactgccgctttgcacaccccgcagacagcaccatgatcgacacaagtgacaacaccgtaaccgtttgtatggattacataaaggggcgttgcatgagggagaaatgcaaatattttcaccctcctgcacacttgcaggccaaaatcaaagctgcgcagcaccaagccaaccaagctgcggtggccgcccaggcagccgcggccgcggccacagtcatggcctttccccctggtgctcttcatcctttaccaaagagacaagcacttgaaaaaagcaatggtaccagcgcggtctttaaccccagcgtcttgcactaccagcaggctctcaccagcgcacagttgcagcaacacgccgcgttcattccaacagggtcagttttgtgcatgacacccgctaccagtattgtacccatgatgcacagcgctacgtccgccactgtctctgcagcaacaactcctgcaacaagtgtccccttcgcagcaacagccacagccaatcagataattctgaaataatcagcagaaacggaatggaatgccaagaatctgcattgagaataactaaacattgttactgtacatactatcctgtttcctcctcaatagaattgccacaaactgcatgctaaataaagatgtagttcttctggacagaccacaactctaagaagctagtgctgctatctcatatatgagtattaaatatggtatgcttagtatattccaacctaagatagttaactacctgagaccagctgtgatgtttaaagacataaaggataaagtttacttttaaagggtttctaaacatagtttctgtcctaggaatattgtcttatctccataactatagctgatgcagaaagtccagccagtttactcatttcgattcagaatatttcaaatttagcaataaacaattagcattagttaaaaaagaaacatattccaagggcaggttcgattctagctctaattactgtcatgtcatttacccactggatcaaagggtatgtttcacttcttgacaatataaatgctgcagcaaagatgagaggtgaagtaaaaccgatacctgtcctgcaggtctaaaatttgaatggaaattcaagcacaagtactggggacacatcaaagtgtggtgtttggtttgcctggagatgccacgttgaatcatgtgattctagattaacattaaatagattgaaaaagaaactttgcacggtatgagcttcataccccaccaaacaaagtcttgaaggtattattttacaagtatatttttaaagttgttttataagagagactttgtagaagtgcctagattttgccagacttcatccagcttgacaagattgagaggcccatgccaacagtctaatctaagagattagtctttcaaactcaccatccagttgcctgttacagaataactcttcttaactaaaaacctagtcaaacaaggaagctgtaggtgaggagatctgtataatattctaatttaagtaagtttgagtttagtcactgcaaatttgactgtgactttaatctaaattactatgtaaacaaaaagtagatagtttcactttttaaaaaatccattactgttttgcatttcaaaagttggattaaagggttgtaactgactacagcatggaaaaaaatagttcttttaattctttcaccttaaagcatattttatgtctcaaaagtataaaaaactttaatacaagtacatacatattatatatacacatacatatatatactatatatggatgaaacatattttaatgttgtttacttttttaaatacttggttgatcttcaaggtaatagcgatacaattaaattttgttcagaaagtttgttttaaagtttattttaagcactatcgtaccaaatatttcatatttcacattttatatgttgcacatagcctatacagtacctacatagtttttaaattattgtttaaaaaacaaaacagctgttataaatgaatattatgtgtaattgtttcaaacatccattttctttgtgaacatattagtgattgaagtattttgacttttgagattgaatgtaaaatattttaaatttgggatcatcgcctgttctgaaaactagatgcaccaaccgtatcattatttgtttgaggaaaaaaagaaatctgcattttaattcatgttggtcaaagtcgaattactatctatttatcttatatcgtagatctgataaccctatctaaaagaaagtcacacgctaaatgtattcttacatagtgcttgtatcgttgcatttgttttaatttgtggaaaagtattgtatctaacttgtattactttggtagtttcatctttatgtattattgatatttgtaattttctcaactataacaatgtagttacgctacaacttgcctaaaacattcaaacttgttttcttttttctgtttttttctttgttaattcatttaaactcattgaaaacatagtatacattactaaaaggtaaattatgggaatcactgaaatatttttgtagattaattgttgtaacattgtctttcttttttttcttttgtttcatgattttgatttttaaaattattagcacacaactattttcagccctttaataatggagcatcaaaaacatcacctgtaaccccaagcaaatatagaagactgtattttttactatgatatccattttccagaattgtgattacaatatgcaaagagtcataaatatgccatttacaataaggaggaggcaaggcaaatgcatagatgtacaaatatatgtacaacagattttgctttttatttatttataatgtaattttatagaataattctgggatttgagaggatctaaaactatttttctgtataaatattatttgccaaaagtttgtttatattcagaagtctgactatgatgaataaatcttaaatgctttgtttaattaaaaaacaaaaatcaccaatatccaagacatgaagatatcagttcaacaaatactgtagttaagagactaactctccacttgtatgggaactacatttcactcttggttttcaggatataacagcacttcaccgaaatattctttcagccataccactggtaacatttctactaaatctttctgtaacacttaaagaattccctcattcattaccttacagtgtaaacaggagtctaatttgtatcaatactatgttttggttgtaatattcagttcactcacccaatgtacaaccaatgaaataaaagaagcatttaaaaggaaaaaaaaaaaaaaaaaaaaaaaaaaaa

SEQ ID NO: 31205 - DNA, 4731 bp, Homo Sapiens; identical to SEQ ID NO: 31204

SEQ ID NO: 31206 - DNA, 1644 bp, Homo Sapiens
ctgttttgttttttaaacaataatttaaaaactatgtaggtactgtataggctatgtgcaacatataaaatgtgaaatatgaaatatttggtacgatagtgcttaaaataaactttaaaacaaactttctgaacaaaatttaattgtatcgctattaccttgaagatcaaccaagtatttaaaaaagtaaacaacattaaaatatgtttcatccatatatagtatatatatgtatgtgtatatataatatgtatgtacttgtattaaagttttttatacttttgagacataaaatatgctttaaggtgaaagaattaaaagaactatttttttccatgctgtagtcagttacaaccctttaatccaacttttgaaatgcaaaacagtaatggattttttaaaaagtgaaactatctactttttgtttacatagtaatttagattaaagtcacagtcaaatttgcagtgactaaactcaaacttacttaaattagaatattatacagatctcctcacctacagcttccttgtttgactaggtttttagttaagaagagttattctgtaacaggcaactggatggtgagtttgaaagactaatctcttagattagactgttggcatgggcctctcaatcttgtcaagctggatgaagtctggcaaaatctaggcacttctacaaagtctctcttataaaacaactttaaaaatatacttgtaaaataataccttcaagactttgtttggtggggtatgaagctcataccgtgcaaagtttctttttcaatctatttaatgttaatctagaatcacatgattcaacgtggcatctccaggcaaaccaaacaccacactttgatgtgtccccagtacttgtgcttgaatttccattcaaattttagacctgcaggacaggtatcggttttacttcacctctcatctttgctgcagcatttatattgtcaagaagtgaaacataccctttgatccagtgggtaaatgacatgacagtaattagagctagaatcgaacctgcccttggaatatgtttcttttttaactaatgctaattgtttattgctaaatttgaaatattctgaatcgaaatgagtaaactggctggactttctgcatcagctatagttatggagataagacaatattcctaggacagaaactatgtttagaaaccctttaaaagtaaactttatcctttatgtctttaaacatcacagctggtctcaggtagttaactatcttaggttggaatatactaagcataccatatttaatactcatatatgagatagcagcactagcttcttagagttgtggtctgtccagaagaactacatctttatttagcatgcagtttgtggcaattctattgaggaggaaacaggatagtatgtacagtaacaatgtttagttattctcaatgcagattcttggcattccattccgtttctgctgattatttcagaattatctgttggaatgaacgcggcgtgttgctgcaactgtgcgctggtgagagcctgctggtagtgcaagacgctggggttaaagaccgcgctggtaccattgcttttttcaagtgcttgtctctttggtaaaggatgaagagcaccagggggaaaggcc

SEQ ID NO: 31207 - DNA, 4510 bp, Homo Sapiens
ggaaacgggtgaagaaggggaggcggcagggaagggggtgggggcctggcgggggcatccggcggagctggggtccccgggctccgtccggaggaagcgacgctgcgctcgctgggcagtcggaggggacgggacgcaccggagggcaggcggactcgccctgtcggtgactgcgccgtccgggcccgtcctgcctggccgcaggtgccctggatgaggccgccccgcgcgccccaaacgattttataatcaatggataaagtgggaaaaatgtggaataacttcaaatacaggtgtcagaatctcttcggtcatgagggaggaagccgtagtgaaaatgtggacatgaactccaacagatgtttgtctgtcaaagagaaaaacatcagcataggagactcaactcctcagcaacaaagcagtcccttaagagaaaatattgccttacaactgggattaagcccttcgaagaattcttcaaggagaaatcaaaattgtgccacagaaatccctcaaattgttgaaataagcatcgaaaaggataatgattcttgtgttaccccaggaacaagacttgcacgaagagattcctactctcgacatgctccatggggtgggaagaaaaaacattcctgttctacaaagacccagagttcattggatgctgataaaaagtttggtagaactcgaagtggacttcaaaggagagagaggcgctacggcgtaagttctgtacacgacatggacagtgtttccagcagaactgtaggaagtcgctctctaagacagaggttgcaggatactgtgggcttgtgttttcccatgagaacttacagcaagcagtcaaagcctctcttttccaataaaagaaaaatccatctctctgaattaatgcttgagaaatgcccttttcctgctggctcagatttagcccaaaaatggcatttgattaaacagcatacagctcctgtgagcccacattcaacattttttgatacatttgatccatctttggtttctacagaagatgaagaagataggcttagagagagaaggcggcttagtattgaagaaggggttgatccccctcccaatgcacaaatacatacatttgaagctactgcacaggttaatccattatataaactgggaccaaaattagctcctggaatgactgaaataagtggggacagttctgcaattccacaagctaattgtgactcggaagaggatacaaccaccctgtgtttgcagtcacggaggcagaagcagcgtcagatatctggagacagccatacccatgttagcagacagggagcttggaaagtccacacacagattgattacatacactgcctcgtgcctgatttgcttcaaattacagggaatccctgttactggggagtgatggaccgttatgaagcagaagcccttctcgaagggaaacctgaaggcacgtttttgctcagggactctgcgcaagaggactacctcttctctgtgagcttccgccgctacaacagatccctgcatgcccgaattgagcagtggaatcacaactttagtttcgacgcccatgacccgtgtgtatttcactcctccactgtaacgggacttttagaacattataaagatcccagttcgtgcatgttttttgaaccattgcttactatatcactaaataggactttcccttttagcctgcagtatatctgtcgcgcggtaatctgcaggtgcactacgtatgatggaattgatgggctccctctaccctcaatgttacaggattttttaaaagagtatcattataaacaaaaagttagagttcgctggttggaacgagaaccagtcaaggcaaagtaaactctccggtccccaaaggttgttaactaggtccgctttcatgtgcatcagacagtacacctatagcaagcacacgtagcagtgttaggctttttcatacagtatgtaagcttagtgttagtatctgtcagatgctacctgctgttacttattcagataaacatggtgcctattggaacaatagcggatagagctacaggtgttcagtaagactacaaaaacattttgcctatttcgctaacagtttggtttttaatggctgtggtatttgagtgaggcaactctggggcatttgttatgaagaattctatttcttactgaagaacaaattattaatattggatgagtatttcaacagtgtgactaatgtttgaaattattttttctaagagtttttctataaccttccaaaagtcgtgatgtttgtagttactataaatcaagctttggaagtccaaaaagaataaaagactgccttccttttagaaaaaaatgcaattttctggccacaagggcatagtgcagttcacttacgtgttgatgtagtttataatcagacgccttttctcttctgcaaaaggtactgttaagtaaaccagattttctaaataggcattcttaaaatttcagacttacaaagctagtagtagaattttattgaaaggcctaggtattaattttttaaatgagtgctttaacttaaaacaggcgtttggaatagctgctgcaatgtagtcttgtgtgtgatttttttttaagttgatgtgcagtctaattgttgtttcataaaagttggatctgttcctatgcccaggatgattttgtgaaccgtgaagtacgtgagactagaagacgcccaaacaagtcagataatagtaactacaatggttgctgatgttgagattattgttgaactataattaataatttggatggcagaatttatctcttttttgtaaactctcataactgaattgcttaagtataatttatagaatttcagtgcagttcattcttaatggaaaatctgaaacctaaattgcagatttaaaaggtactgtacaaccattatatctgtaaataacttagcacctttttgtcacttagaataatatgtactactacttgagtgagcgcttttggaagttatatcaagttctagtgtttgcttcttagtaactgaactgaatttacagttctgtcctagacattttgcactaaagtagccgaatccactctcatgtcttttcgttaatgtgctctgtaccactggtgagtgctccatagtttccttacctgctgctacagaatgttattttacatccctatggctattgccaaggctacaaaaaaggaaagctatatttgtatgcaacactaaccttttgactgctaatgtatgtttctgcttgctgtgccttgttatggctgctttttttgtgctaataaagtatgtttggtgttctccttgtatatctgctgttttatacatttgcaacaatttctcttgtaaatggaatggtttggggtttttaaataagcattaactaacaacctttctatagttaatgcagagttaatgaacagtctaatattgacttatcagaataagctaactctaaatttaatgctctacatcttatcagtcataattatatatactgtggaacagtatctgtagttactgcaaattactgtacagtttaggttataacagaaaactgacagagaagtaataaacctattgatttctctgcttataaatgaaagattgaaactatccaatgacatattatagtaaatgagtatctgtaacctcccactgcatcagaagcaggttaaatgaagtcttgtgaatttgtaatagatcagtaccatttattggtttggggaccatcttaattaaaaataaatgcccaaaatgtagaactttaaccaaagacttgtcccttttaaagcaaaatggggattgaagggacttataatttctgttgtttctaattaaagtccctgaagatcatataccaaagtgtttgagaacttcatccaaacctactttaaagcattatgtgcaattaagttgttatgacataattatattgcctaattgttgggtcttttttcttgagcttataatgtacctggaaaataaacctcttgagaaaaagaaaagttcatactgattattggaaaaggactatatatgtgagcaagattgtgttttagagaggaaacttgaaactccaagaaagcacttgatgtttttatatgcttgtagcaaattgatgttctaactgtagttttatagaaagtattaatgcttttatgtatttcaaaactttcatatgttaaatggaaattgttttaaatgtgtttgagtttatgtaagcatgtatacactgtgctaaaagtcacatgtttcagtttgtgtataatattaatatgcaatttttggtttaaatttttgtcttaaaatattagtggcttacattttaaaaaagaaaaatcaccagcatgaacttgcacctaagtctatattcactgtgtccttttctgaatcccattgtagcctgtcaactaaatttgagtgttaacggtctttttaaagtgcatttaaatacaaaccaggaatttctttagaagttga

SEQ ID NO: 31208 - DNA, 2244 bp, Homo Sapiens
tcaaaaaaattcttcagaaggaaaacagcccgtgatcttctaccaataaagccagtggaaattgccatagaggcgtggtgggtggtgcaggctggctatatcacagaagatgacatcaagatatgcactttgcctgagaaatgcgctgttgataagatcatcgattcaggccctcaactctctggatcactagattacaatgtagtacatagtttgtataacaaaggatttatttatctggatgtaccaatatctgatgacagttgtatagcagttccacctcttgaaggttttgtaatgaatcgagtgcaaggtgattattttgaaactctactctataagatatttgtttcaatagatgagcacacaaatgttgcagagcttgcaaatgtccttgagattgacttatccctggttaagaatgctgtttcaatgtattgccgattgggctttgcccataagaagggacaagtaattaatttggatcaacttcattcatcatggaagaatgttccatccgtaaacagattaaagagtaccttagatccacagaagatgctcttgtcatgggatggaggggaaagtaggagtcctgtacaagaagcttcatcggcaactgacactgatacaaatagtcaagaagatccagctgacacagccagtgtaagcagcctgagtctgtctacaggacacacgaagcgcatcgcattcctgtttgactccactcttactgccttcttaatgatgggaaatctttcaccaaacttgaaaagtcatgcagtcacaatgtttgaagtaggcaaactctcagatgagtctctggacagctttcttatagaactagaaaaggttcagagcactggtgaaggagaagcacagagatattttgatcatgcacttactctgagaaacacaatactgtttctgcgtcataacaaagatctagttgcgcaaactgcacagccagaccaacccaattatggttttcctctggatctcttacgctgtgaaagccttcttggtttggaccctgcaacttgcagcagagttctaaacaaaaattacacgctgcttgtttccatggctcccctcaccaatgaaatccggcctgtcagcagctgcacccctcagcatattggaccagctatcccagaagtcagctctgtctggtttaaactgtacatttatcatgtcactggacaaggaccaccatcccttttattgtccaaaggtacaagacttcgaaaactgccagatatatttcagagttatgatcgattgctaataacatcttggggtcatgatcctggagtagttcctacctcaaatgtgctcacgatgttgaatgatgctttaacacattctgcagttttaattcaggggcatggtctgcatgggataggagaaactgtccatgtcccatttccatttgatgaaacagaactacaaggagagttcactcgtgtcaatatgggtgttcataaagcattgcagatactaaggaacagagtggacttacagcatctctgtggatatgtcaccatgttgaatgcttccagccaacttgcagatagaaaactcagtgatgcttctgatgagagaggagaacctgatttggcttctggctcagatgtaaatgggagtacagagtcatttgaaatggtcattgaggaagcaactatagattcagcaacaaagcaaacctctggtgccacaacagaagcagattgggttcctctcgagctgtgctttggaattccactgttcagttccgaattaaaccggaaagtttgtaggaaaattgctgcacatggcctttgcagaaaagagagccttcaaaacctcttacattccagtagaaaactctctctgcaagtccttaactttgttcactcattccaggaaggtgcttcaatattggatattcacacagagcccagtttttcaagtttgctttcacagtcatcgtatgctgacatgggtgttccacttcctgcaaaaaacttaatatttaaagatggtgtcttatcagaatggagtggacggtcaccttcctcacttcttattgctaatctccatttgcaataatttggttacaccatttgttgctcacactttctgccttttttctttcttaacgttagctttatagtgtcagccactaaaaagcatcctgctgctgcagtgcaattcttgcttaactaatattaaaagttggggaacataaaaaaaaaaaaaaaaaaa

SEQ ID NO: 31209 - DNA, 1366 bp, Homo Sapiens
gagacatggtgctgtcggagctagcggcgcgcctcaactgcgccgagtacaagaactgggtgaaggcgggccactgcctgctactgctgcgcagctgcctgcagggtttcgtcggccgcgaggtgctctccttccaccgcggcctactcgccgcagcccccggcctggggccccgcgccgtctgccgcggcggctcacggtgcagccctcgcgcccgccagtttcagcctcagtgtcaggtgtgcgctgaatggaaaagggagattttgagacatcatgtcaacagaaatggagatgtgcactggggaaactgccggccgggccgctggcccgtggacgcctgggaggtggccaaggccttcatgccccgaggactagcagacaaacaaggacctgaggaatgtgatgcagttgctcttttaagtctcatcaactcctgcgatcacttcgtggttgatcgaaagaaagtcacagaggtaattaaatgtcgtaatgagatcatgcactcttcagagatgaaagtatcttctacgtggcttcgagattttcagatgaagatccaaaattttctgaatgaattcaagaacatcccagagattgtggcagtatactccagaatagaacagctgttgacgtctgactgggctgttcacatccccgaggaagatcagcgagatgggtgtgaatgtgaaatgggaacttacctgagtgagagccaagtcaatgaaatagaaatgcagttactaaaggagaaacttcaagagatatatcttcaagcagaagaacaagaggtgttgcctgaagagctctcaaatcgactggaagtggtgaaggaatttctgagaaacaatgaggatcttagaaatggccttacagaagatatgcagaagctagacagcctctgtctacatcaaaaactggattcacaggaacctgggagacaaacacctgacaggaaggcctgaggttgcccgtcaacaaaaatcaggcatgttctgtgaaagtcagcatggcttccatctcagacatccttttctgtgcaaaaggaaaaagttaccagagtattgtacccaaacaaaaaggaatttttgttgttttgtcctggactttcctctaactctttggaactattttaatatttataaacttggggttgtataatctattgcaataaaaaatattagatactctatgccaaaacttgctaccaggccaggtgtgatggctcacacctgtaatccccagcactttgggaggccaaggcgggcggatcacctgaggtcaggagttcgagaccagcctggccaacatggcgaaaccccatctctacttaaaaaaaaaaaaaaaaaaaaaaaaaaaaaaaaaa

SEQ ID NO: 31210 - DNA, 3931 bp, Homo Sapiens
atcccaggggaaacctgacggccaggttccctcgtgccagctgccgggaggcgggagggagtgccctgaaactctaatctcattgcctggccagaaaaggaagtaatccctagtgtcagcagattcagcggtactggtgtataataggatcaccaatatacaacaggaaaaaacaaaagtgaaagattatcaatatagattattgagtaggagtaaagaaggtaaatcaaaaaggggaaaagagattacagacacagaaaatgtcagacaacaaagaaaggaagagtcaaggatttcctaaagaagataaccaagacacaagttcattagctgatgctgtagagaaagttgcaaagcaacaacaatcacaagcatcagagatagaaaaaaacaaaaaggttctgttcaatttgaagaatgaacttcatgagcttgaaaaagaaatagcagctatctctgcagaaactaaagaaacagaaagacaaatttatcaacaagattctgccatagagaataccaaacttcattgtgatagcctggaaactcaaatcaaatccttacattcagaaaatgtaaagcttaaatttgacatagaaacagcccaagaagattttgaggaacacatgataaaatataatgcatattatgcaaaaataaaagcacataaaaatagtttgggggaagtagagagcaaatggtcatttatgactgaactccatgaaaagcgagattttgttaaaaaattaaagacaatgaaagaagaacttatgcaagatcttcaaaatccaggagggaaccgaataacacaagtacaggaagacattacaaacttaaaggataaaattataactgtaaaagaatctatcattgaaaaaacttgttttcttgaggaagaaaaaaagacacatgaaaaattaagaaaagaaatagagggtctcgccccatcgcccaggctagagtgcagtagtgcaatctcggctcactgcaagctctgcctcccaggttcacgccattctcctgcctcagcctccggagtagctgggactacaggcgcctgccaccacacccagctaattttttgcatttttagtagagacggggtttcaccatgttagccaggatggtcttgatctcctgacctcatgatccacccgcctcggcctcccaaagtgttgggattacaggcgtgagccaccgcgcccagccttaatttaacttttaagttcaggggtatgtatgcaggtttgttatataggtaaatttctgtcatagtttgttgtacagattatttcaatagccaggtattaagcctagtacccattagttatttttcctgatcctttccctcctctcaccctccagtgtgtgttgtttccctctatgtgtccataagttctcatcatttagctcccacttataagtgagaacatccagtatttggttttctgtttctgcattaattcacttaggatagtggcctccagctccattcatgttcctgcaaaggacataatctcattctttttatggctgcatagtatttcatggtgtatatgtaccatattttctttatccagactaccactgatgggcatttaggttgattccatgtctttgctattgtgaatattgctgcaatgcacttacacgtgtatgtgtctttatgatagaatgatttatattcctttgggtatataatcagtaatgggattgctgggttgaatgggattctgtttttaagtctgaggaattgccacactgtcttccacaatggttgaactaatttacactcccaccaacagtgtataataagtgttctttttctctgcaaccttgtcagcatgttttttgtttgtttgtttgttttgttttatttttttactttttgatactagtgatgatggtatctccttgtggttttgatttacatttccctaatgatttatgatgctgaacttttttttggtagtttaaaaggaatagcatcaaatctatacattgctttggatagtatggccattttaatgatactgattcttcctatccatgagcatggaatgtttttccatttgtttatgtcatctctaatttatttgagcagtattttatagttctacttgtagagatcttttaccttcctggttggctgtgttcttaggggtgtgtgtgtgtgtgtgtgtgtgtggcaactgtgaatgggatttgactcagtttgattggtgttatataggagtgctagtgatttttgcatattgattttgtatcctaagactttgctgaagttgtttatcagcttaagaagcttttgggccaggactgttgggttttctagatatagcatcatgtcgtctgcaaacagggctagtttggcttcctctcttcttatttgtatatgttttatttctttctcttgcctgattgctctggctaggacttcgaatactatgtcaagtaagagtagtgagagaggggatccttgtcttttgctggttttcaagaggaatgcctctggtttttgcccattgagtatgatgttggctgtgggtttgtcatagatggctcttattattttcaggtatgttccttcagtacttagtttattgagagtttttaacatgaatcgttgttaaattgtatcgacagtcttttctgcatctattgagataattcatgttgtgtttgtcttcagttctgtttatatgatgaatcatatttattgatttgcatatgttgaaccaaacttgcatcccagatataaagcttacttgatggtgatggataagctttttgatgtgcttctggattcaatttaacagtattttgttggggatttttgcatcgatgttcatcaaggatattgacctgaagtttcctttttgttatgtctctttcgggttttggtatcaggatgattctggcctcatagaatgagttagggaggagtccatcctcctcaattttttggaatagttttggcaggaatggtaccagctcttctttgtatatctgatagaattcagctgtgaacccatctggtactgggcttttttcagttggtaggctatttattactgaattaattccagagcttgttactggtctgttcagagattcgatttcttcccggttcagtcttgggagggtgtatgtctccaggaatttatccatttcttctagatttcctagcttatgtgtgtaggggtgttcataatattctctgatggttatttgtatttctgtggggtcagtggtgatatcctcctcatttctgattaggtttattttgatcttctctattctgtgttagtctagctagcagtttatctgttttattaattttttcaaaaaaccagctcctagattcactgatctttttgaaaggtttttttttggtctcagtctccttcagctctgattttggttattgtcttctactagctttgggcttggtttgcttttgaactttttcatttcaattctattacttctaattcatttaaaagttgtcctcaattcagttaaaaaatgaaaagttaagaacttaaagattcttcacaacaaattatgaagctgaaggaccaatatagtcagaccattttcttaaaacgttacatttttgtgaataattttatttattccatgatgagaatcgatcattaatatgagtaaccttcttctcaaaacaaccagcttttaaagaaggtgaattccaataccaaaagatttttattacttctttttggagtcttttttctatctcttctgaatatctttagccatggccttgttacagttcaagaatcatcttttgcctggactacagcattattttgttctaattattttaaatattgtgttttacatattttggttctcatattaatcttgcttttacattttttggttcataaaaataaaaaatgtttttttg

SEQ ID NO: 31211 - DNA, 7597 bp, Homo Sapiens
cgctaggaaagggaactgggttgcgacggtccggcgagagagagctggggtgctggggtgcggggaagttggggagcagaggccgcttggtgtccgagtagggtaagaccgcaccgacccagtccgttaggaaagaagggaaacgaggcaattgtcgggcggatccccggacggagggctaaggttgtgtggaaggcgctgctccccggatggcgaccgcagatactccggccccggcctccagtggcctctcgccgaaggaagaaggggagcttgaagatggggaaatcagtgacgacgataataacagccagatacggagtcggagcagcagcagcagcagcggcggcgggctgttaccctatccgcggcgaaggcctcctcactcggcccggggcggtggatctggcggaggcggtggctcttcctcgtcatcgtcctcttctcagcagcagctgaggaatttctcacgctcgcggcacgcgtctgagcggggccacctcaggggacccagcagctaccgacccaaagaaccgttccggtctcatccgccttctgtacggatgccttcgagctcactgtccgaaagcagtccccggccgtctttctgggagcggagccacctcgccttggaccgtttccgctttcgaggcaggccttaccggggtgggagtcgctggagtcgggggcgaggagtgggtgagcgaggaggcaagccggggtgcagacctcctctgggaggaggagcaggatccgggttcagcagcagtcagagctggcgagagccctctccacctcggaagagctccaaaagttttggaaggtctccatcaagaaaacaaaattattcatcaaaaaatgaaaactgtgtggaagaaacttttgaagatttgcttttaaagtataaacaaatacagttggaactagaatgcatcaataaggatgaaaaactagcattgagtagcaaagaagagaatgtgcaggaagatcctaaaacattgaacttcgaggaccaaactagcactgataatgtcagtattacaaaggattcaagtaaagaagtagctcctgaggagaaaacacaagtcaaaacttttcaggcatttgaattaaaaccactcaggcaaaaattgactttaccaggagataagaaccgtttgaaaaaagttaaagatggagcaaaaccactttccctgaaatccgacactactgattctagtcaaggattacaagataaagaacaaaatttaacaagaagaattagtacctcagatattctgtctgaaaagaaacttggtgaagatgaagaggaactatctgaattacagcttcgccttttggctcttcagtcagccagtaaaaaatggcaacaaaaagaacagcaggtgatgaaagaaagcaaagaaaagttgactaagacgaaaactgtacagcaaaaagttaaaacaagtacaaaaacacattcggccaaaaaagttagcactacagctaaacaagcattgaggaagcagcaaacaaaggcatggaagaaactacaacaacaaaaagagcaggaaagacagaaagaagaggatcagcggaaacaagctgaagaagaagagagaaggaaaagagaggaagaaatcagaaaaattcgagatctctcaaatcaggaagaacagtacaatcgattcatgaaattggttggtggcaagaggagatcaagaagtaaatcttcagatcctgacctgaggcgatccttagataagcaacctactgatagtggaggaggcatttatcagtatgataactatgaagaagttgctatggatacagatagtgaaaccagttctccagctccttcaccagtgcaaccgccatttttctctgaatgttcattggggtatttttctccagcaccatctctttctttgcctccaccacctcaggtttcttctctgccacctttgagccagccttatgtggaaggcttgtgtgtttctcttgaacctctacctcctctaccaccattaccacctctcccacctgaagatccagaacagcctccaaaaccaccttttgcagatgaggaagaggaggaagaaatgctgcttcgagaagaactacttaaatctctagcaaataaaagagcttttaagccagaggaaacatccagtaatagtgacccaccttcacctccagttctgaacaattcacatcctgtgccaagaagcaatctatcaatagtcagtattaacacagtgtctcagcctaggatacagaatccaaagtttcacagaggaccccgtcttccacgaactgtgatctcgcttccaaagcataaatcagtggttgtaacactaaatgattcagatgatagtgaatctgatggagaggcttccaagtcaacaaatagtgtttttggtggattagagtccatgattaaagaagcaagacgaactgctgagcaagcttcaaaaccgaaagtacctccaaaatctgaaaaagaaaatgatcctctgcgaacaccggaggctttgcctgaagaaaagaagattgaatatagattgttaaaggaagagattgccaaccgtgagaaacagcgtttgattaaatcagatcagctgaagacaagttcatcatccccagcaaactctgatgtggaaattgatggtattggcaggatagcaatggttactaagcaggttacagatgcagaatcaaaactgaaaaaacataggattctcttgatgaaagatgaatctgttttaaagaatttagtgcaacaagaagctaagaagaaagaatctgttagaaatgctgaagcaaagattacaaaacttacagaacagcttcaagcaactgaaaaaattcttaatgttaacagaatgtttttgaagaagcttcaggaacaaattcacagagttcaacagcgtgttacaattaagaaagctttgactctaaaatatggagaagagcttgctcgggcaaaggcagtggccagtaaagaaataggaaaacgtaaactggaacaagatcgctttgggccaaacaaaatgatgagactggacagttctccagtatcaagtccaagaaagcattcagcagaactaattgctatggagaaaagacggttacaaaagctagaatatgaatatgccctgaaaattcaaaaattaaaagaagcccgtgcccttaaagcaaaggaacaacaaaatatctctccagttgtggaagaggaacccgaattttctttacctcaaccctcacttcatgatctgacacaagataaattaaccctggacactgaagaaaatgatgttgatgatgaaattttgtctggttcaagcagagagcgaagaagatcttttttagaatccaattattttactaaacctaaccttaagcacactgatactgctaacaaagaatgcataaacaaacttaataaaaatactgtagaaaaaccagaactttttctagggttaaaaattggtgaattgcaaaaattgtattcaaaagctgacagcctaaaacagctgattttaaaaaccaccacaggcattacagagaaggttttgcatggtcaggagatttctgtagatgtggattttgtcacagcacaaagtaaaacaatggaagtgaagccatgtccttttagaccctaccatagtcctcttctagtttttaagtcctacagatttagtccatattatcgaaccaaggaaaaacttcccctgagctcagtatcatacagtaatatgattgaaccggatcagtgtttctgccgttttgatttaacaggaacatgtaatgatgatgattgtcaatggcagcatatacaagactatacacttagccgaaaacagttattccaggacattctgtcatataatctgtctttgattggttgtgcagagacaagtactaatgaagaaattactgcttcagcagaaaaatatgttgagaaactttttggagtaaacaaagatcgaatgtcaatggaccagatggctgttctccttgttagcaatatcaatgaaagtaaaggtcatactcctccatttacaacctacaaagataaaagaaagtggaagccaaagttttggagaaaacctatttcagataatagcttcagtagtgatgaggaacagtctacaggaccaattaagtatgctttccagccagagaaccaaataaatgttccagctctggatacagttgtcactccagatgatgtcagatactttacaaatgagactgatgacatcgctaatttagaagcaagtgtgcttgaaaatccttctcatgtacaactttggctcaagcttgcgtacaagtacttgaatcaaaatgagggggagtgctcagaatccttggattctgctttaaatgttctggcgcgagcattggaaaataacaaagacaatccagaaatttggtgccattacctcagattgttctcaaaaagaggaaccaaggacgaggtgcaggaaatgtgtgaaacagctgttgaatatgctccagattatcaaagcttttggacttttctacacctagaaagtacctttgaagaaaaggattacgtatgtgagagaatgttggagtttctgatgggagcagccaagcaggaaacatccaatattttgtcctttcagcttttagaggctcttttgtttagagttcagctgcacatatttactggaagatgccaaagtgcactggcaattttacagaatgcattgaaatctgctaatgatggaatagtagctgaataccttaaaaccagtgatcgatgtttggcatggttggcctacatacatcttattgaattcaacattctcccttcaaaattttatgatccatctaatgataatccttcaagaattgttaacactgaatcatttgtaatgccatggcaagctgttcaagatgtaaagactaatcctgacatgttgttagcagtttttgaagatgcagtgaaagcttgcacagatgagagccttgctgttgaggaaagaatagaggcctgccttccactttacacaaacatgattgctctgcaccaactcctggagaggtatgaggctgcaatggagctttgtaaatctttattggaatcatgtcctattaactgccagttgctggaagctcttgttgcattatatttgcaaacaaatcagcatgacaaagccagagcagtgtggcttactgcatttgaaaaaaatcctcagaatgcagaggttttttatcatatgtgcaaattcttcatcttacagaatcgaggcgataatcttcttccatttttgcggaaatttattgcatccttctttaaaccggggtttgagaagtataataacttggatctgtttcggtatctcttaaatattccaggaccaattgacattccatctcgtttatgtaaagggaattttgatgatgatatgtttaaccaccaagttccttatttgtggctgatttactgcctttgtcatcctcttcaatcaagtattaaagaaacagtggaggcatatgaggcagcattaggggtggctatgagatgtgatatagtacagaagatatggatggattatcttgtctttgcaaataatagagctgctggatccagaaacaaagttcaagaattcaaattttttactgatttagtgaatagatgtttggttacagtccctgcccgataccccattccttttagcagtgctgattactggtccaactatgaatttcataatagggttattttcttttatttgagctgtgttccaaagacccagcattccaaaaccttggaacggttttgttcagttatgccagctaattctggacttgcattgaggttacttcaacatgaatgggaagaaagcaatgttcagattctgaaacttcaagccaagatgtttacatataatatcccaacatgcctggccacctggaaaatgtaatgcaacaatcatgtacatgtttttatagctattgcttttatttataaggtttgctccagacaggtaaatctgaaatgacatctatatatatatatatatatatatattttttttttttttttcctggacagattgctattcttaatttagatttgtttttagcatttactgaggtttaatgagagtgagtactcattgaatagcctctaaaagcaaaaagcgtagacttttaattttctttgaaggacaacatttaggtgacagtactgttatcaaacaaatctgctacagacattttaagaccacctcttgaaatggtggtgtgtcacctgttgtagtctgatttcttctttcttttaaaggtgttagtgctaggtatttttgactagtaattatgaggtgttttttttttgttgttgttgttgttttttttttctcctgtgaacgttatttatgttcaaaacactggtctgcttttttcttgtaaagttgataaaaattgttgaatttttcttttcactataggttttcctccttggaagtttagcctgttaactttcaggaagttttgtactcagattcccacagtcagtattctgccagtggtggtgtttcattttgttcaaagatatataaatttttcttttcctttttctatatttcttttttttttttttctcttagagccattgctgctgagattgttctaaagggacaaagagaggtccaccgtttatatcagagagccttacagaagttacctctttgtgcatcactgtggaaagatcaactcttgtttgaagcatcagaaggaggtaaaactgataacctgagaaaactagtttccaagtgccaagagattggagtcagcctaaatgagctcttaaatttaaacagtaacaaaacagaaagcaagaatcactgaacactgggtgcagtcagttctaagtccttataataattgccaaaattatttgaatgattcttcaagattaggctgatccctggctaaggtctgtgtaaggcagacaagcgttattgatcatatcaagttccctacaatatcctgtcctcaaaaccggaagcaatgaacatgatcctcttcggttggataaatgaacttcctgtttggcctgcttctaggccctgccagattctcataacatcatatacgtaagtatagttcctcaaagtgactgacatttattttaattttgctttgtttttttttattttctcccccattcctttattttgtgttattcctgactcacttgacactctctgatgcctgagagattcctgtttgggatttaatatccagggctgtgtttacagtaaaaaaagcaggcagtcccttttagtttttcctttttaaatttttttgagattcttcatttcaggatttaaaactatagcagtccatcttaaggaaagtgtaactgccatggccacaagtctgctagttgcacttgaatgctctatcagggttgtttattaccctttctacgttctggactccttgccgagactgtttaacttgaagattaaagaaactattgcaaatgccagtgcatcagaacctaagagtggtcaaatattatgtgcaatttttttgtaaagaaattttaatttataataaagtttaacagttt

SEQ ID NO: 31212 - DNA, 7597 bp, Homo Sapiens; identical to SEQ ID NO: 31211

SEQ ID NO: 31213 - DNA, 3286 bp, Homo Sapiens
cagcacgtcgacgcggggcttttctttagccgggtcccgctaactcggctacggtgtatctgcgtctttggtcaggttgttccttggctaagagggcagtcgtcgcggacccacgcggttagcaaggcttagtgctcgggccggccgccttcacttccctcccggcttttcctcccgacttatccactttaggggcgtctcggagtgccggaggcccccggggaagagcggggtgccggtgtccgctccgggctcggatgggaagtggtgggaggagcgacccgggatgttcagtctgatggccagttgctgcggctggttcaagcggtggcgggagcctgtcaggttggcaaataaacaagataaagaaggagctttaggagaagctgatgtcattgaatgtctatctctggaaaaattggtcaatgagcacaagtgcctgtgtcagatagaaccatgttcagcaatctcggggtatggaaagaaaattgacaagtccattaaaaaaggcctttattggctgctacatgttattgcaagagactttgatgccttaaatgaacgcatccaaaaagagacaacagagcagcgtgctcttgaggaacaagagaaacaagaaagagctgaacgagtgcgaaaattacgagaagaaagaaaacaaaatgaacaggagcaggctgaactcgatggaaccagtggtctggctgagttggacccagaaccaacgaatcctttccagccaatagcatctgtaatcattgagaatgaaggaaaacttgaaagagagaaaaaaaaccaaaaaatggagaaagacagtgatggctgccacctgaaacataaaatggagcatgagcaaatagagacacaaggccaggttaatcacaatggccaaaaaaataatgaatttggactagtagaaaattataaggaggcattaacacagcagttaaagaatgaagatgagacagaccggccatcattggaatcagctaatggtaaaaagaaaactaagaaactaagaatgaaaaggaaccaccgggtagaaccacttaatatagatgactgtgctcctgagagtccaacgccacccccaccccctcctcctgttggctggggaacccctaaagtcactagacttccaaaacttgagcctcttggtgaaacacatcataatgatttctataggaagccactgcctcccctggctgtgccacagcgacctaacagtgatgctcatgatgtgatctcataaacaagacgtatggaggagttctcttaatatcagcaaggtgaactgggacattcttctttctcagaagaagaaacatcttgtaaattgatgactggggcaagataaccataataattttagtgagaagattaatactcaaggacctgacttgataattacttatttgtgtttttcatggttaaaaaaataaaagaagcacaatgaccagtacatgaaatcagcatttggaccaaattagcaagatttactgttgactctggtttatacatccccactcatgagcatacttctgaaggaaaactttacaaaaagagccaatggactcagcactttctttactatttgttcaatagcctatatttctagatattaaatattttttgtaagatatatgcacatagaagggggacttctaggaatttataaccaaaattttaaaactatttttatatttttttaaatctttaaaaattttaattactgtgatattgattatacaccttttttatagatgatttgtttaaattatatctggaaaatagagttgatttactttcagacatgaactatacaaacaggatatatttatatggcttgaggtatgttttgtaatagcgttgttctttaagtgtacatcgtaatttgacctaatttaaaaataatatattttcgaagtagtagattctcagatctttattctaacaattacatgatttgaaaacagtactcaatgagactggaaataccttttgtacctaaatgttttttaaattaatcaaaatacattctgtgagatactattaaaagtctcagtaaagtcctattttaaaggttagacactttcagagatcaaggtgctccctatactcccttgttccatcagaagctgcagtgactcttttaggtgattctaattctttcatgccttgaaattaaactatgaaattaaaggcagaaaaactggaaaacctactgcaggtccagagacttctgttttacaactgggaaacagcttgtgtactaaagtaatgagaataaaaatgttggcccaaaattacttttataaataaataattccaaaataatttcttaatttaaaatgatagcacttctcttgcacttaagaatggcatccataagattctgtatttggcatttagactaacttctagatgtatatttttaataatagattcataatgttacatttaattgaaaacaaacctttatatccaatgaaaatagtataaacagaatgatttttataccaccttgttaagattggtgcttttggtaacttgtactgacacaacagacatgtgctagtatctgataacattaagtacattttatgtcgtttaatataattatttactttaaaaattgtacttcagaacatcagattttattcacattttttaactcactgaactttaataatcaggtcacctgtactctagtcagcactgtatatattcttggagtttgtacatgggacttagcaaccacactgagtgaggtaaaagcatttgatttcagatctaaaattcgtaacaacctaaatttgagaggtggctgaaatgtgatgaaaagcaatacgaaaagacaatgtaaactttgaaaaggattttagagggaaaattgcatagctttttgtaacatttacttaattttaaaactaaactcatacttttgctatctttttaatatttatctcgtttgggagtatacgtgtttttaaaatttgtgttttctatctgtttactatagtgtagctactggcttcatttaataaaaataaatgattttgaaattaaatataatatagaattcacattttatatagctctctcaaaaattaatttttattccttaagcattttaaaaacattttaaaaaatgttttgtaaatccaggtgtattttaacaattaaatgcctattttgttatatgttatacttttattcttaattctgaattttgacattttcacacaataaaaataatttatatcaaaaaaaaaaaaaaaaaaaa

SEQ ID NO: 31214 - DNA, 3718 bp, Homo Sapiens
gcgcgcctgggtctcggcggggctgcgggaccgcgagtgagtgtggtcgctcctggttctgccagctcccctgagagcctgaacccgggcttgagagcctcgccaccccgggtgacatccctgccgtgggcttgggggctctgggtgtgattccgccggtccgggtcccgcagcgaccacctacccagcgcagtcaggggcggggctgggacccagagcgggaccccggctgccgagtccaggtgtcccgcgggcctcgatttggggagcagaaaacgccaggtcttcaagggtgtctgccaccaccatgcctgacccatttggcagcagcctcgtgtgtggtggtctggtgtggacggtggaagcgtgattctgctgagtgtcagtgtgaccactcgtgctcagccgtatctcagcaggaggacaggtgccggagcagctcgtgcagctaagcagccaactgcagaaacgtcaggcctgttgcagtctccaaggcaccatgaatgccatcgtggctctctgccacttctgcgagctccacggcccccgcactctcttctgcacggaggtgctgcacgccccacttcctcaaggggatgggaatgaggacagtcctggccagggtgagcaggcggaagaagaggaaggtggcattcagatgaacagtcggatgcgtgcgcacagccccgcagagggggccagcgtcgagtccagcagcccggggcccaaaaagtcggacatgtgcgagggctgccggtcacttgctgcagggcacccgggatatatcagccatgataaagagacctccattaaatacgtcagccaccagcaccccagccacccccagctcttcagcattgtccgccaggcctgtgtccggagcctgagctgtgaggtctgccctggccgtgaaggccccatcttcttcggagatgagcagcacggctttgtgttcagccacaccttcttcatcaaggacagcctggccaggggcttccagcgctggtacagcatcatcaccatcatgatggaccggatctacctcatcaactcctggcccttcctgctggggaaggtccggggaatcatcgatgagctccagggcaaggcgctcaaggtgtttgaggcagagcagtttggatgcccacagcgtgctcagaggatgaacacagccttcacgccattcctacaccagaggaacggcaacgccgcccgctcgctgacatcgctgacaagtgatgacaacctgtgggcgtgcctgcacacctcctttgcctggctcctgaaggcgtgtggcagccggctgaccgagaagctcctggaaggtgctccgaccgaggataccttggtccagatggagaagctcgctgatttagaagaggaatcagaaagctgggacaactctgaggctgaagaggaggagaaagcccctgtgttgccagagagtacagaagggcgggagctgacccagggcccggcagagtcctcctctctctcaggctgtgggagctggcagccccggaagctgccagtcttcaagtccctccggcacatgaggcaggtcctgggtgccccttctttccgcatgctggcctggcacgttctcatggggaaccaggtgatctggaaaagcagagacgtggacctcgtccagtcagcttttgaagtacttcggaccatgcttcccgtgggctgcgtccgcatcatcccatacagcagccagtacgaggaggcctatcggtgcaacttcctggggctcagcccgcacgtgcagatccccccccacgtgctctcctcagagtttgctgtcatcgtggaggtccacgcagccgcacgttccaccctccaccctgtggggtgtgaggatgaccagtctctcagcaagtacgagtttgtggtgaccagtgggagccctgtagctgcagaccgagtgggccccaccatcctgaataagattgaagcggctctgaccaaccagaacctgtctgtggatgtggtggaccagtgcctcgtctgcctcaaggaggagtggatgaacaaagtgaaggtgctttttaagttcaccaaggtggacagtcgacccaaagaggacacacagaagctgctgagcatcctgggtgcgtccgaggaggacaatgtcaagctgctgaagttctggatgactggcctgagcaagacctacaagtcacacctcatgtccacggtccgcagccccacagcctcggagtctcggaactgacccgtcacacacacctgcctaaagacagggatggctgtccacaggatcctccagccccgtgagagggactgtcccttgagtttctcaactgctggaaggagctgtgtcccagcaaggaagggaaaccatcagggctgggctcggccctgtcaggtttggggcctgtgtgcttcccagactctccctccagccgttggaatcgctgaagatggcaatgaaaggcggagggatgatgggctctctctgtgttcaaactccttggagagacgactaggaggacagcttgcctcccaggccccttgtggacttagactcaaaacccgcaggagaaacaggtccgactcagtatgcagtcgcaataacatgtctgctcccgaggttaacattcaagcgtttctactttgaaattcagcaagagtttctgggccttatgtttgagggtaccttttgctgcagttgtgaatattcagtacattgccagctcttggtcactgagtgattgagttagggctccgcaagagactttggggagtgaagtggatctcttcctcatcttttggtcctctgaaatgtgtgttctgaagccatggggctcgtcttctggggtgttcccctgcaggtgctggtgaaggtaacctggggcttaatgatggagtccctgatcatttttgcacaagacaggttgctgaggggtcggcaagcatctgacttgcccaatcccctggatatggtgagccccgccatgcttttattctgtatcgcttttgtctttattgctgctttcaacatttacgtttggttacagttaactattttcggagtgtggtgattgaagacaatttcatcatcccactgtacttttttttttgagagggagtttcactcttgttgcccaggctggagtgcaatggcacgatcttggctcactgcaacctctgcctcctgggttcaagcaattctcctgcctcagcctccagagtagctggaactacaggtgcccgccactatgcccagctaatttttgtattttttagtagagacggggtttcaccgtgttggccgggctggtctcaaactcctgacctccggtgatccacccacctcagcctcccaaagtgctgggattacaagcgtgagccactgtgcctggcccttttttttttttttttttttttttttaaagagatggcatcttgctatgtcgtccaggctggtcttgaactcctgagttcaagcagtcctcctgcttcaacatacagctacaggtaccccccactatacatttttaataaggattcatggctcagagggattttctgatggttttgctgatttgtttctagtttttttgtgtttatatttaacatgaagaccaagtttatataactaggtatctgtataatgcaacaacattggaacacaataaagatgtatttttgtaaaaaaaaaaaaaaaaaaaaaaaaaaaaaaaaaaaaaaa

SEQ ID NO: 31215 - DNA, 1812 bp, Homo Sapiens
aatcctcacattttgggagggaggccaaggcgggcagatcacctgaggttaggagttcaagatcagcctggccaacatggtgaaaccctgtctctattaaaaataccaaaattagctgggcatggtggcacgcgcctgtaataccagctactcaggaggctgaggcaggagagtcacttgaacccgggaggcggaggctgcagtgagtcgagatcgtgccactgcactccagcctgggcgacaagagcgagactctgtctcaaaaaaaaaagagtggttaacaagcatgatgatacaaccagttgaaagcaatatttgagttcataaagaagttgatgagttgataaaccaacaacacctaattggggaaagcataaggaagagagctgtgttgcaatcaaaaggttttttttttttacttgaatgtaaataccaatcaagatacattgaaataaggacctgaaggtggcaagacagtagaaagcaggagtaagagtggaaatgaaagcagaaggtcctacagtgtaggggaagcaatggaagaacttctacctgatggacaaatatgggctaatatggatccagaagaacgaatgttggcagctgctacagcttttacccacatctgtgcagggcagggtgaaggagatgtcaggagagaagcccaatctatccaatatgatccctacagtaaagcttcagtagccccagggaagcgacctgctcttcctgtgcaactacagtacccacatgtagaaagtaatgtcccttcagaaacagtctctgaggcctcccaaagactccgaaagccagtgatgaagagaaaggtgctgcgcagaaagccagatggggaagtattagtaacagatgagtcgattatcagtgaatcagaatctggtacagaaaatgatcaggatctctgggacttaagacaaaggctgatgaatgtacagttccaggaagacaaggaatcttcatttgatgtttcacaaaaatttaacctaccacatgaataccaaggaatttctcaagatcagctcatttgctctctacaaagagaaggaatgggctctccagcttacgaacaagacctgattgttgccagcagacccaagtcctttattctcccaaagctggaccagttaagccgaaaccggggcaagacagaccgggtagcccggtattttgagtacaaacgggactgggactcaatacgtttacctggtgaagatcatagaaaggaattacgctggggtgtccgagagcagatgctttgtcgagcagaaccccaatccaaacctcagcatatatatgtcccaaacaattatctagtaccaacagagaagaaaaggtctgcactccgttggggtgttcgttgtgaccttgcaaatggtgtcatacccaggaagcttcccttccctctttctccttcttaaatctttttaaacttctttcacaggattgtttgagataacctagctctttatatcttcccttttaaatagaaacaactgtcttgagaagctcttcgaaacattttatggtaaggacttcacctatcattggtctttcctagctatatatcacattggtatcagatgatacttccaaattgccactcaaatccagcaattgcaagataaatcatatcagagaaagaacaacagacctggtctttctattttgtcaaattagtacgggccctttgtgtcctgtaactttttttacctatcaatatgagttgctgtgcttcagtgtgtgttttttaagttgctgggcattacacttaccaattaaagaattttggaaatt

SEQ ID NO: 31216 - DNA, 3545 bp, Homo Sapiens
gggagattcgattggaaggctgccggcgtgctactgagttcggccggtccgagtcactgtgcgtcgcctgggcgcgttcctggtcttctcccccagggtcttgctctgtcacccaggctggagtgccatggcatcatcatagctcactatggccttgatcctcctgccttagcctcccaagcagctggtattacagaccacggtgtgaacacatgaacagaagacgaaaatttcttctagcctcagtacttgctctccagaattcaagttttatatatccatcatgtcagaagtgcttctctaggataatcctggtctccaaaaggtctaattgtccaaaatgtggctctactggtgaatctggaaatgccaattacagatacaaactttccttaaaagttgcagaatcaaacaaattgtttgttattactgtatttggaagttgcttagatacattttttggtcttactgccactggtttgcacaggtacattcaggatcctaataaaattccagaaacactggacaatgatacaactcagaatctattaactaaagcagttgaaacttgctttgttggacaaagctttatttttggagtgacgaattttgaaaaccaacctggacaaggttcagatgccagtaacttcttacagcaatgctctgaccacaaaagaaaagccaaagcactagtggcttgccagattgttctaccagacccaggtattgcaggctttactgtcattgactacttccatcaacttttgcagacttttaatttcaggaaacttcagtgtgactctcaggcacctaacaatcacttacttgctttagatcactcaaatagtgatctcagcagcacatatacttctgacagcacttctgattttttcaagtcctgcagcaaggatactttttcaaaattctggcagccatcacttgaattcacttgcattgtttcacaactaacagataatgatgatttttcagcttcagaacaaagtaaggcctttggtactcttcagcagaacagaaagtccatctccattgcagaggccactggttccagtagctgccatgatcccattcaggattcatggagccttgtttcatatatggataaaaagagtacagcagaaaagttgggtaaagaacttggcttacaagctaaggagctgagtgcagttcacagcagtcatcatgaaattggagttaatgactctaatttattctctttggaaatgcgagagccccttgagtcaagtaatacaaaatccttccacagtgcagtggaaattaaaaataggtcccagcatgagctaccatgttttcagcatcatggtatagataccccaactagccttcagaagagatctgcatgttgtccaccttcgttactcagacttgaagagacagccagcagttcccaggatggtgaccctcaaatttgggatgatctgccattctctgaaagcctgaacaagtttctggcagttcttgaaagtgagattgctgtaacccaggcagatgtcagtagtaggaaacatcatgtagataatgacattgataaatttcatgcagaccacagcagtttatctgtgactccccagagaactactggagccctgcatacaccacctatagctttaagatcatcacaagtaatagtcaaagcaaactgtagcaaagatgacttccttttcaactgtaaaggaaatctaagtcctagtgttgaaaaggagtcacaaccagataacaaagtagaggctgtctctgtaaatcataatggaagagatatgtcagaatattttttaccgaatccttacctgtcagctctgtcttcatcttcaaaagatttagaaacaatagttactcttaagaagactatcagaatctcaccacacagggagagtgaccattctagtctaaataacaaatatttgaatggatgtggagaaatatcagtttcagaaatgaatgaaaagttgacaactctgtgttataggaagtataatgatgtctctgatctttgcaaattagaaaataaacaatattgtaggtggtccaagaaccaagatgacagttttacaatttgcaggaaacttacatatcctttagaaactctttgcaatagtccaaatagaagtacaaatacattgaaagaaatgccttggggacatatcaataacaacgtaacacagagctattctattggttatgaaggtagctatgatgcctctgctgatctctttgatgatattgctaaagaaatggacattgcaactgagattaccaaaaaatcacaggatattttgttaaaatggggaacatctttggcagaaagtcacccttcagagtctgatttttcactgagatcactttctgaagacttcatccagccttcacaaaaattatccttgcaaagcctatctgactctaggcattcaagaacatgctctccaacacctcattttcaatcagattcagaatataattttgaaaatagtcaagactttgttccatgttcacagtcaactccaatttcagggttccaccaaacaagaattcatgggataaacagagctttcaaaaaacctgtattttattcagatcttgatggtaactatgaaaaaataaggattttccctgaaaatgacaaacagcaagccagcccaagctgtccaaaaaatataaaaacacctagccagaaaatcagaagccctattgtatctggtatttcacaaccagacgttttcaatcactacccttttgctgagtgccatgaaactgatagtgatgaatgggtccctcctaccacacaaaaaatatttccttcagatatgcttggattccaaggcataggtctagggaaatgccttgctgcctatcatttccctgatcaacaagagttaccaagaaagaaactgaaacatattagacaaggaaccaataaaggtttaattaagaagaaattaaagaatatgcttgcagcagttgttacgaaaaagaaaactcataaatataactgtaaaagttcaggctggatttccaaatgtccagacattcaagtcttagcagcacctcagctgcaccctattcttggacctgattcttgttcagaagtcaaatgttgccttccattttcagaaaaaggcccaccttcagtgtgtgaaactcgaagtgcttggtcacctgaattgttttcataaaaagtcacctgaacccaattcctgaacttttaaatctgtttggaaatgtttgccttcaggggtacggaaagcattctttacattttgaacacttggagagaagcaaattgaaaacaggactctgctgggagctactgtgccttttaaaatataaagccattgttttccccagggttttatctagaatactatgattaggtagttgagcactttatcttatactgtttattgtactttaataatattgttaagattgtttttgaaagtattaatgtttgttaaaatcacatatacatccagaaataaagactttgcaaaccaaaaaaaaaaaaaaaa

SEQ ID NO: 31217 - DNA, 3949 bp, Homo Sapiens; identical to SEQ ID NO: 25686

SEQ ID NO: 31218 - DNA, 2759 bp, Homo Sapiens
ggcaggggcgcggcgccggctggggccccgtcttgggtgtccacgccgtcgcctgaccgttcgagggtttgatcgccagcgcagcctcgccctgcccagacagctgggccctaaggggatagccagcgcctttagacttatcttaaatcgggcatcggcatcaacacttatttctggggtcctccatggaaagcagctcccgaaacaacacccgcccggtccgccctccgctgcactggaaaaccgcccctggacgtttctgccgcagtgtccccctcacggagttccgtttgtctgcttggtcggttgttctctggagccccaggacccaggccgcttgtatgtgcctgcggccgcacggccccaacacgcggacttcgagcggtaccgggagacccgcgcggcctcctcggagtggacagtgaagcagcagctgggctaggcagtggggctgggcctgcccatggggacccgtccacgtctccaggacatcagcctgagcctcttcgcagcctcgttttctgttgaccgagttctgcaaggggacgtagaggaaccacagcgttcttgcgcttgagaccgctgtgattttctgacattttggaggcagaaatgcctggggaaaggcccacagatgcaactgtcatccctagtgccaaaagggaacggaaagcgattacccttgacctcaaattggaagtgttacgacgatttgaagcgggtgagaagctcagtcagatcgcaaaggccttagatcttgctatctctacagtggcgaccattcgagatagtaaagaaaaaatcaaagcgagttcacaaatagctactcctctgagagcctctcggttgactcgccatcgaagtgcagtgatggagagcatggagcagctgctgagcttgtggctggaagaccagagccagccaaatgcgaccttgagcgccgccatcgttcaggagaaggctgagtttgatgacttacagcgtgaacatggcgaaggttctcaaacggagaggtttcatgcaagtcaagggtggcttgtgagattcaaggagtgccactgtttgccccacttcaagatgaacagcgcagctcccagcaacaaggacatgtacacagaaatgctgaaaagcatcatcgaagaaggtgagtacaccccccaggtgtctttaacgtagatgagacgagacttgattggaagagaatgcccaaaggaacgtttatttccgaggaagagaatgctgagccagggtttaagtcatccaaagatcgcttgatgctgctgcttggtggcagtgcagctggggactttaagttgaagcccttactggtgtaccgctcagaaacccgcaaggctctgaagggttcttgaagcccagtttgcccgtgatttggcgctccaacagaaaggcttgggtgaccaggagcatctttcatgaatggttcacttactttttttgccgttgaaaaatacagtgcccaaaataatctcaccaacaaagcactgctcatactagacagtgcgtcatgccactctgtaaatttgagcgacctttctgataactaagagtagaataccttcaggccaggcgcggtggctcacgcctgtaatcccagcactttgggaggccgagacgggcggatcacctgaggtcaggagttcgagaccagcctcaacatggagaaaccccgtctctactaaaaatacaaatttagccgggcgtggtggtgcaggcctgtaatcccagctactcgggaggctaaagcaggagaattgcttgaacctgggaggcggaggttgtggtgagccgagatcgcgccattgcactccatcctggacaacaggagtgaaactccgtctcaaaaaaaaaaaagaaaaaaaagaagtacaagagtataataccttcatgacagtacagctgactcaatccggaccacgtgtcaaggtgtaatctcgaccttgaaagctcattatctgagaaggacttttcagcacatcctagaagcagcggatggtgaggacacagctatgatcagggaattttggagaaactacagcatcatggatgctgtggacatggccatcgcatgggaggagctcaaaccagcactaatgaacagcatgtggaagaagatttggcctgagtgtgttcaggcccagcgtttttcccaggcagataacattgcacagcttcaaaaaaacattgtgacccttgccagaaatgtggcctttgaagaggttgctgaggctgctgtggaccagttgctgcagtcccatgaagaagatctctcaaatgaggaactgatgcggctggaacaggagctggcagtgggggaggaggagagggaagatggtccctgggcactgtggcagctaaccacaggaagactgtcggcagccctctcacattttgaggctggcttgtaggtccttgctagtaacagccctaatgatgactggaaactgagaggttccagagaaatcagtgttgcagtaaactgctagcaggagctgtacaatgagaaaaagcgccactcaaaacaactctcttaggtcatttttcaatgtgtgtaaccaaaagttaatcagaataaagcggaagcaccatgatgacctcaacagtggaggcccagccaggcctccctgctctgtggtgttggacatccctggaaaccttgctgttggtatttccattttgatacttgagagcatcaaattttgtcattaaaatgttatttaaataaaaaaaaaaaaaaaaaa

SEQ ID NO: 31219 - DNA, 1090 bp, Homo Sapiens
ctcagctcactgcaacctccgtctctactaaaaatacaaatttagccgggcgtggtggtgcaggcctgtaatcccagctactcgggaggctaaagcaggagaattgcttgaacctgggaggcggaggttgtggtgagccgagatcgcgccattgcactccatcctggacaacaggagtgaaactccgtctcaaaaaaaaaaaagaaaaaaaagaagtacaagagtataataccttcatgacagtacagctgactcaatccggaccacgtgtcaaggtgtaatctcgaccttgaaagctcattatctgagaaggacttttcagcacatcctagaagcagcggatggtgaggacacagctatgatcagggaattttggagaaactacagcatcatggatgctgtggacatggccatcgcatgggaggagctcaaaccagcactaatgaacagcatgtggaagaagatttggcctgagtgtgttcaggcccagcgtttttcccaggcagataacattgcacagcttcaaaaaaacattgtgacccttgccagaaatgtggcctttgaagaggttgctgaggctgctgtggaccagttgctgcagtcccatgaagaagatctctcaaatgaggaactgatgcggctggaacaggagctggcagtgggggaggaggagagggaagatggtccctgggcactgtggcagctaaccacaggaagactgtcggcagccctctcacattttgaggctggcttgtaggtccttgctagtaacagccctaatgatgactggaaactgagaggttccagagaaatcagtgttgcagtaaactgctagcaggagctgtacaatgagaaaaagcgccactcaaaacaactctcttaggtcatttttcaatgtgtgtaaccaaaagttaatcagaataaagcggaagcaccatgatgacctcaacagtggaggcccagccaggcctccctgctctgtggtgttggacatccctggaaaccttgctgttggtatttccattttgatacttgagagcatcaaattttgtcattaaaatgttatttaaataaaaaaaaaaaaaaaaaa

SEQ ID NO: 31220 - DNA, 2661 bp, Homo Sapiens
gtagcggtgctgggtcgggccgacgtgccacccacccggagccggtgagtgcagccgcccgccctccggtagatctgcggcctggcggagaagtcgggaggggacaggaagggagggcgggccccgggccctcctccgtctcagccgcctgcggaggtgctgcccacgcctggaggcccccactgaccctcagacccgcgtctgcgcccctctccccgcaccccgaggcagagttgggaaagcagtggtcttagaccccccacctcgggcactcggaagagaacggcggagacaacccctcctcttccctggctggcgcagcgccagcctcgagctcctcggtagcccccgggcagggagggcccgagggtgggcgcggcatcttcagcgactcttcgaagtcccttccgcgtctcatctttcaaggctgttgcagaggcggcttgcttcccacctgtccatctccataaaaatccctaaacgaaacatgcccacgtgtccggagattttcaggacttggtgcatttcagatgaaggcttttccagaagcttccccgtagaagaggatcaggcatccaactggttaagggatgccagaagggccgttggtgaggaaatttcaccatttggtctccccctttgtgggtcagcaggtggtcaagacagggggcagcagtaagaagctacagcccgccagcctgcagtctctgtggctccaggacacccaggtccatggaaagaaattattccttagatttgatctagatgaagaaatggggccccctggcagcagcccaacaccagagcctccacaaaaagaagtgcagaaggaaggggctgcggacccaaagcaggtcggggagcccagcgggcagaagacccttgatggatcctcacggtctgcagagctcgtcccccagggcgaggatgattctgagtatttggagagagacgcccctgcaggagatgctgggaggtggctgcgtgtcagctttggtttgtttggcagcgtttgggtgaacgatttctccagagccaagaaagccaacaagaggggggactggagggacccttccccgaggttggtcctgcactttggtggtggtggcttcctggcattttataattgtcagttgtcttggagctcttccccggtggtcacacccacctgtgacatcctgtctgagaagttccatcgaggacaagccttagaagctctaggccaggctcagcctgtctgctatacactgctggaccagagatacttctcagggctagggaacatcattaagaatgaagccttgtacagagctgggatccatcccctttctctcggttcagtcctgagtgcctcgcgtcgggaggtcctggtggatcacgtggtggagttcagtacagcctggctgcagggcaagttccaaggcagaccgcagcacacacaggtctaccagaaagaacagtgccctgctggccaccaggtcatgaaggaggcgtttgggcccgaagatgggttacagaggctcacctggtggtgcccgcagtgccagccccagttgtcagaggagccagagcagtgccagttctcctaaggagctggtggtgctcctcatggaaccttgccgttggggaacctgacgtctaagtgtccagaaaggaggatgtgggcagggacggggtacagaggatagtgtgggtcagaggtgccagtagtataatattcatctccctggagttatgttgaaggcagagttttcatagggttagattttttttatccttttctagttcagttaattcatcctgttgaattgcaccatcgtgaaagatgggaaaaatcgtgatgatgggtaaggggaaaacttcccggaaggcaatggggcaaggaaaaagaaagcctatgggaaatggctgtgctcccaacatagctttgcagatgatgtgggtttttttttttttttttggttgtttgttttgagagagagtcttgctctgtctccctggctagggtgtggtggtgtgatcttggctcacggcagccttgccctccctggctcaagcagtcttcatctcagcctccagagtagctgggactacaggcatgtgatatgatgctcggctgatttttgtttactttttagagagatggggtcttgccatatttgccaggctggtttgaactcctacaactcaagcattcctcccaccttggtctcccaaaatgttgggaccacgggtgtgagccaccgcgcccagctagctcctgtgttttgtttttgttttgtaactttggttgatgttaaggccctccattttggaaagcaggaaaacaggatttttttttttttatcttgttccctggaggatccagggatgaggatagagtggcctgagagcagtgcttggattcagcctcctgctgggtccttctgctggatacaggcaccaagaggcgggggtggagcagggagctgcgccttcctggggtgcccggtggtgtgtagagaaaagctgcttgtttactccttaagtcaatgtattggtgactgttgatttgttgaacaattcaggaatcaagggctgtggagaaactccctcatgttgttggcaacaggtgaatgaacctagagcggtgacatgaaaataaagctcactgttactcgc

SEQ ID NO: 31221 - DNA, 1825 bp, Homo Sapiens; identical to SEQ ID NO: 26440

SEQ ID NO: 31222 - DNA, 2544 bp, Homo Sapiens
ctcactcagacccatgaggccctgcctggtctcgtctgggacctgggacagcagctgggagacctgagcctggagtctgggggcctggaacaggagagcgggcgtagctcgggcttctatgaagatcccagctctacaggaggtccagattcaccaccctcaaccttctgtggggacagtggcttctctggatccagctcctatggtcgcctgggtccctctgagccccggggcatctatgccagtgagaggcccaagtccctaggagacgccagtcccagcgctccggaggtggtgggcgcgcgggcagcggtgccgcggtccttctcagcgccctacccgacggcaggtgggtcgccggcccggaggcctgctcctcggcggagcggcgggcccgcgccgggccctttctgacgcccagccccctgcacgccgtggcgatgcgcagcccgcggccctgcggccgccctcccaccgactcgcccgacgcggggggcgcagggcggcccctggacggctacatctcggcgctcctgcgcaggcgccgccgccggggggcgggccagccccggaccagtcctgggggcgcggacggcggcccgcggcgccagaacagcgtgcgccagcggccgcccgacgcgtctccgtcccccggcagcgcgcgacccgcgcgggagccctcgttggagcgcgtcgggggccaccccaccagccctgccgccttgagccgcgcctgggcgtcgtcgtgggagtcggaggcggcacccgagcccgctgcgccgcccgccgccccctcaccccccgacagcccggctgagggccgcttggtgaaggcgcagtacatcccgggcgcgcaggcggccacccgaggcctccctggccgcgccgcccgccgcaaaccgccgccactgacccgcggccgcagcgtggagcagtcaccaccccgggagcgtccccgggccgccggccgccgtggacgcatggccgaggcttcgggccgccgcggctcgcccagggcccgcaaggcctcgcgctcccagtctgagaccagcctgctgggccgcgcctccgcggtcccttcggggccccctaagtaccccacggcggagcgggaagagcctcggcctccacggccacgccgcggcccagcgcccacgctggcggcccaggccgcagggtcctgccgtcgctggcgctccactgcggagatcgacgctgccgatgggcgccgcgtgcggccccgagcccctgcggcgcgtgttcccggccccggcccgtccccgtcagctccccagcgtcgtctgctttacggctgcgcgggcagcgactccgagtgctcggctgggcgcctggggcccctgggacgccgggggcctgcgggaggcgtcggcgggggttacggggagagcgaatcgagcgccagcgagggagaatcgcctgccttcagctctgcctccagcgactcagacggcagcggtggcctcgtgtggccgcagcagctggtggcggccaccgcggcctctgggggtggagcaggtgcaggggcgcccgcaggccccgccaaagtcttcgtgaaaatcaaagcttcccacgcgctcaagaaaaagatactgcgtttccgttcgggttctctcaaggtcatgactacagtgtgagtttggggatttgcttgggctcccccttcatggcctctgcacctccacactcccaaccactgacccttccacatctaccttccaaagaccatcgttttctctgcttccaaagacccccctcactctccccactcctaacagtcttggttgaaaaggctcccccaccaccaccgagaggaatggggaggagccctgtttgacccagttcagcttctagcttggaagcccttgggcaagacagttccccttctctgggcgtcactttcctcatctgtacagtaagtgtccatgtatgcaaaaggggtaattcggtttgaatttccccgttttagtttagaagcctagtctgtttgttccccttcaccgctctccctctcattcctgatgagccctctcattcctcctttccttgcccagctatggccccctctcattcacaaagtgccccctccatgtccctggacccttaagatatccccttggcaccctggtcagagactctgtgtctgactcaggtggtccctgcagagtgccctgggaagggaaggagcactgatttgggggttttgagggtcaagtaggggttggtaacacctggaaagaaggactctttcacttcgatccctggacaattatggaggattcggaggtagaagaggggaaggaagatggtttctatctcatgacccccactccctgtgagagggaatgggggaagcctgatgaccctcagctgttccaatctagtattttttttcttttttaaaattactgtatttattatgacgatggtgactccccagtgcaaaggggggccagattctgtgtgtttctctaacctctttgtaaataaatgcacagtgtaacataaaaaaaaaaaaaaaaaaaa

SEQ ID NO: 31223 - DNA, 3922 bp, Homo Sapiens
aaagagcccgctccgccgagcgccgggcgacggcaggaagcccctccgcttggccagaatggagcagccgaagggagttgattggacagtcatcatcctgacctgccagtacatgacagtgtccaggtctttcagagagaactggaagtgcggcagaagcgggagcagatccctgctgggacgctgttactggccgtggaggacccagagaagcgtgtgggcagcggaggagccaccctcaacgccctgctggtggctgctgaacacctgagtgcccgggcaggcttcactgtggtcacatccgatgtcctgcactcggcctggatcctcattctgcacatgggtcgagacttcccctttgatgactgtggcagggctttcacctgcctccccgtggagaaccccgaggcccccgtggaagccttggtctgcaacctggactgcctgctggacatcatgacctatcggctgggcccgggctccccgccaggcgtgtgggtctgcagcaccgacatgctgctgtctgttcctgcaaatcctggtatcagctgggacagcttccggggagccagagtgatcgccctcccagggagcccggcctacgctcagaatcatggcgtctacctaactgacccccagggccttgttttggacatttactaccagggcactgaggcagagattcagcggtgtgtcaggcctgatgggcgggtgccactggtctctggggttgtcttcttctctgtggagactgccgagcgcctcctagccacccacgtgagcccgcccctggatgcctgcacctacctaggcttggactccggagcccggcctgtccagctgtctctgttttttgacattctccactgcatggctgagaacgtgaccagggaggacttcctggtggggaggcccccagagttggggcaaggcgatgcagatgtagcgggttatctgcagagcgcccgggcccagctgtggagggagcttcgcgatcagccccttaccatggcctatgtctccagcggcagctacagctacatgacctcctcagccagtgagttcctgctcagcctcacactccccggggctcctggggcccagattgtgcactcccaggtggaggagcagcagcttctggcggccgggagctctgtggtcagctgcctgctggagggccctgtccagctgggtcctgggagcgtcctgcagcactgccacctgcagggccccattcacataggcgctggctgcttggtgactggcctggatacagcccactccaaggccctgcatggccgggagctgcgtgaccttgtcctgcagggacaccacacgcggctacacggctccccgggccacgccttcaccctcgttggccgtctggacagctgggagagacagggggcaggcacatatctcaacgtgccctggagtgaattcttcaagaggacaggtgttcgagcctgggacctgtgggaccccgagacgctgcccgcagagtactgccttcccagcgcccgcctctttcctgtgctccacccctcgagggagctgggaccccaggacctgctgtggatgctggaccaccaggaggatgggggcgaggccctgcgagcctggcgggcctcctggcgcctgtcctgggagcagctgcagccgtgcctggatcgggctgccacgctggcctctcgccgggacctgttcttccgccaggccctgcataaggcgcggcacgtgctggaggcccggcaggacctcagcctgcgcccgctgatctgggctgctgtccgcgagggctgccccgggcccctgctggccacgctggaccaggttgcagctggggcaggagaccctggtgtggcggcacgggcactggcctgtgtggcggacgtcctgggctgcatggcagagggccgtgggggcttgcggagcgggccagctgccaaccctgagtggatgcggcccttctcatacctggagtgtggagacctggcagcgggcgtggaggcgcttgcccaggagagggacaagtggctaagcaggccagccttgctggtgcgagcggcccgccactatgagggggctggtcagatcctgatccgccaggctgtgatgtcagcccagcactttgtctccacagagcaggtggaactgccgggacctgggcagtgggtggtggctgagtgcccggcccgtgtggatttctctgggggctggagtgacacgccaccccttgcctatgagcttggcggggctgtgctgggcctggctgtgcgagtggacggccgccggcccatcggagccagggcacgccgcatcccggagcctgagctgtggctggcggtggggcctcggcaggatgagatgactgtgaagatagtgtgccggtgcctggctgacctgcgggactactgccagcctcatgccccaggggccctgctgaaggcggccttcatctgtgcagggatcgtgcatgtccactcggaactccagctgagtgagcagctgctccgcaccttcgggggcggctttgagctgcacacctggtctgagctgccccacggctctggcctgggcaccagcagcatcctggcaggcactgccctggctgccttgcagcgagccgcaggccgggtggtgggcacggaagccctgatccacgcagtgctgcacctggagcaggtgctcaccactggaggtggctggcaggaccaagtaggtggcctaatgcctggcatcaaggtggggcgctcccgggctcagctgccactgaaggtggaggtagaagaggtcacggtgcctgagggctttgtccagaagctcaatgaccacctgctcttggtgtacactggcaagacccgcctggctcggaacctgctgcaggatgtgctgaggagctggtatgcccgacttcctgctgtggtgcagaatgcccacagcctggtacggcaaactgaggagtgtgctgaaggcttccgccaaggaagcctgcctctgctgggccagtgcctgacctcgtactgggagcagaagaagctcatggctccaggctgtgagcccctgactgtgcggcgtatgatggatgtcctggccccccacgtgcatggccagagcctggctggggcaggcggtggaggctttctctatctgttgaccaaggagccacagcaaaaggaggccttggaggcggtgctggccaagaccgagggccttgggaattacagcatccacctggttgaagtggacactcagggcctgagcctgaagctgctggggaccgaggcctcaacctgttgccctttcccatgaagctggcttctctctgcaacaggagaaaacctggagctacagtgtcccccaccttccttgccccatgggaacctccacctcctactccccacccacctctgcgaatctgctcccaaaggaagctgaccagagcaagatctgggcaagcagagagtgcctgggacaggactgtgacctggtggacaggggcctagatgtagcctctgttcctcctggacataggaaggtcccaagcttagtatcccacgtggcctttacaaatcctatggctggccttctcattccacaagggccctggaaagggttgacagccagccttggcatatggctgggagtcccttagcaaggccaaccctgaagaggccctttgaggcattccctatggcttagagttgtagacttacactcaaccctcatgtgagcgtgggagtgagggtggcggtcccttgccaagttggtagcagtgacccagtgattcactgccatcccaggccttaactagcaaaactacggagcgtgccaagtgacctggtgcctgtgggaagtgggttctcaggactggcattcttggaataaattcactctgtccttgcaaaaaaaaaaaaaaaaa

SEQ ID NO: 31224 - DNA, 1643 bp, Homo Sapiens
atttcagccctgacaccaaggcaggaggctaggaggtctacaaatagcgactgggtagctggtgtgaacacagggggtactgggggggcttagcccccaaggaagaggaccagtttttccccagcaccaccatcaaggcctcgaggctcccagctccctctacagcctgtggactgacttagggaatcccgaacgatgacagaaaaggaggtgctggagtcccctaagccctccttcccagcagagactcggcaaagtgggctacagcggctaaagcagttactcaggaagggttctacagggacaaaggagatggaacttcccccagagccccaggccaatggggaggcagtgggagctgggggtgggcccatctactacatctatgaggaagaggaagaggaagaagaggaggaggaggagccacccccagaacctcctaagctggtcaacgataagccccacaaattcaaagatcacttcttcaagaagccaaagttctgtgatgtctgtgcccggatgattgttctcaacaacaagtttgggcttcgctgtaagaactgcaaaaccaacatccatgaacactgtcagtcctatgtggaaatgcagagatgcttcggcaagatcccacctggtttccatcgggcctatagttccccactctacagcaaccagcagtacgcttgtgtcaaagatctctctgctgccaatcgcaatgatcctgtgtttgaaaccctgcgcactggggtgatcatggcaaacaaggaacggaagaagggacaggcagataagaaaaatcctgtagcagccatgatggaggaggagccagagtcggccagaccagaggaaggcaaaccccaggatggaaaccctgaaggggataagaaggctgagaagaagacacctgatgacaagcacaagcagcctggcttccagcagtctcattactttgtggctctctatcggttcaaagccctggagaaggacgatctggatttcccgccaggagagaagatcacagtcattgatgactccaatgaagaatggtggcgggggaaaatcggggagaaggtcggatttttccctccaaacttcatcattcgggtccgggctggagaacgtgtgcaccgcgtgacgagatccttcgtggggaaccgcgagatagggcagatcactctcaagaaggaccagatcgtggtgcagaaaggagacgaagcgggcggctacgtcaaggtctacaccggccgcaaggtggggctgtttcccaccgactttctagaggaaatttaggcgtgcgggcgcctgcaagcgggagacacccacaccccattctgggcgggcccagtggagtttggggaggggggcgaaagcaacgggactgctgggagaggaggggtaggaaggcccgcctgagcgcgacggggcttccgggaagggactggttctcgcccccttccccagcctggggcctcggatacctgctgcccagagcagcccggacccgaaacctttcaggccccgcttgcaagagctggaaaaaaacgcgtatctactaggaggagccagggactggggcggggggcgggggcgagggagggcgaactgtcgaatgttgcgaatttattaaacttttgacaaaactt

SEQ ID NO: 31225 - DNA, 2583 bp, Homo Sapiens
gactagttctagccgtatctcagttctcgcgaggtttcgtcttcccggaagcgttggaggacattccctgttgactgcgtcgcgatgtgtggcgactgtgtggagaaggaatatcccaaccggggtaatacctgcctggagaatggatctttcttactgaactttacaggctgtgcagtgtgcagtaagcgggattttatgctgatcacaaacaaatccttgaaagaagaagatggagaagaaatagttacctatgatcatttgtgtaagaattgtcatcatgtaatagccagacatgagtatacattcagtatcatggatgaatttcaggagtataccatgctgtgtctgttatgcggcaaagccgaagatactatcagtattctccctgatgacccccgacaaatgactctcttattctaaggatccttctacagatctgttataactatattgtgttggtttacaatacagcaagcctgatggtttgtcttatttcattcatactgaaaattctttgcatattttttttctgcttagacttacttattctttgaggaaaaaaggtaatgtaggagctcattgttctctagagctgagctcttctgctaaagttcaaagttcacatcagtgtagccagagtgaagcatctttgttagcagttatgtggtcagaaaacaactagaatgggagcacacctggtgcccagattttggtttccaataaaaggaaccagggctccttagaaaatgaactgattctagagctgggatatgaactatacaagatgagcctagagtatcttgtgccacagaaaaatgaagtactgaaattaaaaaaaaaaaaatcatagtgattgggagtatgtcagcatgatcgaactgaaggatctctgaaaggccacagctggagcaatttgagtaacaaaataaagtagtattgggttataacccaaactatataataaatatttacaagcccaaactaatataaatgattgaatgggaacaaatctcttgtgcagaagaatttcaaataatttatgtagatactccccacttagtgggctctgcatagtgacttccttgcagagtataatatggaaaggggggaaaagagtaactttacagtggagaaatctgacagacaccagctcagccaggtgattgaggttaacatcatccatgataagcccttttgatagcatgtatccttgatagcatcacatcatacagaatgtgataagaatggcactttacctctgtggtcctcctccccagaactcagaacccaagtctgatcaggagaaaaacatcacacaaattccaattgagaagcattctttaaaatacctaaccagtacttctcaaaactatcaaggccataaaaaacaaggaaaatctgagacatggtcacagccaagaggagcctgagaagacatgactgctagatgtaatgtggtatcctacatggaattatataccacgaaaagaaaaaaaggtcatttggtagaaactagggaaatctgaatacagtgtggactttagttaatataaatgagaaaatggtttcattggctttaaagggattttagaatatcttactttgcatagtttcatgagcactggccaggaggttataaactggcatttaggcctctctgccatttagtagcagtatagtcattaagcaaagcattactctggactttattgtcctgtttctatcaaattggactaataaaaattgatataatacattcatcacagtattgttaggagatttaaatgaattagtgaatgtaagatactttagaaagcatgtaaagtactagaaacaatgaggtggcttcaattagtgctcattctgagacctaaatttaaagggtcaggcattagaaacaaaagtgtttcttcatatctaggagatttggaaattctgaactaaggtcttataagaacaagaaatgagcaaagtgttcattgtagatactagggaaaagctttgttgaataacagtaatgatgataatatctgagctttattaagtacttactacatgctaagagctttttaagcacttatttaatcctcattaacaaattcataaggtaggtgctattgatagtttagccataaccagatatggcttgttatttgtaagttatcatgaaaaggtttatattcactattctttatttcagtgtagcacttttagagccaaaaaaaactcaggcacaaagaagttaaataacttgccgggcggtggctcacccctgtaatcccagcactttgggaggccaaagcaggcggatcacctgaggtcaggagtttgagaccagccgggccaacatggtgcaacctcgtctttactaaaaatacaaaaacaaaaattagccaggggtggtggtatgcacctgcagtcccagcaacatgggaggctgaacaggagaatcgcttgaacccgcgacagggaggttgtgatgagccaaggtcatgccactgcactccagcctgggagacagagcaagactccatctcaaaaacaaaaacaaaacaaaacaacaacaaaaaaaaaaaaaaa

SEQ ID NO: 31226 - DNA, 4200 bp, Homo Sapiens
gagagctctgaggaggaggagggggaggagggggaggctgggggcaagcaggggccacggggaagccgaagcagccgggcagacccccctccccacagtcacatggccacacggtcccgggagaacgcccggcgccggggtacccctgaacctgaagaagctgggcggcggggtgggaagaggccaaagccaccccctggagtggcctctgcatcggcccgagggccgccagccactgatgggctgggggccaaggtgaagctggaggagaagcagcaccatccatgccagaagtgcccacgagttttcaacaaccgctggtacctggagaaacacatgaatgtgacccacagccgcatgcagatctgcgaccagtgcggcaagcgcttcctgctggagagcgagctgctgctgcacaggcagacagactgcgagcgcaacatccagtgtgtgacatgtggcaaagctttcaagaagctttggtccctccatgagcataacaagattgtgcacggctacgcagagaagaagttctcatgcgagatctgtgagaagaagttctacaccatggcccacgtgcgtaagcacatggttgcccacaccaaggacatgcccttcacctgcgagacctgcggaaagtccttcaagcgcagcatgtccctcaaggtgcactcactgcagcactcaggggagaagccgttcagatgtgagaactgcaatgagcgcttccagtacaagtaccagctgcggtcacacatgagcatccacattggccacaagcagttcatgtgccaatggtgcggcaaggacttcaacatgaagcagtacttcgatgagcacatgaagacccacacaggagagaagccgtacatctgcgagatctgtggcaagagcttcaccagccggcccaacatgaagcggcaccggcgcacgcacacgggcgagaagccgtacccgtgcgacgtgtgtggccagcgcttccgcttctccaacatgctcaaggcccacaaggagaagtgcttccgcgtcagccacaccctggccggcgacggcgtccccgctgccccaggcctgcccccaacccagccccaggcgcacgcactgcccctgctcccggggctgccccagaccctgccgcccccgccccacctgccgcccccgcctccgctcttccccaccactgccagccccggcgggaggatgaacgccaacaactagctgccgagctgcacccgtgcacccgctggggcctggagtcagggcccactccaggagggacccactgccttcccggggagcacagtagtgcgggcctgggccctgctccacctccagaagtggctggatgtaccctgcctgaggccccgacgaggaggggtatgcaggctggcaggccccagagctggtggagggcatctcactcccaagtgccccccctttctgtgactccttgaagcctttacttttttttttttttggaagtgaaggaaaaagaaactatttacagcactcccctccaggtgaggggggtgctgggggtctgcagcagaaagaaaggggcctgggcagcaggtgtggccagtccctctgccaaggcctgtgccagaggggttggccagttggagcctgggtcagcctcagcagcctatccccatgtcctctatgcccctaatttgcttcctcatcttggagggtttggggagaagttggcgtgccacccccacaacccctgaggaggtgtagacccagtctgagagccgcaagcactgaggcagggcctgagactggacctgggtgagcgtggggggtggagggtggcgaggtgcggagactgcagaccagtgcttcactgtgtggagtggggcaggcaggggctggaccccagggacttgccttccccacccactctgctgccagcaggcccagggatccctgacctgcaccaggtggcaccaagggtcctgagtcctggagatgtccccagaagctgctgtgcctcacagcgctgtgagccagaccctccttgggcagacaggctgactggcagcaccagctttgggggcagagtcctaggatgaggcttgggcagtgctggtagggtttcaaggtgctattagtggggcaggggcagggcggctgctcacagagcaccccagttcctcaccagctactctggccatatatcccacaccagaaggaacaagtgtggctgtgtccatctctgctcccccaaaggcccgctctaggccttatcctccctctaggtcctgccacaacctgtccctggctggctccagcgtcctcgtccctcctgggcctgtgcaccggtgggtggggcgcccatagcactgccggtaaaggagcctgcatgttcaggcccctcgggggattggggggactggggaggcgcagcctagacccaattgcttgcccccatgaggctagcactaataggaaacccttttttgttgtcatttaatgtctttattcctgcctttaatatggggaggaaggttccataagctacatgtttcctagttaagctctttcctattgtgtttatacagttttgtttgttatactctttgcaccttaaacccccaccactccccgacactattgccttcccagcatggctggagtgggaagaggcttgggccccgggggaatggttagggggactgaacccctctgaccttatgaggcccatggcactggggcagggagctggggacattttaatcatcaataaacgaagcactttattctgtacagatttgggcaggcccaaggtgcccgagtgatctgaggatttataatccaagccacaccaccctggttgttctctgggcttggagggtacagtgccagcagcttccttgcccaattgatgttggagctgtagacgtacgctcaggcgctcctgctgtcctgggggagagaaggttcgcccctccccgaggaagaaggcttctggtcaggacccccaccccaaggctggggactccaggctcctgctttactgtagctctttttcttccttgcactccttgatctttgggcttccgtgatgtcctcagggtccccccctccctgttgctatttttaatctctagtcccagtgcctggcagctctttggagctggctcacattttcccaaaaaaagttgatctctcccagtgggctgtaggcagggtcctccatgggtttccaacccccatcactggcaccaggatctcccacaggcactggtggtgtcatcacctgctggccccactacagcctgagtaggcctgagtggccgtggccaggctgagacctgtcaggccatactgacaagcagaggtcagagacactggtggggagctggcaatgaaaccctgtcctgggacatgggtttcatgttcttgtacacttcccctctgggatcaggtgaggggtccagacagctgaccagacagcttgacagctggtcaagacggtcacgggagctctaggtgggcacaaccaacccctctcctgggaggcccctgccccactggggataggagcctgtgtccctggtgctaagcactctcttcacttgggccattgttggtgggggctcctttccggccagaccacaaggccagaagcaataatggcacctcagcagttccagtatggataggggttcctgttttactagcttttacatctttttatttaaaacaaaacaacacaaaaaaacaatgtgcccccagatgtcagaatgaggcgactagggcaccatactcactttccagggctgggggaagggggacgcaggatcatcccctcccaaggagatctgtgggggtcccaccgtccatctggacttctcagcctgtttggctagaactcaggcctggagtctgggtctgccccctccccggctccttggggctctctggtctcaggccagctggcgatgggtggctagagtgatgaactcaagccctgtggccacagttctgggagccttcaaccctggctcatgctgccatagtctccacggtgcccttcacagagggcttggtagtggcagaatggccatgcccaggtgtgtgttgagaccattgacaactgctcgtgtacaggcaccccacagccccagagcatggggcacagcaggcatgcgagtgagaggatgaaggggaataaagtcagtacaactcgtg

SEQ ID NO: 31227 - DNA, 2555 bp, Homo Sapiens
ggggcagccatgtcgccattgtctgcggcgcgggcggccctgcgggtctacgcggtaggcgccgcggtgatcctggcgcagctgctgcggcgctgccgcgggggcttcctggagccagttttccccccacgacctgaccgtgtcgctatagtgacgggagggacagatggcattggctattctacagcgaagcatctggcgagacttggcatgcatgttatcatagctggaaataatgacagcaaagccaaacaagttgtaagcaaaataaaagaagaaaccttgaacgacaaagtggaatttttatactgtgacttggcttccatgacttccatccggcagtttgtgcagaagttcaagatgaagaagattcctctccatgtcctgatcaacaatgctggggtgatgatggtccctcagaggaaaaccagagatggattcgaagaacatttcggcctgaactacctagggcacttcctgctgaccaaccttctcttggatacgctgaaagagtctgggtcccctggccacagtgcgagggtggtcaccgtctcctctgccacccattacgtcgctgagctgaacatggatgaccttcagagcagtgcctgctactcaccccacgcagcctacgcccagagcaagctggcccttgtcctgttcacctaccacctccagcggctgctggcggctgagggaagccacgtgaccgccaacgtggtggaccccggggtggtcaacacggacctctacaagcacgtgttctgggccacccgtctggcgaagaagcttctcggctggttgcttttcaagacccccgatgaaggagcgtggacttccatctacgcagcagtcaccccagagctggaaggagttggtggccgttacctatacaacgagaaagagaccaagtccctccacgtcacctacaaccagaaactgcagcagcagctgtggtctaagagttgtgagatgactggggtccttgatgtgaccctgtgatatcctgtctcaggatagctgctgccccaagaaacacattgcacctgccaatagcttgtgggtctgtgaagactgcggtgtttgagtttctcacacccacctgcccacagggctctgtcctctagttttgagacagctgcctcaacctctgcagaacttcaagaagccaaataaacattttggaggataatcaccccaagtggtcttcaaccataaactttgtgattccaaagtgcccagttgtcacaggtgccataaataattacattttccaacataaatgtgccattttccttgccgcgttaatacaactgagtacaaaagttccaagagagatgctctcttttcaggggctgcaatgtcctctctgagacctagtggtggatgaggtctcctgtttgattttgttcctgcactcactcatttttccagagacccagctgtgattcacaggtgtcagacatgggaggtgtgagccttgcttgctacagcctgtaggatgagtttgacgtggccagcagcaccatctggtcaacctcattccagaatggcacagtcacaagtgaagcatgccactgtcaaatccgagaatgtaaaccgctgaacagctatggatcaaatggtagccctcaaaagatatgttcatgccctaaccctcagaacctataaatattactttatttggaaaagaatctttgcagatagaattaagaattttgagatgggtcattatggatcatcccagtgaacctaatgccatcacgagggttcttatcagagacaggtagagggagatttgagtacagaagacaagatattcgtgtgatgatgcagacagagactggagtgatgccaccacaagccaagcaatgcctggagccaccaggagctgggacaggcaggaaggattctcccttatacccctcagagcaatcttggcccctctgacgtcttgactttagacttctggtccccagaacggagagagaataaatctttcttgttttaaggctccaacaaattggtagtcacttgttacagcaaccacaggaaatgtatacagcttctgatacttctgaaaacctcacacagccaaagggtacatccttggtatagaggctcactcttactcaccagccaggcaaggaaggctcaatcctttggtgttagagagatagatgttgggttttcaaatttcaacatagagaaatcagtcatttgcaatgcttttgagaaagtactgtgtataccctacgagcctgcactccttatgtgtgagactgatgaccattggttggcttattatccattccactaagtgacaaaatcccactgactattcaaatccaggctcctggcatgcctgtaccttagaatcacaaccagctgcaattccaggatggagttcaaactaattgtgggggcatgtgcttcttacatgactgctagattgttcccagatggggaaggttgccctgataagcaacttaaatgaaaataataaatgtattgtttggcctctttaaaaaaaaaaaaaaaaaaaaaaaaaaaaa

SEQ ID NO: 31228 - DNA, 3386 bp, Homo Sapiens
gcggtgtttgtctgccggactgacgggcggccgggcggtgcgcggcggcggtggcggcggggaagatggcggcgtcctccctggaacagaagctgtcccgcctggaagcaaagctgaagcaggagaaccgggaggcccggcggaggatcgacctcaacctggatatcagcccccagcggcccaggcccaccctgcagctcccgctggccaacgatgggggcagccgctcgccatcctcagagagctccccgcagcaccccacgccccccgcccggccccgccacatgctggggctcccgtcaaccctgttcacaccccgcagcatggagagcattgagattgaccagaagctgcaggagatcatgaagcagacgggctacctgaccatcgggggccagcgctaccaggcagaaatcaacgacctggagaacttgggcgagatgggcagcggcacctgcggccaggtgtggaagatgcgcttccggaagaccggccacgtcattgccgttaagcaaatgcggcgctccgggaacaaggaggagaacaagcgcatcctcatggacctggatgtggtgctgaagagccacgactgcccctacatcgtgcagtgctttgggacgttcatcaccaacacggacgtcttcatcgccatggagctcatgggcacctgcgctgagaagctcaagaagcggatgcagggccccatccccgagcgcattctgggcaagatgacagtggcgattgtgaaggcgctgtactacctgaaggagaagcacggtgtcatccaccgcgacgtcaagccctccaacatcctgctggacgagcggggccagatcaagctctgcgacttcggcatcagcggccgcctggtggactccaaagccaagacgcggagcgccggctgtgccgcctacatggcacccgagcgcattgaccccccagaccccaccaagccggactatgacatccgggccgacgtatggagcctgggcatctcgttggtggagctggcaacaggacagtttccctacaagaactgcaagacggactttgaggtcctcaccaaagtcctacaggaagagcccccgcttctgcccggacacatgggcttctcgggggacttccagtccttcgtcaaagactgccttactaaagatcacaggaagagaccaaagtataataagctacttgaacacagcttcatcaagcgctacgagacgctggaggtggacgtggcgtcctggttcaaggatgtcatggcgaagactgagtcaccgcggactagcggcgtcctgagccagccccacctgcccttcttcaggtagctgcttggcggcggccagccccacagggggccaggggcatggccacaggcccccctccccacttggccacccagctgcctgccaggggagacctgggacctggacggccacctaggactgaggacagagagtggggggtgcccacccaccccccccgccccgggcctaccaagcccccgcccttcccaccccggggtcagccggccgtgtgcgtcccccgacagacactgtgaacggaagacagcaggccgcgatcagagtcgctgttcattcagccgcagcctctgggccggggcggcccccaggggccaggagagagccctggagtcccgcagccaccatgcacgctcccagcgtgctgtgtccttcgccactcccacgcgcccgttcctcttccgtcgccctctgtcccctgctctacctctctgtccttgtctggctctcccgtcaccctccctgcctctgtctctcttctggcctgagcctgggcccagccacctcctgacgggtcccctgggtctgcataggtctcccatggcgcaatgagtcagtggcccccagccaggcagtgtgggcattgccactgcggctggacggggctgcgcgctcgcgctctctctctctctctctctctctctttgatctcagggggtcctttttggagtttattgtattttattgtacttggtggggtgtttggggtgggggcggaggagagcttgttctcgtggggttgtcggtaccttcagaaacttttaccaaagtcacgattagctgcttgtggtggggccccaaccgccctcgggcactggggagctgggctggggctgctgctctggggtctccgggggccacagcttggggtgagttgaagacctcaggggatgtggaggggtctgcggggccctggccgcacaggatggccttcagggaaggtggtcttggggcatggtgcagagcaggtgaccggagggaatcggtgacggagcggggccaagggaggggtccggagggagtcagggatggagggcagagggagtggatgtgggggtttgaggacgtgtgacaagctccagcaggggtgggggccgggctgagggtgggggtgcgaggtggtcactcccatcgtgcccctggccgtccctccactcacccacacctggcccagtccacgttgaggtccaggactgggaaggaccgggtgagtgcaccggggacccaggccaggtgccccccggagcctgctggggtggccagagcaggagggggtgtgtttcctttttgtgggtgttgcatgcaaatcaagtggacaagaaaaaataacaaaacaaaaaacaagaaaaaaaaaacacaaaaccccgtaaaatcacaaagaaaatccaacaccaaaggcgcagaagccggctggccgtggtgggggcagcgtaggcgtagcatccctctcctctcacttagcctgttgactcttgttattatcatgatattcacaaaacgccgcatgtttaaaaagtcatagatgtcatcttctctctgcccccagggaggaaagccaccttctcttgccccttggcccctttgtcaggggccaggggtctgccgggtgggggtgccaacaggcctggccctttcctcccctgcatccagccatgggggcctctgcgattgccggaaggttgcatggctggtcccagggccagcacaggcccgaggccgggctgcctggttttatttttatttaactttattttctgttttatgagtgtgtgtccgcccacccccacccccttcagtgttaagtggggagccctgggggagtctctcctgcctcccagcctctcccaagacctcccccctcgtcaccagccatccctctggaccaggcagagggcggaccgggtgggcaggggcctgagggtggctcgggccagcccaccagccaatggacccctcctcaggccgccagtgtcgccctgcccctttttaaaacaaaatgccctcgtttgtaaacccttagacgcttgagaataaaccccttccttttcttccaaaaaaaaaaaaaaa

SEQ ID NO: 31229 - DNA, 1543 bp, Homo Sapiens
agcatcgcgcgcaaggcctgccggttgctcggggtcgtatgacgcacttttccagctcgagccctcacgaggccgtgggtacgaccggaagccgcagactgaatctcgctctgttgcccagcccatctcggcccactgaaacctccacctcccgggttcaagcgattctcctgcctcagcctcccgagtagctgagattacaggcgcccgccaccacgcccagagagatattttgagcactattaaaatacatgcattggctcaatacatgaattggatcaattctggaaccctaacaagatcacatttttgaccaaagtcaatatcttggactatagttaatttatcaagcatgctgatcccattttcaatgaagaattgcttccagttactttgtaactgccaggtcccagcagctggctttaaaaaaacagtaaaaaatgggctcattttacagtcaatttccaatgatgtctatcaaaatctggctgtggaagactggatccatgaccatatgaatctagaaggcaaaccaattctattcttttggcagaattctccctctgttgtaattggtaggcatcaaaatccttggcaggaatgtaacctgaatctaatgagagaagaaggtataaaactggctcggagaagaagtggaggaggaacagtctaccatgatatgggtaatatcaatttgactttctttacaaccaaaaaaaagtatgatagaatggaaaatctgaaattaattgtgagagctctgaatgctgtccaaccccagctggatgtgcaggctaccaaaagatttgaccttttacttgatggacagtttaaaatctcaggaacagcttctaagatcggccggactactgcctatcaccattgcactttattatgtagtactgatgggacgttcttgtcttctttgctaaagagcccttaccaagggatcaggagcaatgccactgctagcataccttccttagtgaaaaatcttttggaaaaggatcccactctgacctgtgaagtactaatgaatgctgttgctacagagtatgctgcttatcatcaaattgataatcacattcacctaataaacccaacggatgagacactgtttcctggaataaatagcaaagccaaagaactgcaaacttgggagtggatatatggcaaaactccaaagtttagtataaatacttcctttcatgtgttatatgaacagtcacacttggaaattaaagtattcatagacataaagaatggaagaattgaaatttgtaatattgaagcacctgatcattggttgccattggaaatacgtgacaaattaaattcaagtcttattggcagtaagttttgcccaactgaaactaccatgctaacaaatatattacttagaacatgtccacaagaccacaaactaaacagtaaatggaatattctctgtgaaaaaattaagggaataatgtgattccaagtaaatgtcttaatacagtttcaattagaaaataaaatgtctcatacttgcacattgtatgtc

SEQ ID NO: 31230 - DNA, 3121 bp, Homo Sapiens
cccacccccaggctccgcgttcccgccggccccagctccagccccgcagcccaccgtgcaaacatgcttagacagagaagagattaacttcagtggcttcccactaattacagagattaagaagtggctgcctgaactattttccaaaggatacacattacaaattattgaatagggcagctaaccaagaagatcctattggtttggggggaacacaacttccagcagccacaagggatgctgctactcaggtgccaactgaaacaagctcctccacagaaggtttcgtttaggttttgtgtcgtgatggggaaacagcaaagcaaactcaaacacagcacttataaatacgggcctgatgaaattatagaagagagaattcaaactaaagcttttcaagagtatagcccagctcacatggataccgtctctgtcgtggctgctttgaactcagacctttgtgtctctggagggaaagataagacagttgtggcctataattggaaaactggaaatgtggtgaaaaggttcaaaggacatgaacatgagatcaccaaggtagcctgtattcccaaatccagccagttcttcagtgcctctcgtgacaggatggtcatgatgtgggacttgcacggttcctcacaaccaaggcagcaattgtgtggccatgccatggtggtcaccggattggctgtgagtccagactcatcacagctgtgcactggctctcgggacaacaccctgcttctgtgggatgtggtgacaggacagagtgtggaaagagcatctgtctccaggaacgtggtcactcacctgtgctgggtccccagagaaccatacatactacagacctctgaagataaaaccctcagattatgggacagtcgggggctgcaggtagctcatatgtttcctgcaaagcagcacattcagacctactgtgaagtcagtgtggatggacacaagtgtatctcctgcagcaatggctttggaggagaaggctgtgaagccacgttgtgggacctaagacagactcgaaacagaatatgtgagtataaggggcatttccagactgtcgcatcctgcgtctttctaccaagagcattggccttgatgcctttaattgctacctcatcacatgattgcaaggtgaagatttggaaccaagatactggagcctgccttttcaccttgtctctggatggatcaggacccttgacttctctggctgttggtgacgccatctccttattgtgtgcaagttttaacagaggaattcacttactcagaatggaccacagccaagggctggaactgcaggaagtggcagcattctgaggccaagagacactcactggacaatatcaaaccatggctcctcctcagcatggctttgtgtctttcccagttatcttgaggggagtgggatgtagggctggtattctttgcttaggttcatttacaagatgtatcagtgttgtaagtccaataatttaagtccagtgattcaaaatcaggtatagagtccagaaacatggactacacataaggttctctatttaagttaaatacaaatgcaactttttagtgagcttttaggactactcttcaaaaaaagtgtattgctcagaatgatgacctgtaaatgtaagagtggcaggcctctgtctgtgaaagtcagaacacagggcccgagcctctggaactgaccctttgcaagtctttacaaaagaaaaaaggcagtggggagagagagtgttttggttacatcagaaataattgagatgggaaagaatagtgcagctccatagaggagacggactgtagacaatgagattaagcttcaatcactgctcctcagcaatgtgaagaatcaaagtcagggcaagaaagcgaaatcttggacttctattcaaagtggcagcagagtgggagggcggtacccttctagcccagtgctgctgagcttgtgtgaaaatcagacctgagatggctagaagcagccaagaaccacatgggcattgcccagaattacaggagttagcacaccagctctacagataagaaaacattgaaattcaaagattaaggccaaaaatatctcacttgcaattttaatattttcatttggatttatataaatgaaacatatatatgttttggaatggccagagtgaggcaaaggggatccctgaggcgggagaatcgcttgaacccaggaggcggaggttgcggtgagccgagattgtgccattgcactccagcctgggcaacaagagcgaaactccatctcaataaataaataaataagtaaatgccaggaaaggtggtgacaaatggtagccataattatttattgtcctctctgtccagactaaatgttcccttttccatattaaacatttaccattctgccgtgagccactgcgcccggcctccttcatccattcttagatcttatcctctaaacctttagtcatcgtttcactctcctttgattccttgttatgggtctttcaactctggaaagacaaagagatagtgggagaggaagcccggtcactgagcatctacagagggctaaatatatttattctcatttgttattcccaatattctctgtattgtgatttccatttcacagatgaggaagctgagggctagaaacatgcagtactttgcccaaagtcacacacatattaagaagagctgaggtatgaatctgggtctgcctgactcaaagcccaaacgctttcctttgcatcgtgtcacaaagtcatagaccatgacattgtttgtatcttcaagaccagttattaactttctggctccaaggagatcccctgcccaagtgcctaggggcagtagacagctgtctcagggacagtcgtagcatgtgctggattattagtgcagcagctgacactttttcccagaagggagagaggcagcaagtcagaaagttcacgggaatgagttgggagggggtcccagggaagggggacaggctgccaggagaaggaaagtacacgggagaaaatagtggggctctgatgagttagtagggttctgttaccaataaaattgtttccataaactgtaaaaaaaaaaaaaaaaaaaa

SEQ ID NO: 31231 - DNA, 1518 bp, Homo Sapiens
agcggcgcctcgcgcgtcaggcaatctggccaattgcgcatcttttccgcctaccgcacggccccgcccctgccacaggatcgatttacggccgcagagaaaaaccaagatttcactttcaagatggaaagtccgtcagactcagctgtggttttacctagcactcctcaggcctctgcgaatccatcatctccctatacaaatagttcccgaaaacaacctatgagtgcaacacttagagaaagattaaggaaaacaagattttcatttaattcctcttacaatgtggtgaaacgtcttaaagtagagagtgaagaaaatgatcagaccttttcagagaaaccagcatcttccacagaggaaaactgtttggaatttcaagaaagttttaaacatatagacagtgaatttgaagaaaatacaaatttgaaaaatactttgaagaatctcaatgtctgtgaatctcagtcacttgattctggatcatgcagtgctctccaaaatgagtttgtgagtgagaagcttcctaaacaaagattaaacgctgaaaaagccaaattggtgaagcaggttcaggagaaagaagaccttcttcggaggctaaaactagtcaaaatgtatagatcaaagaatgatctgtctcagttacagttgttaataaagaagtggagaagctgtagccagctcttgctttatgagttgcagtcagctgtgtctgaagagaacaagaaactaagccttactcaattgatagaccactatgggttagatgataaattactacactataacagaagtgaagaagaatttatagatgtttaattcctgatttttgctccagaatatctttgagaatgacaacttaattaaaagatacttaggcactttttttttttttttgagactgagtttcgctcttgtcatcctggctggagtgtgatggtgcgatcttgactcactgcaacctctgcctctcgggttccagcaattctcctgcctcagcctcccgagtagctgagattacaggcgcccgccaccatgcccggctaatttttgcatttttagtagagactgggtttcaccacgttggccaggctggtctcgaactcctgacctcaggtgatccaccgcctaggcctcccaaaaccattagggctcagaggaaggtatcccaatgaatatcaattaagggcactttaatatataaattataaactaagttctaaaaggaaaattagtattttggatagatttgtcaaaacgacatttaagtcatgtttaaaaagtcatttgggcagttctggaaactagttttaatacatttgttttttatgacaaaaagttttattttaaatgttaaaaattgtccaatctggtgaatgtctaaccctaaagtttaaaaatttctgcctcctaagtttatgtaccttgtttccatccatttaccacatatttccatctgatagtctagcaggtaattaaacttatatgtccaaaaccataaaaaaaaaaaaaaaa

SEQ ID NO: 31232 - DNA, 689 bp, Homo Sapiens
gcttggggcgctggcacctcctcttacagctttactcctgccagcttgggaaaaggccggagaaggtgaaattctgtgtgctccctccggcgagagactttgtcagctcccgcacagtaacctttatccaaaccagatcctgaataaagtcaaaactcaaccaacaggtggaagtccaagaatccgagtggaggctcaccgaggcgaaggggccaaccatgggaaaggagagtggatgggactcaggcagggctgctgtagcagctgtggtcggaggagttgtggctgtggggactgtgctcgtggcgctcagtgccatgggcttcacctcagtaggaatcgccgcatcctccatagcagccaagatgatgtctacagcagccattgccaacgggggcggagttgctgctggcagtctggtggctattctgcagtcagtgggggcagctggactctctgtgacatctaaagttatcgggggctttgctgggacagctcttggggcctggctgggttcacccccttccagctgaacaccacactgaggcagggagttggctctcttggtggagatgactttcctgggcctctggatgacaatcttccaaaggacaagtctcctactcccaaaactatttaaggaagcatgaaaaataaagatgctggttatcttcaaaaaaaaaaaaaaa

SEQ ID NO: 31233 - DNA, 1068 bp, Homo Sapiens
gctgaggcggcgagggtgagtcggcgccggccgctaccgcacttcgggcgctcgtccctcatttctctgtggtgaatggcgacgggatggagcgcgaggggagcggcggcagcggcgggtcggccgggctcctgcagcagatcctgagcctgaaggttgtgccgcgggtgggcaacgggaccctgtgccccaactctacttccctctgctccttcccagagatgtggtatggtgtattcctgtgggcactggtgtcttctctcttctttcatgtccctgctggattactggccctcttcaccctcagacatcacaaatatggtaggttcatgtctgtaagcatcctgttgatgggcatcgtgggaccaattactgctggaatcttgacaagtgcagctattgctggagtttaccgagcagcagggaaggaaatgataccatttgaagccctcacactgggcactggacagacattttgcgtcttggtggtctcctttttacggattttagctactctatagcatacatccttatgctgagatgttgaacttaaactttatggaatcctccaaaagaatacattatggagtgtagtgttttcttagttcttcaaagggaagcaacttggatgaacaggaacatgaaggacaacacatctcagccttttcttcattttgaagctcctagaattgaagacttatgtggactcctattgttctcaaccaaaacaagtcttttggctttcttttttgtagatatttaatttaagcagttttaatgtgtacctttacccaagccaagtcaacagtgtctctggggtggcatcctttgcactgaaatttacagtattctgtgagatgtcgcatattttgaagaaaccgtggaagatactggtttatttcaaatgagcagagtatgttgtattaaaatcttatctaatcttgattaaaatttggcaaactcttttctttgctacatcttagtgacaataaatgccaaataggttttggttgagtatagttttgaaaacaaatttggtgaaataaagcaggaaaaaaaaaaaaaaaa

SEQ ID NO: 31234 - DNA, 5174 bp, Homo Sapiens; identical to SEQ ID NO: 28161

SEQ ID NO: 31235 - DNA, 2755 bp, Homo Sapiens
gccaggttcaaagagcccgcggcgtcttcacgcccctgcgctcagctctagactcagtcgctcgctgagagacgccctggaacgtctgtgtagcctcagtcgctgagagacgccctggaacgtctgtggcagcctctgtcacagtgggacccgcactggcagcgggaggcagagggaggaccctggaacatcccggaagccgggaaatggacgcagtggcctttgaggatgtggctgtgaacttcacccaggaggaatgggctttgctgggtccatcacagaagaatttatacagatatgtgatgcaagaaaccatcaggaacctggactgtataagaatgatatgggaagaacagaatactgaagatcagtacaaaaatcctaggagaaatctaagatgtcatatggtagagagattcagtgaaagtaaagacagtagtcagtgtggagaaacatttagcctcattcgagatagtattgtgaacaacagcatttgtcctggagaagatccatgtcaaagcgctgagtgtgaagaagtcataatgggtcatttatcccttaatagccacatcagagttgattctggacacaaaccacatgagtatcaggaatatggagagaagccacatacacataaacaacgtgggaaagccttcagttaccatcactcctttcagtcgcgtggaaggcctcacactggaaagaaacgctatgagtgtaaggaatgtggaaaaaccttcagttctcgtagaaaccttcgaagacacatggtagtgcaaggtggaaatagaccttataaatgtaagttgtgtgggaaagcttttttttggcccagtttattacgtatgcatgaaagaactcacactggagagaaaccgtatgaatgtaagcagtgttctaaagcctttcctttttacagttcctatcgaagacatgagagaatgcacactggggagaaaccgtatgaatgtaagcagtgttctaaagccttgcctgattccagttcctatataagacatgaaagaactcacactggagagaaaccatatacatgtaaacagtgtgggaaagccttcagtgtttccagttcccttcgaagacatgaaaccactcacagtgcagagaaaccctatgagtgtaagcaatgcgggaaaacatttcatcatcttggaagctttcagatacacatgaaaaggcacactggagatcgacctcataaatgtaagatatgtgggaaaggctttgatcgtcccagtttagttcgatatcatgaacgaattcacactggagagaaaccctatgaatgcaagcagtgtgggaaaacgttatctcatagctcaagctttcgaagacacatgataatgcacactggaggtggacctcataaatgcaagatatgtgggaaagcttttgtttatcctagtgtatgtcaaagacacgaaaagtctcacagtggagagaaaccctatgaatgcaagcagtgtgggaaagcgttatctcatagctcaagctttcgaagacatatggtaatgcatacgggagatgggccgaataaatgcaaggtatgtgggaaagcctttgtttatcccagtgtatgtcaaagacatgaaaagactcactggagagaaacaatatgaatgtaaactattataaagccttctatatttccagttccctttgatatcatgaataaacttacactggacagaaaccctataaatgtaaatgtgggaaagcctttcataatttttattcctttcaaaatcatgaaatatctcacactggagagatgctgtatgatataaggaatgtgggaaagtgttcgattttttttttaacaccattgtcaacataaaacaactcacagagcagaaaaactctgtgagtgtaaaatatgtagggaagccttcagtcattttggtaacttaaaagtacatgaggctgggcacagtggctcacgcctgtaatcccagcacttagggtgggcaaattgcttgacctcaggaatttgaggcctgcctgggcaaaatggtgaaaccatgtctctacaaaaaatagaaaaagtagcaggtgtggtggtatgcccctgtagtcccagctacttgggaggctgaggtgggaagatctcttgagccgagggggtgggggttgcagtgagccaagatgcactgcaccccagcctgggcgacagagccagaccctgtctcaaaaaaaaaaaaaaagtacatgaaaggattcactctggagagaagtcatatgaatgtaagaaatgtagaaaatcattgagttctctcaggtccttgcatagacataaaaggactcactggagagatactctataaatgtgtgaaatgtagggaagtattctttaatgttatttcatttcagatagaaataattctcattggagataaacgctatgaatgtaaacacatagtaaagccttaattttaagcctcagtttctttcaaatacagttatcccctaatatttgaggagcgtggttctaccaccccctgggcatacataaatcgacacatgccaagtccttttttaaaaatgacatatttggtacaaaattacccggatgtgatggcacatgcctgtaatcccagctactcaggaggctgaggcaggataatcacttgaatccgggaggcggaggttgcggtgagccaaggtcgcgccactgcactccagcctgggcagcaagagcaaaacaacctctgtcacacacacaaaaaaaaaaaaaaaa

SEQ ID NO: 31236 - DNA, 2083 bp, Homo Sapiens
caaaacccagacccccaggtcccggccaatggaggcgatttagactggagtgggaccgcgtctgtcaaaagcccgactcggcagcagcggcggagtccaggaggagagctggagccgccgcgctgcctccccgcccccgccgggatttattatttggactggacaattaagtggccctgatgatgttaccaagcccggtcacctccacccctttctcagtcaaagacattttgaatctggagcagcagcaccagcacttccatggtgcgcacttgcaggcggacttggagcaccacttccactctgcgccctgcatgctggccgccgctgaggggacgcaattttctgacggaggggaggaggacgaggaagacgagggcgagaaattgtcctatttgaactcactagccgcagcagacggccacggggattcagggctgtgtccccagggctatgtccacacggtcctgcgagactcgtgcagcgagcccaaggaacatgaagaggagcccgaggtcgtgagggaccggagccaaaaaagctgccagctgaagaagtctctagagacggccggagactgcaaggcggcggaggagagcgagaggccgaagccacgcagccgccggaagccccgggtcctcttctcgcaagcccaggtcttcgagctggaacgcaggttcaagcagcagcggtacctgtcggcacccgagcgcgagcacctcgccagcagcctgaagctcacatccactcaggtgaaaatctggttccagaatcgcaggtacaagtgcaagagacagcggcaggacaagtctctggagcttggcgcacacgcgcccccgccgccgccgcgccgcgtggctgtcccggtgctggtgcgggacggcaagccgtgcgtcacgcccagcgcgcaggcctacggcgcgccctacagcgtgggcgccagcgcctactcctacaacagcttccccgcctacggctatgggaactcggcggcgggacctccgcggcgaccactgccatgcagcccgcctgcagcgcggccggaggcggcccctttgtgaacgtgagcaacctaggaggcttcggcagcggcggcagcgcacagccgttgcaccagggtactgcagccggggccgcgtgcgctcagggcaccttgcagggcatccgggcctggtagggacggggcgggtcacgcggcgggcaccccagcgcagcctggcgccgcgggactgaagctcgagaagggcctgacctaaaggtcaggtcccctcgttaaaaaaatatgtacgtctagctcctcagggcttcggatcgcagctcactcgaggcctggggaaggggactcaggggcgaggaggatgactgggtccggtcgccaggactgtctctgaggcagaaacgccggctgggcgccggggaggacgatggccccgaccctggcagcgagaggagaccaggaggctaggaccctggccgcgcttggttcttccaaagcgagaagggcttctctccctctgcctttccgcggcctccgcgaagcgttggcggggagcccaaggacataacaaattaaaagcatgaaggagagaaaaatgggggtcgtggcttgagaaattccaggccctaccgatcctctgccccctttgcgggcctggagcgccatagcacagtcgatttcgtttcgcagctgtctcccctccgcagcagatacctcggtccagatctccggattgtcgggggacgcaggactcttcgaggaaaaccagccgaatgagatcaaaagttgggggtggggggaggctgaacaaactcaggacctggtggcccaccggaggtgttaccgggtttcctttctgtttcgtattctgtattcagcacatgttatctatctatctatctatataactataaccacacgccgtgtagacacccgctgccacacactacaggagtcaataaacaaggtgcaatattttcaaaaaaaaaaaaaaaaaaaaaaaaaaaaaaaaaaaaaaaaaaaaaaaaaaaaaaaaaaaaaaaaaaaaaaaaaaaaaaaaaaaaaaaaaaaaaaaaaaaaaaaaaa

SEQ ID NO: 31237 - DNA, 1604 bp, Homo Sapiens
cctccgcccgcccgcctgcctgcctgcccgcccgctcgctcgcccggcccgcgactcatgtcccgccgcaaggccggcagcgcgccccgccgagtagagcccgcgcccgccgccaacccagacgacgagatggaaatgcaggacctcgtcatcgaactcaagcccgagccagacgcgcagccccaacaggccccaaggctggggcccttctccccgaaggaggtgtcctcggcggggcggttcggcggcgaaccccaccactcccctggccccatgcccgccggggccgccctcctcgccctcggcccgcggaacccgtggaccctgtggacgccgttgaccccgaactatcccgaccgccagccctggaccgacaaacacccagatctgttgacctgcggccgctgcctgcagaccttcccgttggaggccatcactgccttcatggaccacaagaagctgggctgtcagctcttcagaggccccagccgcggccagggctcagaacgagaggagctgaaggccttgagctgcctgcgctgtggcaaacagttcacagtggcctggaagctgctgcgtcacgcccagtgggaccacggactgtccatctaccagacagaatcagaggccccggaggccccgctcctgggcctggccgaggtggctgcagccgtgtcggcagtggtggggccagcagctgaggccaagagcccccgtgcaagtggcagcggcctcacccggcggagccccacctgtcctgtgtgcaagaagaccctcagctccttcagcaacctcaaagtgcacatgcgctcacacacaggcgagcggccctatgcttgcgaccagtgtccctacgcctgcgcccagagcagcaagctcaaccgccacaagaagacccaccggcaggtgccgccccagagccccctcatggccgacaccagccaggagcaggcctctgcagcccctccggagccggctgtccatgctgctgcccccaccagcacccttccatgcagcggtggtgagggggctggagccgccgccacagcaggtgtccaggaacccggggctcctggcagtggggctcaagccggccctggtggagacacttggggagccatcaccacggaacaaagaactgaccctgcaaacagccagaaggcatcacccaaaaagatgcccaagtcagggggcaagagccgcgggcccgggggcagctgtgagttctgcgggaagcattttaccaacagcagcaacctgacggtgcaccggcgctcacacaccggggagcgcccctacacctgtgagttctgcaactacgcctgcgcccagagcagtaagctcaaccgccaccgccgcatgcacggcatgacgcctggcagcacccgcttcgagtgcccccactgccatgtgcccttcggcctgcgagccaccctggacaaacacctgcggcagaagcaccctgaggcggccggcgaggcctgagcccaggaaagcccccctcactgtccctggtaccgctgccaacacccattgacctcctcgtttttgcccgccttctccaagtaaattttcccttttatttaaaaaaaaaaaaaaaaaaa

SEQ ID NO: 31238 - DNA, 2772 bp, Homo Sapiens
gcgtctccgtttctccgagaggcccaaggtgtctccgccgcagcctctgtcgcgccgtgacctgtacaggtcgcgggagtcgtagggaggacgccgggacacctggaagccgagaaatggattcagtggcctttgaggatgtggctgtgaacttcaccctggaggagtgggctttgctggatccttcccagaagaatctctacagggatgtgatgcgggaaaccttcaggaacctggcttctgtaggaaaacaatgggaagaccagaacattgaagacccattcaaaattcccaggagaaatataagtcatattccagagagactctgtgaaagtaaagaaggtggtcaaggtgaagaaaccttcagccagattccagatggtattctgaacaagaaaactcctggagtaaaaccgtgtgaaagcagtgtgtgtggagaagttggcatgggtccttcatcacttaataggcacatcagagatcacactggacgtgaaccaaatgaatatcaggaatatggaaagaagtcatatacacgtaaccagtgtggacgagccttgagttatcatcgctcttttccagtacgtgaaaggactcatcctggaggaaagccctatgattgtaaggaatgtggagaaacctttatttctcttgtaagcattcgaagacacatgttaacgcataggggaggtgtaccttacaaatgtaaggtgtgtgggaaagcctttgattatcccagtttatttcgtatacatgaaagaagtcacactggagagaaaccttatgaatgcaagcaatgtgggaaagccttcagttgttccagttacattagaatacatgaaaggactcacactggagataaaccctatgaatgcaagcagtgtgggaaagctttcagttgttccaagtacattcgaatccatgaacgaactcacacaggagagaaaccctacgaatgtaaacagtgcggtaaagcctttaggtgcgccagttctgttcgaagtcacgagaggactcacaccggagagaaactttttgaatgtaaggaatgcgggaaggctttgacttgtcttgcaagtgttagaagacacatgataaagcacactggcaatggaccttataaatgtaaggtgtgtgggaaagcctttgatttccccagttcatttcgaatccatgaaaggacccacactggagagaaaccctatgattgtaagcaatgtgggaaagccttcagttgttccagttcgtttcgaaaacatgaaagaattcacactggagagaaaccctataaatgtacaaaatgtgggaaagccttcagtcgttccagttacttccgaatccatgaaagaactcacactggagagaaaccctatgaatgtaagcaatgtgggaaagccttcagtcgatccacttactttcgagtacatgaaaaaattcatactggagagaaaccctatgagaaccctaaccctaacgcttcagttgtcccagttctttcatgagcatgaaaggagtcacatagagaaaccccatgaaagtaagaaatttgggaaagccttcagtcctttctgtttctttcaactacgtgaaaggattcacagtggagaaagaccctgtaagataattggctttaaattacgagagacttgtgataggacagtaaaacctagagttggagttggatctctggattgtgttatgtcagtgttggtaggttaggaactagatttcccagaatccattccatttgtgattccatgatacaattcaccagtaacctatcttacatgagattcggaagtaagttaagaaggcattagtcatggtttggaagcaccatacagggagacagctgtgtgaatacaggctgtatggacacttgcttccatcccattttcctgcttctttgggttgccaatcaagagtatcctcaaaacgacttgactttaattttctcggaggtgataggcttccacacaggtctccagaagccctgcattgaatatccatccacactttggttttccttcagacattattatgtctgtactaggcaactaattcagactgtcctggttgggaatattctgtgatgctctgactcccctagtctgtagacagaattggcatacggtctaatttgtgtagtaagcacctttgttcatactagtagtgactgtattcttgattcagcctgatagctaccatgctgctgtcaaaaccaaccagaggggagcttgttcttctactgtagtgtgcagtgactggcctcacccaggactttgatgtgagaatgagcactttcctctatcaggaaatttcaagtgtttcctgttattcgtagctcaatgtaatgcctcagttcattttcagttgtttgattatatgtgactaatatgtattttttattcaaacaagacttctgtacatgtttcttcaaaacagtttattaactgtcttcagtcttggattacatcaagtttataattttggcaaattgttaagacactgtgaagtcagcgttaaccatgtgcatacaacttaaggaattttttcctcctcatgtaaattttacttttcatgcttatatagtttcaacttttatcttcatagtaatttctcatctactcataataccaaaagttaagtcatgctgttttgtgtgctctcttgctaaagaccgcagagaccatacctgttgtcaaagagggtgtaataaactgtaataataatcatgaccacaaaccataaaggactgtgtgatgtatcagt

SEQ ID NO: 31239 - DNA, 2672 bp, Homo Sapiens
ttccctttgcaattgccttgggtcctgccgcacagagcggcctgtctttatcagaggtccctctgccagggggagggccccagagaaaaccagaaagagggtgagagactgaggaagataaagcgtcccagggcctcctacaccagcgcctgagcaggaagggggaggggccatgactacgaggccctgggaggtcactttagggagggctgtcctgaaacctggagcctggagcagaaagtgaaaccctggtgctccagacaaagatcttagtcgggactagccggccaaggatgaagcctcacttcagaaacacagtggagcgaatgtatcgagacacattctcctacaacttttataatagacccatcctttctcgtcggaataccgtctggctgtgctacgaagtgaaaacaaagggtccctcaaggccccgtttggacgcaaagatctttcgaggccaggtgtattcccagcctgagcaccacgcagaaatgtgcttcctctcttggttctgtggcaaccagctgcctgcttacaagtgtttccagatcacctggtttgtatcctggaccccctgcccggactgtgtggcgaagctggccgaattcctggctgagcaccccaatgtcaccctgaccatctccgccgcccgcctctactactactgggaaagagattaccgaagggcgctctgcaggctgagtcaggcaggggcccgcgtgaagattatggacgatgaagaatttgcatactgctgggaaaactttgtgtacagtgaaggtcagccattcatgccttggtacaaattcgatgacaattatgcattcctgcaccgcacgctaaaggagattctcagaaacccgatggaggcaatgtatccacacatattctacttccactttaaaaacctacgcaaagcctatggtcggaacgaaagctggctgtgcttcaccatggaagttgtaaagcaccactcacctgtctcctggaagaggggcgtcttccgaaaccaggtggatcctgagacccattgtcatgcagaaaggtgcttcctctcttggttctgtgacgacatactgtctcctaacacaaactacgaggtcacctggtacacatcttggagcccttgcccagagtgtgcaggggaggtggccgagttcctggccaggcacagcaacgtgaatctcaccatcttcaccgcccgcctctactacttctgggatacagattaccaggaggggctccgcagcctgagtcaggaaggggcctccgtggagatcatgggctacaaagattttaaatattgttgggaaaactttgtgtacaatgatgatgagccattcaagccttggaaaggactaaaatacaactttctattcctggacagcaagctgcaggagattctcgagtgaggggtctccccgggcctcatggtctgtctcctctagcctcctgctcatgttgtgcaggcctcccctccatcctggaccagctgtgcttttgcctggtcatcctgagcccctcctggcctcagggccattccatagtgctcccctgcctcaccacctcctctccgctctcccaggctcttcctgcagaggcctctttctgcctccatggctatccatccacccaccaagaccctgttccctgagcctgcatgcccctaacctgccttttcccatctccccagcataacctaatattttttttttttttttgagacggaatttcgctctgtcacccagactggagtgcaatggcttgatcttggctcactgcaaactctgcctaccaggttcaagcgattctcctgcctccgcctcccgagtagctggaattacagacgcctgccaccacgcacagctaactttttttttttttgtatttttagtagtgactgggtttcaccatgttggccaggctggtcttgaactcctgacctcaggtgatccgcctatctcagcctcccaaagtgctgggattacaggcgtgagccactggcccggcggcacaaccaaatcttattaaactcaccctaggctggccgcggtgactcatgcctataatcccccagcaatttgggaggcagaggtgagagaatcgcttgagcccaggaattcgagaccagcctgggccacatgacaaagccccatctctacaaaaaaattacaaaaaaaaaaaaaacaggtgtggtggcatgcacctgtagttgaagctacttggaaggatgaagtgggaggattgcttgagccggggaggtggaggctgcagtgaactgagatcacgtcactgaactccagtctgagcaacagatcgagaccctgcctgaaaataaatcaataaataaactcaaccgaaatgggtatgaaagttgaaatgggtatgtaagttgaaaaccagaagttttgagaaacatcctttgttaactttcatcctacaaattgggtcattcatgtcctacgcagctaaaacagagcccaggagccagggaggaaaagcagtcaggccacacaccattgctcccaaaatggacttctctgcaagcctgactcctgaaactgtgcattgtaccctgaaaccagctttatccatagcttctgcaataaatggctgtaagtcttggaaaaaaaaaaaaaaaaaaaaaaaaaaaaaaaaaaaaaaaaaaa

SEQ ID NO: 31240 - DNA, 3503 bp, Homo Sapiens
aaaatttcccgggccgggagcgctgggcctgccgggaaggcgctgggacggttacccagcgggccgccggcggtcgtgggcaagcttcgccatgcagagcactgacctaggcaacaaggagagcggcaagatatggcaccgcaagccgtccccggccacgcgggacggaattatagtgaacattattcacaacacttccgattaccatccaaaagttttgcgatttttgaatgtggcttttgacggcacaggcgactgcttaattgctggggaccaccaaggaaatatttatgtttttgacttacatggaaacaggttcaatcttgttcagcgaacagcacaagcttgcacagctctggcctttaatcttcgtaggaaatctgaattccttgtggcattagctgattattctattaaatgttttgatacagtcaccaaggagctagttagctggatgagaggacatgaatcatcagtattttcgatctctgtgcatgcatcagggaaatatgccatcacaacttcttctgatacagcacaattatgggacttggatacctttcagagaaaaagaaagctgaatattcgccagtctgtgggtatacagaaggttttctttctaccattaagtaataccatcctcagctgttttaaagataattccatttttgcctgggaatgtgacacacttttttgcaaatatcaattgccagctccacctgaaagctctagtatattatacaaagtgtttgctgtaaccagagatggccgaatcctggctgctggaggcaagtcaaatcatcttcatttgtggtgcttggaagctaggcagctctttagaattatccagatgcccactaaagttcgagccattcgccatctggaatttcttcctgatagttttgatgctggttctaatcaggttcttggagtactaagtcaagatggtattatgagatttatcaatatgcagacttgtaaacttctctttgagattgggagcctcgatgaaggaattagctcatcagcaattagcccacatggacggtacattgcatctattatggaaaatggaagtctaaacatatattcagttcaggctttaacacaagaaataaataagccacctccgcctttagtgaaagttattgaagatttgcccaataataaactgagttccagtgatcttaagatgaaagtaacatcagggagagtacagcagccagcaaaatctagggaaagcaaaatgcaaactagaatattaaaacaagacctgactggtgattttgaaagtaaaaagaatgaattaccagatggattaaacaaaaagcgtttacaaatcttattaaaaggctatggtgaatatccaacaaaatacagaatgttcatttggcgctctctgctacaactgcctgaaaatcatactgcgtttagtaccctcatagataaggggactcatgtggcgtttctcaaccttcagaagaaataccccatcaaaagtaggaagctactcagagtattacagagaaccttatctgcattagctcactggtctgtcatttttagtgacacaccatatcttccactcttggcatttccatttgtaaaattattccagaacaaccaactcatctgttttgaagttattgctactctcataatcaattggtgtcaacactggtttgaatattttcctaatcctcctatcaatattcttagcatgatagaaaatgttttggcatttcatgacaaggaactgctgcaacacttcatagatcatgatataacctcccagctatatgcatggcctcttcttgaaactgtgttctcagaagtgctgacaagagaggagtggctgaaattgttcgataatatcttttccaaccatccttccttccttctgatgactgttgtagcctacaacatatgttctagaacgcctctgctcagctgtaatcttaaagatgactttgagtttttttttcaccatcggaataacctggatataaatgttgtgattagacaagtttatcatctcatggagaccacgcctactgacattcatccagacagcatgcttaatgtttttgttgcactgacaaaagggcagtatccagtatttaatcaatatccaaagtttattgtggactatcaaacacaggaacgagaaagaataaggaatgatgaattggattacttaagagagaggcagacagttgaagatatgcaagctaaagtcgaccagcaaagagttgaagatgaagcttggtaccagaaacaggagctgcttcgtaaagctgaagaaacaagaagagaaatgctcttacaagaggaggagaaaatgatacaacaaagacagaggctagctgctgtgaaaagagagctgaaagtaaaggaaatgcacttacaagatgctgcaagaaggcgttttctgaagcttcagcaagatcaacaggaaatggagctaagaagactggatgatgaaattgggagaaaggtatatatgagagatcgagaaattgctgccacagccagagacctagaaatgagacagctggaactcgaatcacaaaagagactttatgagaagaatcttactgaaaatcaagaagctcttgcaaaagaaatgcgagcagatgcagatgcctatagacgaaaagtggatcttgaagaacacatgtttcataagctgatagaagcaggtgaaacccagagccagaaaactcagaaggtgattaaagaaaatttggcaaaggctgaacaagcatgcctaaataccgactggcagattcagtctttacataaacaaaaatgtgatgatctacaacgaaacaaatgttaccaggaagtagccaaactccttagggaaaacagaaggaaagaaatagagataataaatgcaatggtggaggaggaagccaagaagtggaaggaagctgaaggaaaagagttccgtttgagatcagcaaagaaagcttctgctctttcagatgcgtctagaaagtggtttttaaagcaagagataaatgcggctgtagaacatgctgaaaatccatgtcataaagaagaacccaggttccaaaatgaacaggactcaagctgtttgcctagaacctcacaattaaatgactcttctgaaatggatccctcaacacagatttctttaaatagaagagcagtagaatgggacaccacgggacagaatcttattaagaaagtgagaaatcttcgccagagactcactgcccgggctcgtcacagatgtcaaacccctcatcttttggctgcatagaatgcatgtcaccttgagacggtcgagagagagacctattttgcaatcagtgacattgatttttagattatttatttaaaattcctataaagatcagccctttgtacagaaaaatgtgtctataaaaattatgtgttatttaattctgatactttttggcttgtaaatggcttcttgaactttttacaataaaaatgttttagaaactgtt

SEQ ID NO: 31241 - DNA, 3081 bp, Homo Sapiens
gtagggcggatctcgcagctacggcgttcttttaggggtggagccggcaggaaatttaaactgaagccgcggccgaaaacgccaagagattgatgctgtagctgccctgagataaccaggactgtggaatcgggaagagctcatggagctcgcgaatgtaatacggaggcctctgaggaaggagtacggaggccgagaaggagccggcatttgatgagcgaaccgggaaagggagacgattgcctcgagctggagagttccatggctgagagtaggctccgggccccggacctaggagtttccaggtgtctaggaaaatgccagaagaactcaccaggtgccaggaagcatcccttttccggaaagtccttttacttggatctgcctgctggcaagaatctccagtttttgacgggggccattcagcaactgggtggggtaattgagggttttctgagcaaagaagtaagttacatcgtgtccagccgcagagaagtaaaggcagagagcagtgggaaaagccatagaggctgccctagccctagccccagtgaggtcagagtggaaacatcggccatggttgatccaaaaggcagccaccccaggccttcacggaaacccgttgactcggtgcctctaagcagagggaaggagctgctgcagaaggctatcagaaaccaggggagcatcagtggaggaggcagtgggggcagcagcagcctcctgaccaatgcccgctcttggggagtgaggattctgcacgtggatgaaatgatgatgcacgtgcaacagctgtctcttgcgtctttatgtgtgaaaaaacaacagccaaagaagccagagggaacatgtccagcagcagagtcaagaacacggaaagtggccagactgaaggccccgttcctcaaaatcgaagatgaaagcaggaagtttcgtcctttccatcatcagtttaaatcctttcctgaaatttcttttcttggacccaaagatgcaagtccctttgaggccccgacgaccctgggcagcatgcaccataccagagaatccaaggatggagagccaagcccacgatcagctgcccacaccatgcccaggaggaagaaaggctactgcgagtgctgtcaggaggccttcgaggagctccatgtgcatcttcagagtgcccagcaccggagctttgccctggaagcccatctatatgcagaagtggacaggatcattgctcagctcagccacagctttgcagacatccctttccaggctggcctccccaggtggtcaggttccccagcttctgattgtgaccctctctgtcctgagactctgcacccccatcagccctcccatcccagggcagcatctcccaggataaggaaagaagacagctgccaggcatcagtgacccaaggcagggctgcgggccagcagcgatggacagaatcactagatggtgtgatgggacctcctgcaagtcacacatgtgtgagtgccacaaccctcctgccggccttgcccaagggctccagggagcagggctgcctctgtccctgcccagcctcctttacccagtctcatctggtcacttccttggctctgctgcctggggagtggtcgcctgcagaggacatgcccctccatccctcccaagaaaactcctttgccccggcggacattcctgttaagggcccactcctcttccctgaagccagaccgtggcttatgtctgcacgctgctgggttcgtccctttccttttgtgacatggggttgcctcattccccatgacaccacccctctgcatgaggaagtttccccttgcccctgtctcagacttggatacctttacctgctgctcacacaaagcctgtggtgccgggttcgggtgccctcattgtcaactgcaggacccattccccgaacctcacatccgtgtacccttgccttcccctcctatctcaatgatcatgaccttggacatctctgccaggccaaaccccaaggctggaacactcctcagccatttctccattgcggcttcctggctgtagactcaggttagaggtgaacccagaacacctgagacttgacccaggatggatgggtgctgcttgatgtgaatgaggtcccgcagtggctccttggcgtgagcactgctcagactcctttccactccagccccctttccacatcgcaccagatgacttttacccagacccagtgggcattgccttatcttgcagtcagtcccttttcaacatgttgccgtttctttctgaagaggtgtcctccctccacaagtcacactgtctgtccctggccctccagcccacctcgccaaccactcttgttggtttccttctcagacttgccacctttcccctctgccccaaaatgccatgctcctctcctggaaaacacttgagttgattcagtaaatcgacttcaaatacttgaaggctcccaccttctgttctctggctccttcctgcggtctatacctaccgcctcctcttcacctccttcccttccacacttccttcctgggtagctctgcctgaagcattccactaagatcatctattccaaggtcatggacaggctactggtgaccaaagttggttccttttctcctttctttcctccttgaagcctggctcccttggtcgcagcagcccctcagtggcctggttctcctgtccccctgcccttcctcaccattgcccattccctcgttcgttcattcagcacaggccttgccgtctgccctgagtcagctccgagacacctgaagagccctccagccctaactactttactcagactaggtccccaggcctttgttcttgcctcttctcgctgagcctttcacttctcggcagatgtgaccgattggtagctccaccccaactcccttctgctgggtggaatgcaggagctagctgcctccaactcactgtgacctcagaaaaatgcctttattactcgggcctcagtttcctcgtctttaagtaaggggcttggatgagatgatttcaggaccctttccaataataaaatactgtgactgccaaaaaaaaaa

SEQ ID NO: 31242 - DNA, 7495 bp, Homo Sapiens
cacagagcgacagagacatttattgttatttgttttttggtggcaaaaagggaaaatggcgaacgactcccctgcaaaaagtctggtggacatcgacctctcctccctgcgggatcctgctgggatttttgagctggtggaagtggttggaaatggcacctatggacaagtctataagggtcgacatgttaaaacgggtcagttggcagccatcaaagttatggatgtcactgaggatgaagaggaagaaatcaaactggagataaatatgctaaagaaatactctcatcacagaaacattgcaacatattatggtgctttcatcaaaaagagccctccaggacatgatgaccaactctggcttgttatggagttctgtggggctgggtccattacagaccttgtgaagaacaccaaagggaacacactcaaagaagactggatcgcttacatctccagagaaatcctgaggggactggcacatcttcacattcatcatgtgattcaccgggatatcaagggccagaatgtgttgctgactgagaatgcagaggtgaaacttgttgactttggtgtgagtgctcagctggacaggactgtggggcggagaaatacgttcataggcactccctactggatggctcctgaggtcatcgcctgtgatgagaacccagatgccacctatgattacagaagtgatctttggtcttgtggcattacagccattgagatggcagaaggtgctccccctctctgtgacatgcatccaatgagagcactgtttctcattcccagaaaccctcctccccggctgaagtcaaaaaaatggtcgaagaagttttttagttttatagaagggtgcctggtgaagaattacatgcagcggccctctacagagcagcttttgaaacatccttttataagggatcagccaaatgaaaggcaagttagaatccagcttaaggatcatatagatcgtaccaggaagaagagaggcgagaaagatgaaactgagtatgagtacagtgggagtgaggaagaagaggaggaagtgcctgaacaggaaggagagccaagttccattgtgaacgtgcctggtgagtctactcttcgccgagatttcctgagactgcagcaggagaacaaggaacgttccgaggctcttcggagacaacagttactacaggagcaacagctccgggagcaggaagaatataaaaggcaactgctggcagagagacagaagcggattgagcagcagaaagaacagaggcgacggctagaagagcaacaaaggagagagcgggaagctagaaggcagcaggaacgtgaacagcgaaggagagaacaagaagaaaagaggcgtctagaggagttggagagaaggcgcaaagaagaagaggagaggagacgggcagaagaagaaaagaggagagttgaaagagaacaggagtatatcaggcgacagctagaagaggagcagcggcacttggaagtccttcagcagcagctgctccaggagcaggccatgttactggagtgccgatggcgggagatggaggagcaccggcaggcagagaggctccagaggcagttgcaacaagaacaagcatatctcctgtctctacagcatgaccataggaggccgcacccgcagcactcgcagcagccgccaccaccgcagcaggaaaggagcaagccaagcttccatgctcccgagcccaaagcccactacgagcctgctgaccgagcgcgagaggtggaagatagatttaggaaaactaaccacagctcccctgaagcccagtctaagcagacaggcagagtattggagccaccagtgccttcccgatcagagtctttttccaatggcaactccgagtctgtgcatcccgccctgcagagaccagcggagccacaggtacagtggtcccacctggcatctctcaagaacaatgtttcccctgtctcgcgatcccattccttcagtgacccttctcccaaatttgcacaccaccatcttcgttctcaggacccatgtccaccttcccgcagtgaggtgctcagtcagagctctgactctaagtcagaggcgcctgaccctacccaaaaggcttggtctagatcagacagtgacgaggtgcctccaagggttcctgtgagaacaacatctcgctcccctgttctgtcccgtcgagattccccactgcagggcagtgggcagcagaatagccaggcaggacagagaaactccaccagcagtattgagcccaggcttctgtgggagagagtggagaagctggtgcccagacctggcagtggcagctcctcagggtccagcaactcaggatcccagcccgggtctcaccctgggtctcagagtggctccggggaacgcttcagagtgagatcatcatccaagtctgaaggctctccatctcagcgcctggaaaatgcagtgaaaaaacctgaagataaaaaggaagttttcagacccctcaagcctgctggcgaagtggatctgaccgcactggccaaagagcttcgagcagtggaagatgtacggccacctcacaaagtaacggactactcctcatccagtgaggagtcggggacgacggatgaggaggacgacgatgtggagcaggaaggggctgacgagtccacctcaggaccagaggacaccagagcagcgtcatctctgaatttgagcaatggtgaaacggaatctgtgaaaaccatgattgtccatgatgatgtagaaagtgagccggccatgaccccatccaaggagggcactctaatcgtccgccagactcagtccgctagtagcacactccagaaacacaaatcttcctcctcctttacaccttttatagaccccagattactacagatttctccatctagcggaacaacagtgacatctgtggtgggattttcctgtgatgggatgagaccagaagccataaggcaagatcctacccggaaaggctcagtggtcaatgtgaatcctaccaacactaggccacagagtgacaccccggagattcgtaaatacaagaagaggtttaactctgagattctgtgtgctgccttatggggagtgaatttgctagtgggtacagagagtggcctgatgctgctggacagaagtggccaagggaaggtctatcctcttatcaaccgaagacgatttcaacaaatggacgtacttgagggcttgaatgtcttggtgacaatatctggcaaaaaggataagttacgtgtctactatttgtcctggttaagaaataaaatacttcacaatgatccagaagttgagaagaagcagggatggacaaccgtaggggatttggaaggatgtgtacattataaagttgtaaaatatgaaagaatcaaatttctggtgattgctttgaagagttctgtggaagtctatgcgtgggcaccaaagccatatcacaaatttatggcctttaagtcatttggagaattggtacataagccattactggtggatctcactgttgaggaaggccagaggttgaaagtgatctatggatcctgtgctggattccatgctgttgatgtggattcaggatcagtctatgacatttatctaccaacacatatccagtgtagcatcaaaccccatgcaatcatcatcctccccaatacagatggaatggagcttctggtgtgctatgaagatgagggggtttatgtaaacacatatggaaggatcaccaaggatgtagttctacagtggggagagatgcctacatcagtagcatatattcgatccaatcagacaatgggctggggagagaaggccatagagatccgatctgtggaaactggtcacttggatggtgtgttcatgcacaaaagggctcaaagactaaaattcttgtgtgaacgcaatgacaaggtgttctttgcctctgttcggtctggtggcagcagtcaggtttatttcatgaccttaggcaggacttctcttctgagctggtagaagcagtgtgatccagggattactggcctccagagtcttcaagatcctgagaacttggaattccttgtaactggagctcggagctgcaccgagggcaaccaggacagctgtgtgtgcagacctcatgtgttgggttctctcccctccttcctgttcctcttatataccagtttatccccattctttttttttttcttactccaaaataaatcaaggctgcaatgcagctggtgctgttcagattctaccatcaggtgctataagtgtttgggattgagcatcatactggaaagcaaacacctttcctccagctccagaattccttgtctctgaatgactctgtcttgtgggtgtctgacagtggcgacgatgaacatgccgttggttttattggcagtgggcacaaggaggtgagaagtggtggtaaaaggagcggagtgctgaagcagagagcagatttaatatagtaacattaacagtgtatttaattgacatttcttttttgtaatgtgacgatatgtggacaaagaagaagatgcaggtttaagaagttaatatttataaaatgtgaaagacacagttactaggataacttttttgtgggtggggcttgggagatggggtggggtgggttaaggggtcccattttgtttctttggatttggggtgggggtcctggccaagaactcagtcatttttctgtgtaccaggttgcctaaatcatgtgcagatggttctaaaaaaaaaaaaaaaaaaaaaaaaaaaaggaaaaaaaaaaagaaaaagaaaacgtgtgcattttgtataatggccagaactttgtcgtgtgacagtattagcactgcctcagttaaaggtttaatttttgtttaaacctagacgtgcaacaaaagttttaccacagtctgcacttgcagaagaaagaaaaaaattcaaaccacatgtttattttttttttgcctacctcattgttcttaatgcattgagaggtgatttagtttatatgtttttggaagaaaccattaatgtttaatttaatcttaataccaaaacgaccagattgaagtttgacttttattgtcacaaatcagcaggcacaagaactgtccatgaagatgggaaatagccttaaggctgatgcagtttacttacaagtttagaaaccagaatgctttgtttttaccagattcaccattagaggttgatggggcaactgcagcccatgacacaagatctcattgttctcgatgtagaggggttggtagcagacaggtggttacattagaatagtcacacaaactgttcagtgttgcaggaaccttttcttgggggtgggggagtttcccttttctaaaaatgcaatgcactaaaactattttaagaatgtagttaattctgcttattcataaagtgggcatcttctgtgttttaggtgtaatatcgaagtcctggcttttctcgttttctcacttgctctcttgttctctgtttttttaaaccaattttactttatgaatatattcatgacatttgtaataaatgtcttgagaaagaatttgtttcatggcttcatggtcatcactcaagctcccgtaaggatattaccgtctcaggaaaggatcaggactccatgtcacagtcctgccatcttactttcctcttgtcgagttctgagtggaaataactgcattatggctgctttaacctcagtcatcaaaagaaacttgctgttttttaggcttgatctttttcctttgtggttaattttcctgtatattgtgaaaatgggggattttccctctgctcccacccacctaaacacagcagccatttgtacctgtttgcttcccatcccacttggcacccactctgacctcttgtcagtttcctgttcctggttccatctttttgaaaaaggccctcctttgagctacaaacatctggtaagacaagtacatccactcatgaatgcagacacagcagctggtggttttgtgtatacctgtaaagacaagctgagaagcttactttttggggaagtaaaagaagatggaaatggatgtttcatttgtatgagtttggagcagtgctgaaggccaaagccgcctactggtttgtagttaacctagagaaggttgaaaaattaatcctacctttaaagggatttgaggtaggctggattccatcgccacaggactttagttagaattaaattcctgcttgtaatttatatccatgtttaggcttttcataagatgaaacatgccacagtgaacacactcgtgtacatatcaagagaagaaggaaaggcacaggtggagaacagtaaaaggtgggcagatgtctttgaagaaatgctcaatgtctgatgctaagtgggagaaggcagagaacaaaggatgtggcataatggtcttaacattatccaaagacttgaagctccatgtctgtaagtcaaatgttacacaaaaaaaaatgcaaatggtgtttcattggaattaccaagtgcttagaacttgctggctttcccataggtggtaaaggggtctgagctcacaccgagttgtgcttggcttgcttgtgcagctccaggcacccggtgggcactctggtggtgtttgtggtgaactgaattgaatccattgttgggcttaagttactgaaattggaacaccctttgtccttctcggcgggggcttcctggtctgtgctttacttggcttttttccttcccgtcttagcctcacccccttgtcaaccagattgagttgctatagcttgatgcagggacccagtgaagtttctccgttaaagattgggagtcgtcgaaatgtttagattcttttaggaaaggaattattttccccccttttacagggtagtaacttctccacagaagtgccaatatggcaaaattacacaagaaaacagtattgcaatgacaccattacataaggaacattgaactgttagaggagtgctcttccaaacaaaacaaaaatgtctctaggtttagtcagagctttcacaagtaataacctttctgtattaaaatcagagtaaccctttctgtattgagtgcagtgttttttactcttttctcatgcacatgttacgttggagaaaatgtttacaaaaatggttttgttacactaatgcgcaccacatatttatggtttattttaagtgactttttatgggttatttaggttttcgtcttagttgtagcacacttaccctaattttgccaattattaatttgctaaatagtaatacaaatgacaaactgcattaaatttactaattataaaagctgcaaagcagactggtggcaagtacacagcccttttttttgcagtgctaacttgtctactgtgtattatgaaaattactgttgtccccccacccttttttccttaaataaagtaaaaatgacacctaaaaaaaaaaaaaaaaaaaaaaaaaaaaaaaaaaaaa

SEQ ID NO: 31243 - DNA, 7171 bp, Homo Sapiens
cacagagcgacagagacatttattgttatttgttttttggtggcaaaaagggaaaatggcgaacgactcccctgcaaaaagtctggtggacatcgacctctcctccctgcgggatcctgctgggatttttgagctggtggaagtggttggaaatggcacctatggacaagtctataagggtcgacatgttaaaacgggtcagttggcagccatcaaagttatggatgtcactgaggatgaagaggaagaaatcaaactggagataaatatgctaaagaaatactctcatcacagaaacattgcaacatattatggtgctttcatcaaaaagagccctccaggacatgatgaccaactctggcttgttatggagttctgtggggctgggtccattacagaccttgtgaagaacaccaaagggaacacactcaaagaagactggatcgcttacatctccagagaaatcctgaggggactggcacatcttcacattcatcatgtgattcaccgggatatcaagggccagaatgtgttgctgactgagaatgcagaggtgaaacttgttgactttggtgtgagtgctcagctggacaggactgtggggcggagaaatacgttcataggcactccctactggatggctcctgaggtcatcgcctgtgatgagaacccagatgccacctatgattacagaagtgatctttggtcttgtggcattacagccattgagatggcagaaggtgctccccctctctgtgacatgcatccaatgagagcactgtttctcattcccagaaaccctcctccccggctgaagtcaaaaaaatggtcgaagaagttttttagttttatagaagggtgcctggtgaagaattacatgcagcggccctctacagagcagcttttgaaacatccttttataagggatcagccaaatgaaaggcaagttagaatccagcttaaggatcatatagatcgtaccaggaagaagagaggcgagaaagatgaaactgagtatgagtacagtgggagtgaggaagaagaggaggaagtgcctgaacaggaaggagagccaagttccattgtgaacgtgcctggtgagtctactcttcgccgagatttcctgagactgcagcaggagaacaaggaacgttccgaggctcttcggagacaacagttactacaggagcaacagctccgggagcaggaagaatataaaaggcaactgctggcagagagacagaagcggattgagcagcagaaagaacagaggcgacggctagaagagcaacaaaggagagagcgggaagctagaaggcagcaggaacgtgaacagcgaaggagagaacaagaagaaaagaggcgtctagaggagttggagagaaggcgcaaagaagaagaggagaggagacgggcagaagaagaaaagaggagagttgaaagagaacaggagtatatcaggcgacagctagaagaggagcagcggcacttggaagtccttcagcagcagctgctccaggagcaggccatgttactgcatgaccataggaggccgcacccgcagcactcgcagcagccgccaccaccgcagcaggaaaggagcaagccaagcttccatgctcccgagcccaaagcccactacgagcctgctgaccgagcgcgagaggtggaagatagatttaggaaaactaaccacagctcccctgaagcccagtctaagcagacaggcagagtattggagccaccagtgccttcccgatcagagtctttttccaatggcaactccgagtctgtgcatcccgccctgcagagaccagcggagccacaggttcctgtgagaacaacatctcgctcccctgttctgtcccgtcgagattccccactgcagggcagtgggcagcagaatagccaggcaggacagagaaactccaccagcagtattgagcccaggcttctgtgggagagagtggagaagctggtgcccagacctggcagtggcagctcctcagggtccagcaactcaggatcccagcccgggtctcaccctgggtctcagagtggctccggggaacgcttcagagtgagatcatcatccaagtctgaaggctctccatctcagcgcctggaaaatgcagtgaaaaaacctgaagataaaaaggaagttttcagacccctcaagcctgctggcgaagtggatctgaccgcactggccaaagagcttcgagcagtggaagatgtacggccacctcacaaagtaacggactactcctcatccagtgaggagtcggggacgacggatgaggaggacgacgatgtggagcaggaaggggctgacgagtccacctcaggaccagaggacaccagagcagcgtcatctctgaatttgagcaatggtgaaacggaatctgtgaaaaccatgattgtccatgatgatgtagaaagtgagccggccatgaccccatccaaggagggcactctaatcgtccgccagactcagtccgctagtagcacactccagaaacacaaatcttcctcctcctttacaccttttatagaccccagattactacagatttctccatctagcggaacaacagtgacatctgtggtgggattttcctgtgatgggatgagaccagaagccataaggcaagatcctacccggaaaggctcagtggtcaatgtgaatcctaccaacactaggccacagagtgacaccccggagattcgtaaatacaagaagaggtttaactctgagattctgtgtgctgccttatggggagtgaatttgctagtgggtacagagagtggcctgatgctgctggacagaagtggccaagggaaggtctatcctcttatcaaccgaagacgatttcaacaaatggacgtacttgagggcttgaatgtcttggtgacaatatctggcaaaaaggataagttacgtgtctactatttgtcctggttaagaaataaaatacttcacaatgatccagaagttgagaagaagcagggatggacaaccgtaggggatttggaaggatgtgtacattataaagttgtaaaatatgaaagaatcaaatttctggtgattgctttgaagagttctgtggaagtctatgcgtgggcaccaaagccatatcacaaatttatggcctttaagtcatttggagaattggtacataagccattactggtggatctcactgttgaggaaggccagaggttgaaagtgatctatggatcctgtgctggattccatgctgttgatgtggattcaggatcagtctatgacatttatctaccaacacatatccagtgtagcatcaaaccccatgcaatcatcatcctccccaatacagatggaatggagcttctggtgtgctatgaagatgagggggtttatgtaaacacatatggaaggatcaccaaggatgtagttctacagtggggagagatgcctacatcagtagcatatattcgatccaatcagacaatgggctggggagagaaggccatagagatccgatctgtggaaactggtcacttggatggtgtgttcatgcacaaaagggctcaaagactaaaattcttgtgtgaacgcaatgacaaggtgttctttgcctctgttcggtctggtggcagcagtcaggtttatttcatgaccttaggcaggacttctcttctgagctggtagaagcagtgtgatccagggattactggcctccagagtcttcaagatcctgagaacttggaattccttgtaactggagctcggagctgcaccgagggcaaccaggacagctgtgtgtgcagacctcatgtgttgggttctctcccctccttcctgttcctcttatataccagtttatccccattctttttttttttcttactccaaaataaatcaaggctgcaatgcagctggtgctgttcagattctaccatcaggtgctataagtgtttgggattgagcatcatactggaaagcaaacacctttcctccagctccagaattccttgtctctgaatgactctgtcttgtgggtgtctgacagtggcgacgatgaacatgccgttggttttattggcagtgggcacaaggaggtgagaagtggtggtaaaaggagcggagtgctgaagcagagagcagatttaatatagtaacattaacagtgtatttaattgacatttcttttttgtaatgtgacgatatgtggacaaagaagaagatgcaggtttaagaagttaatatttataaaatgtgaaagacacagttactaggataacttttttgtgggtggggcttgggagatggggtggggtgggttaaggggtcccattttgtttctttggatttggggtgggggtcctggccaagaactcagtcatttttctgtgtaccaggttgcctaaatcatgtgcagatggttctaaaaaaaaaaaaaaaaaaaaaaaaaaaaggaaaaaaaaaaagaaaaagaaaacgtgtgcattttgtataatggccagaactttgtcgtgtgacagtattagcactgcctcagttaaaggtttaatttttgtttaaacctagacgtgcaacaaaagttttaccacagtctgcacttgcagaagaaagaaaaaaattcaaaccacatgtttattttttttttgcctacctcattgttcttaatgcattgagaggtgatttagtttatatgtttttggaagaaaccattaatgtttaatttaatcttaataccaaaacgaccagattgaagtttgacttttattgtcacaaatcagcaggcacaagaactgtccatgaagatgggaaatagccttaaggctgatgcagtttacttacaagtttagaaaccagaatgctttgtttttaccagattcaccattagaggttgatggggcaactgcagcccatgacacaagatctcattgttctcgatgtagaggggttggtagcagacaggtggttacattagaatagtcacacaaactgttcagtgttgcaggaaccttttcttgggggtgggggagtttcccttttctaaaaatgcaatgcactaaaactattttaagaatgtagttaattctgcttattcataaagtgggcatcttctgtgttttaggtgtaatatcgaagtcctggcttttctcgttttctcacttgctctcttgttctctgtttttttaaaccaattttactttatgaatatattcatgacatttgtaataaatgtcttgagaaagaatttgtttcatggcttcatggtcatcactcaagctcccgtaaggatattaccgtctcaggaaaggatcaggactccatgtcacagtcctgccatcttactttcctcttgtcgagttctgagtggaaataactgcattatggctgctttaacctcagtcatcaaaagaaacttgctgttttttaggcttgatctttttcctttgtggttaattttcctgtatattgtgaaaatgggggattttccctctgctcccacccacctaaacacagcagccatttgtacctgtttgcttcccatcccacttggcacccactctgacctcttgtcagtttcctgttcctggttccatctttttgaaaaaggccctcctttgagctacaaacatctggtaagacaagtacatccactcatgaatgcagacacagcagctggtggttttgtgtatacctgtaaagacaagctgagaagcttactttttggggaagtaaaagaagatggaaatggatgtttcatttgtatgagtttggagcagtgctgaaggccaaagccgcctactggtttgtagttaacctagagaaggttgaaaaattaatcctacctttaaagggatttgaggtaggctggattccatcgccacaggactttagttagaattaaattcctgcttgtaatttatatccatgtttaggcttttcataagatgaaacatgccacagtgaacacactcgtgtacatatcaagagaagaaggaaaggcacaggtggagaacagtaaaaggtgggcagatgtctttgaagaaatgctcaatgtctgatgctaagtgggagaaggcagagaacaaaggatgtggcataatggtcttaacattatccaaagacttgaagctccatgtctgtaagtcaaatgttacacaaaaaaaaatgcaaatggtgtttcattggaattaccaagtgcttagaacttgctggctttcccataggtggtaaaggggtctgagctcacaccgagttgtgcttggcttgcttgtgcagctccaggcacccggtgggcactctggtggtgtttgtggtgaactgaattgaatccattgttgggcttaagttactgaaattggaacaccctttgtccttctcggcgggggcttcctggtctgtgctttacttggcttttttccttcccgtcttagcctcacccccttgtcaaccagattgagttgctatagcttgatgcagggacccagtgaagtttctccgttaaagattgggagtcgtcgaaatgtttagattcttttaggaaaggaattattttccccccttttacagggtagtaacttctccacagaagtgccaatatggcaaaattacacaagaaaacagtattgcaatgacaccattacataaggaacattgaactgttagaggagtgctcttccaaacaaaacaaaaatgtctctaggtttagtcagagctttcacaagtaataacctttctgtattaaaatcagagtaaccctttctgtattgagtgcagtgttttttactcttttctcatgcacatgttacgttggagaaaatgtttacaaaaatggttttgttacactaatgcgcaccacatatttatggtttattttaagtgactttttatgggttatttaggttttcgtcttagttgtagcacacttaccctaattttgccaattattaatttgctaaatagtaatacaaatgacaaactgcattaaatttactaattataaaagctgcaaagcagactggtggcaagtacacagcccttttttttgcagtgctaacttgtctactgtgtattatgaaaattactgttgtccccccacccttttttccttaaataaagtaaaaatgacacctaaaaaaaaaaaaaaaaaaaaaaaaaaaaaaaaaaaaa

SEQ ID NO: 31244 - DNA, 5363 bp, Homo Sapiens
cagccggcggcgggctgggtgtttgcaatacaaaggcggccacgcgcggcgccgctcggtgcagaccatgaattacgtggggcagttagccggccaggtgtttgtcaccgtgaaggagctctacaaggggctgaatcccgccacactctcagggtgcattgacatcattgtcatccgccagcccaatggaaacctccaatgctcccctttccacgtccgctttgggaagatgggggtcctgcgctcccgagagaaagtggttgacatagaaatcaatggggaatctgtggatttgcatatgaaattgggagataatggagaagcattttttgttcaagaaacagataatgatcaggaagttatccctatgcacctggccacctcccccatcctgtcagaaggagcttcgagaatggaatgccagctgaaaaggggctctgtggacaggatgagaggcctggaccccagcacgccagcccaagtgatcgctcccagcgagacgccgtcaagcagctctgtagtaaagaagagaagaaaaaggaggagaaagtcacagctggacagcctgaagagagatgacaacatgaacacatctgaggatgaggacatgttccccatcgagatgagctcggatgaggccatggagctgctggagagcagcagaactcttcctaatgatatacctccattccaagatgatattcctgaggaaaacctctccctggctgtgatttaccctcagtcagcctcataccctaattcggatagagagtggtcacccactcccagtccttccggttcccgaccttcaacacctaaaagtgattcagaattggtcagcaagtccacggaaaggacagggcagaagaacccagaaatgctttggctgtggggagagctgccgcaggctgctaagtcttcttctccacacaagatgaaagagtccagcccattgagcagtagaaaaatttgtgataaaagtcactttcaggccattcacagcgaatcttcagacacttttagtgaccaatcgccaactctggtcggtggggcacttttggaccagaacaagcctcagacagaaatgcagtttgtgaatgaagaagacctggagaccttaggagcagcagcgccactcttgcccatgatcgaggagctcaaacccccctctgccagtgtagtccagacagcaaacaagacggattctccttccaggaaaagagataaacgaagccgacatcttggtgctgacggcgtctacttggatgacctcacagacatggatcctgaagtggcggccctgtattttcccaaaaacggagatccttccggactcgcaaaacatgcaagcgacaacggagcccggtcagccaaccagtccccgcagtcggtgggcagctcgggcgtggacagtggcgtggagagcacctcggacgggctgagggacctcccttccatcgccatctccctctgcgggggcctcagcgaccaccgggagatcacgaaagatgcattcctggagcaagctgtgtcatatcaacagtttgtggacaaccccgctattatcgatgaccccaatctcgtggtaaagattgggagtaaatattataactggacaacagcagcacccctcctcctggcaatgcaggccttccagaaacctttgccaaaggccactgtggaatctatcatgagggataaaatgcccaaaaagggaggaagatggtggttttcatggaggggaagaaacaccacaatcaaggaggaaagtaagccagagcagtgcttggctggcaaggcccatagcaccggagagcaaccgccgcagctcagcttggccaccagggtaaagcatgaatcatcctccagtgatgaggagcgcgcagctgccaagccatcaaacgcaggccacctccctcttctgcctaatgtcagctacaagaagactctccggctgacttccgagcagcttaaaagcttgaagttgaagaatggccccaacgacgtggttttcagtgtcaccacgcagtaccaaggcacgtgccgctgtgagggcaccatctatctgtggaactgggatgataaagtcatcatttctgatattgatgggacaattaccagatcagatactcttggccacattttgcccacccttgggaaggattggacccatcagggcatcgctaagctgtaccataaagtgagccagaatggatataaatttctctactgttctgcccgtgccatcgggatggcggacatgacgcggggctacctgcactgggtcaacgagaggggcacggtgctgccccaggggcccctgctgctgagtcccagcagcctcttctctgccctgcacagagaagtgattgaaaagaagccagaaaagtttaaagtccagtgtttgacagacatcaaaaacctgtttttccccaacacagaacccttttatgctgcttttggaaaccgaccagctgatgtgtattcatacaagcaagtaggagtgtctttgaatagaatatttaccgtcaaccctaaaggagagctggtacaggaacatgcaaagaccaacatctcttcgtatgtgagactctgtgaagtagtcgaccacgttttcccgttgctgaaaagaagccattcttcagactttccctgttcggataccttcagtaacttcaccttttggagagagccactgccaccttttgaaaaccaggacattcattctgcctcagcgtaaaatgtcccaagcagcctcttgccagcagtgcagagcctggttgtcacccattaaaggataggtctccccggagtgcacagctccacctgggagcctggcgcgtcatcattggcctgacagcagagagaattgagaagcatttctcccctgccccaccccggggctgacatttctaagcaagataggaagggagcactttctaggctaggagttgggtgcatttgtaccgtgaaaagcattcctcagttgtggcttaatgccagttacgacgctgcctttccggcctgctccagcaagtagctactggttcacgtgcagtttggggctgtgaaacctaggcagaaggcggctgtctgagggctgtccccgcctaggacagggtcaatcgaggaatgccagatgtgcacggtttttggcaaagtagggggcacatttccattatagcaatgttagtgccaccaccttctgaacacagtggggagggctgtgaaggctcatgtgacctggatctgaggtctctgatagaaatctggacgccaccgggtccaggcctggcctcagacttggccttgtggatgggccccttacagtatttgctgactagtctcatttttaggtgataaatttttctttaattcctttggttaaagatagtctatttcattggcatatctccccccagtttttgtggctcaaggctggaatatttatgccttaatatatctatggcagacatttaagaatgcgctttatctagctcatggtaactttgcaacgccttagattaaaatgacagtaaatattactaaggcagtattttgaatgagtttgacactgccggcttccttccatccagcgaggtggtgctgacagtgtggacttgagcacacttatgccaaatgataatgatactgacttctgttgggagctctccaaagaaactggttggttttaagaaaatagtttcaagaagttcaactatattcttttagatattatgtattgttttactctgattaggttactgtgataggcatttattcatattctttctataccactgtcattaatatattaaaaagatgtatgtgttagactatcgaaagggccttattctctctttctcatagactgaccttcttttggaatttctgagtcatttattttccttagctttttccactcaaattaagggcaagcgaaaaagtaataatttggcattctttaagcctacagaatgtgattctttcacttgtttattacactggctcgtggacagaacaatttgaaaagtgaaagaattattttggtaaaagattttgctttacttttcgaagcattatttttttaaagagtgttttactccaacgattgaaacattttcctatttaaatttcattgttagaatcacaggaggcaaaaaatggaacggttgaatgaaattttactctttctgtgaaagaaaatccacagagttgttgcctccgttgtagttggtgggccccgttagcattggatgcctttgccaaatggttcatgtggacacacaaaggcaaacagatctgccatcgatcgcagatttctgtagaaacacggatgtgcatgtgcagattcccttttgcaggtattaaaaataattaaaaatagtcctgcctgaggttgcagtgagccgagcttgcactactgcactccagcctgggtgacagagtaagactccatgtcaaaaaaaaaaaaaaaaaaaaaaaagtcctgccttaactaactcctctgcgcttgttcactagtaacctaaagaggctatattcattctttatgcaatgagggtatttttgagtgaattttaactgctctgaactaagtataagctcatgggcctgcaaaggttcagacggtttctcctttgcacccaggaggaactttggctgcgagaatggggggatgtatccctcatgcagttggcatccaggcagccctctgcagcagcacaccctgcaggcggagttttcagaggatgcaattttggatcccgaattttgatgtaccttaaacttccacatcactgcaccctgaaacagagcatgctttccagaaagtcacactctcagatctgtgtcaagttcaatgtgagccctggcaaggctggcatattaacacctgccttctggcttctgaaagtgagatttgtatatgggctgcactcacgcatatacgagttggtttatctttgtgtacatgactataacccagtgatgctgaggtcatgtgctggaatgctgtatttggaccacacatttcaaagttgccctatggaaatgaatcctacttagtgacaagtcatcaaatgtttgtcacatgtgatgaagacaaatatgtatacctggcatagagaaaaatatatacctggtacattggagaaaaataattacactttcaaagagaattccctttgcaattttatgtttggatcaccactgtaagcacactttatttgcatttgatctgtatttgtatatgctgatgcaatgataaaaatcactgtaatacttcattgtgttgtactggatgcaaagctagaaaatattgcaataaatgagaccgatgaaagacttctctgaaaaaaaaa

SEQ ID NO: 31245 - DNA, 2448 bp, Homo Sapiens
agttctgcctctgtccaggtccttgtgacccgcccgctctcctaagggagcgtgtcctggccccctcccgcagcggctcggaaaaaaggcagcaccgcgtcgttgacggcgcgggctctggactcgctgcttggtaaaaaccttcctcttcctccagtgcgggacgcactctctggtatctcttttgacctcccggaggctttcctttgtcggtcgcggcgccactgtactatggcatacctcgttttattacgcttcgcagatagggcattctgaaaacaaatggagggtttgtggcagccctgagtccagcaattgtatcagcgccatttttccaacagcatgtgctcacttggtgtctctgtgttacattttggtaattctcaaaatatttaaaactttttcatgatttctgtgtctgttatggtgatctatgatcagtgatctttgatgttgctattgtcattgttttggggtgccacatacagcgtcttttataagacgtggaacttaatgttgtgtgtgttctgaccgctccacccacagaccgttccccatctctctccctcttcttgggcctccctattccctgagacacaacaatattgagattaggcgaattaatgactctgcaatggcctctaagtgctcaagtgaaaggaagagtcgcacatctctcactttaaatcaaaaactagaaatgattaaactgagtgaggaaggtatgtcaaaagccgagataggccgaaggctaggcctcctgcggcaaacagttagccaagttgtaaatgcaaaggaaaagttcttgaaggaagttaaaagtgctactccaatgaacacacgaatgataagaaagcgaaacagccttattgctgatatggagaaagttttagtggtctggatagaagatcagaccagccgcaacattcccttaagccaaagcctaatccagaacaaagccctaactctcttcaactctatgaaagctgagagaggtgtggaagctgcagaagaaaagtttgaagctagcagaggttggttcatgaggtttaaggaaagaagccatttccataacataaaagcacaaggtgaagcagcaagtgctgatgtagaagctgcagcaagttatccagaagctttagctaagatcattgacgaaggtggctacactaaacaacagattttcaatgtagatgaaacagccttctattggaagaagatgccatctagaactttcatagctagagaggagaagtcagtgcctggcttcaaagcttcaaaggacaggctgactctcttgttaggggctaatgcagctggtgactttaagttgaagccaatgcttatttaccattctgaaaatcctagggcccttaagaattatactaaatctactctacccgtgctatataaatggaacagcaaagcccggatgacagcacatctgtttacagcatggtttactgaatattttaaacccactgttgagacctactgctcagaaaagaagattcctttcaaaatattactgctcattgacaatgcccctagtcatccaagagctctgatggagatatacgaggagattaatgttattttcatgcctgctaacacaacatccattctgcagcccatggatcaaggggtaatttcgaccttcaagtcttattatttgagaaatacatttcataaggctctagctgccatggatagtgatgtctctgatggatctgggcaaagcaaattgaaaaccttctggaaaggattcaccattttagatgccattaaaaacattcgtgattcatgggaggaggtcaaattgtcaacattaacaggagtttggaagaagttgattcccaccctcattgatgactatgaggggttcaagacttcagtggaggaagtaagtgcagatgtggtggaaatagcaaaagaactagaattagaagtagagcctgaagatgtaactgaattgctgcaatctcatgataaaactttaacagatgaggagttgtttcttatggatgcgcaaagaaagtggtttcttgagatggaatctacacctggtgaagatgctgtgaacattgttgaaatgacaacaaaggatttagaatattacataaacttagttgataaagcagcagcagggtttgagaggattgactccaattttgaaagaagctctactgtgggcaaaatgctatcaaacagcatcgcatgctacagagaaatctttcatgaaaggaagagtcaactcatgcgaaaagcttcaccgatgtcttattttaggaaattgccacagccaccccaaccttcagcagccaccaccctgaccagtcagcaaccatcaacctcgaggcaagaccctccaccagcaaaaagagtacgactcaccgaaggctcagattgataatcagcattttttagcaataaagtatttttaaattt

SEQ ID NO: 31246 - DNA, 1823 bp, Homo Sapiens
ccgtccgcgcaggccctcggtccgctctgccctcggggtcgtggcgcccatccctcccctgttctgctgtcgccgcccggacaggggctcgggagccgggctgggggcaggggctggagccgcgggaccagcgcctgaggtgccccggagaggccatggagctgagcagcaagaagaagcttcacgccctgtccctggccgagaagatccaggtgctggaactcctggatgagtccaagatgtcccagtcggaggtggcccggcgcttccaggtttcccagccccagatctcgcgcatctgcaagaataaggagaagctgctggcggactggtgcagcggcacagccaaccgagagcgcaagcgcaagcgggagtccaagtacagcgggatcgacgaggctctgctctgctggtaccacattgcccgggccaaggcctgggacgtgacggggcccatgctgctccacaaagccaaggagctggccgatatcatgggccaggacttcgtgcccagcatcggctggctggtccgctggaaacgccgaaacaacgtcggctttggggcccgccatgttcttgcgccttcattcccccctgagccacctcccccggggctcacatcccaggctcagctgcctctttccctaaaagacttctctccagaggacgtgtttggctgtgctgaattgcccttgctgtatcgggcagtgcccggcagctttggtgcatgtgatcaagtacaggtgctgctgtgtgccaacagcaggggcaccgagaagcggcgggtactgctgggtgggctccaggctgccccgagatgcttctttgggatccgcagtgaggctctgcctgcctcctaccacccggacctgggcatcccctggttagagtggttggcacagtttgaccgggacatgggacagcagggccgacaggtggctttgctgctggctgcccgagtggtggaggagctggcaggcctgcctgggctctaccacgtgaagctcttgcctctggccgcctctagcaccacgcctcccctgcccagctcagtggtccgggcctttaaggcccattaccgacaccggctgttgggcaaactggctgccatccaaagcgagagggatggcacctcgctggccgaggccggggcaggcatcaccgtgctggacgccctgcacgtggcgtctgccgcctgggccaaggtgcctcctcagctcattttcagcagcttcattcaagaagggctggctcccggcaaaacgcccccgtcctcgcacaaaacctctgagatgccaccagtccccggcgggctgagcctggaggagttttcccgctttgtggacctggagggtgaggagccaaggtctggagtatgtaaggaggagataggcactgaagacgagaagggggacagagagggtgcctttgagcccctgcccaccaaagctgatgccctccgggccctgggcaccttgaggaggtggtttgaatgcaacagcacttctcctgagctattcgaaaaattctacgactgtgaggaggaggtggagcggctttgctgcctatgaaggcgccttcactgcttgccagagccccttcctctcttgtttcccatggaaacggcctcttcagaaggcagatcgggctgtctctttcctgtggaaatagaactgtcgtaaaggtgtagaagggagagaagttgggacaccaagtctgagcttggagtggcagtcgtccaaaccccaggaagagagctctaaagatggggcttcgggggtaggaatccaggatgcttagtttctagaccctgcttgaaagtt

SEQ ID NO: 31247 - DNA, 7343 bp, Homo Sapiens
agtctgcgggcctccggggctgcggcgaggccggagcgtcgcggcggagaggacgagaccgggacaagaccagggcaggagggagccggccagccgcgagaaccccgcacgcccggcaagatgctgtccttgcggctgcagacgggccccgagaaggccgagctccaggagctcaacgcccggctctatgactacgtgtgtcgggtgcgggagctggagcgcgaaaacctactcctggaggaggagctgcgcggccggcgcgggcgagagggcctgtgggccgaggggcaggcccgctgcgccgaggaggcgcgcagcttgcggcagcagctggacgagctgagctgggccactgcgctggcggagggcgagcgggacgctctgcggcgcgagctgcgggagctgcagcgcctggatgcggaggagcgcgccgcccgcggccgcctggacgccgagctgggtgcgcagcagcgcgagctgcaggaggcgctgggcgcgcgcgccgccctcgaggcgctgctgggccgactgcaggccgagcgccgaggcctcgacgcggcccacgaacgcgacgtgagggagctgcgcgcgcgcgccgccagccttaccatgcatttccgcgcccgcgccaccggccccgccgcgccgccgccacgcctgcgggaggtgcacgacagctacgcactgctggtggccgagtcgtggcgggagacggtgcagctgtacgaggacgaggtgcgcgagctggaggaggcgctgcggcgcggccaggagagcagactccaggcggaggaagagacgcggctgtgcgcgcaggaggcagaggcgctgcggcgcgaggcgctcgggttggagcagctgcgcgcgcggctggaggacgcgctgctgcggatgcgcgaggagtacgggatacaggccgaggagcggcagagagtgattgactgcctggaggatgagaaggcaaccctcaccttggccatggctgactggctgcgggactatcaggacctcctgcaggtgaagaccggcctcagtttggaggtggcgacctaccgggccttattggaaggagaaagtaatccagagatagtgatctgggctgagcacgttgaaaacatgccgtcagaattcagaaacaaatcctatcactataccgactcactactacagagggaaaatgaaaggaatctattttcaaggcagaaagcacctttggcaagtttcaatcacagctcggcactgtattctaacctgtcagggcaccgtggatctcagacgggcacatctattggaggtgatgccagaagaggcttcttgggctcgggatattcttcctcggccactacccagcaggaaaactcatacggaaaagccgtcagcagtcaaaccaacgtcagaactttctctccaacctatggccttttaagaaatactgaggctcaagtgaaaacattccctgacagaccaaaagccggagatacaagggaggtccccgtttacataggtgaagattccacaattgcccgcgagtcgtaccgggatcgccgagacaaggtggcagcaggtgcttcggaaagcacacggtcaaatgagaggaccgtcattctgggaaagaaaacagaagtgaaagccacgagggagcaagaaagaaacagaccagaaaccatccgaacaaagccagaagagaaaatgttcgattctaaagagaaggcttccgaggagagaaacctaagatgggaagaattgacaaagttagataaggaagcgagacagagagaaagccagcagatgaaggagaaggctaaggagaaggactcactgaaggagaagagtgtgcgagagagagaggtgccgattagtctagaagtatcccaggacagaagagcagaggtgtccccgaaaggtttgcagacgcctgtgaaggatgctggtggtgggaccggtagagaggcagaagcaagagagctacggttcaggttgggcaccagtgatgccactggttctctgcaaggcgattccatgacagaaaccgtagcagaaaacatcgttaccagtatcctgaagcagttcactcagtctccagagacagaagcatctgctgattcttttccagacacaaaagtcacttacgtggacaggaaagagcttcctggggaaaggaaaacaaagactgaaatacttgtggagtctaaactgactgaggatgttgatgtttccgatgaagctggcctggactaccttttaagcaaggatattaaggaagtggggctgaaaggcaagtcagccgagcagatgataggagacatcatcaacctcggcctgaaagggagggaggggagagcaaaggtcgtcaacgtggagatcgtggaggagcccgtgagttatgtcagcggggagaagccggaggagttttccgtcccattcaaagtggaggaggtcgaagatgtgtcgccaggcccctgggggttggttaaggaggaggaaggttatggagaaagcgatgtcacattctcagttaatcagcatcgaaggaccaagcagcctcaggagaacacgactcacgtggaagaagtgacagaggcaggtgattcagagggcgagcagagttattttgtgtccactccagatgaacaccccggggggcacgacagagatgacggctcggtgtacgggcagatccacatcgaggaggaatccaccatcaggtactcttggcaggatgaaatcgtgcaggggactcgaaggaggacacagaaggacggtgcagtgggcgagaaggttgtgaagcccttggatgtcccagcgccctctctggagggggacctgggttccactcactggaaagaacaagctagaagcggtgaatttcatgccgaacccacagtcattgaaaaagaaattaaaataccccacgaattccacacctccatgaagggcatctcctccaaggagccccggcagcagctggtggaagtcatcgggcagctggaggaaacccttcccgagcgcatgagggaggagctgtccgccctcaccagagaggggcagggtgggccggggagcgtttccgtggatgtcaagaaggtccagggtgctggtggcagttccgtgaccctggttgctgaagtcaacgtctcacaaactgtggatgccgatcggttagacctggaggaggtgagcaaagatgaggccagtgagatggagaaggctgtggagtcggtggttcgggagagcctgagcaggcaacgcagcccagcgcctggcagcccagatgaggaaggtggagcggaggccccggctgctggcattcgctttaggcgttgggccacccgggagctgtacatcccttcaggcgagagcgaggttgctggtggggcctctcacagctcgggacagcgcactccccagggcccagtgtcggccactgtggaggtcagcagccccacaggctttgcccagtcacaggtgctggaggatgtgagccaggctgcaaggcacataaaactcggcccctctgaagtctggaggactgagcgaatgtcatatgaaggacccactgcagaagtggtgggggtaagtgcgggaggtgacctaagtcaggcagcgagcccgaccggagccagccggtctgtgaggcatgtcacgctgggtcccggtcaaagtccactgtccagagaagtcatcttcctaggccctgcccctgcctgtccagaggcatggggctcgccagaacctggcccagcagagtcttctgcagatatggacggatcagggaggcacagcacatttggctgcagacaatttcatgctgaaaaggagattatttttcagggccccatttctgctgcagggaaggttggtgattattttgcaacagaagagtcagtgggtacccagacttctgtcaggcaactccagttaggccctaaagaagggttcagtgggcaaatccagttcacagctccactttcagacaaggtggagttgggtgtcacaggagattctgtacacatggaagggttgccagggagcagcacatccatcaggcacatcagcattgggcctcagaggcatcagaccacccagcagatagtttaccatgggctggttccccaactgggggaatctggtgactcagagagcactgtgcacggagagggctcagcagatgtgcaccaggccactcacagtcatacctcgggtagacaaaccgttatgactgaaaagagcaccttccaaagtgtcgtttctgaatctccccaggaggatagtgcagaggacacatcaggggcagaaatgacatcgggtgttagcagatcctttaggcacattcgactaggtcctacagaaacggaaacctctgaacacattgccatccgtggacccgtgtccagaacatttgtgcttgctggttcagcggactcccctgagctaggcaagttagcagacagcagcagaacgctaaggcacattgcaccagggcccaaagaaacttcgtttacctttcagatggatgtgagtaacgtagaggcgatccgcagccggacacaggaagcgggagctctcggtgtgtctgaccgtggttcctggagagacgcggacagtaggaatgaccaggcagttggtgtgagctttaaggcctctgctggggaaggagaccaggcccacagagaacagggcaaggagcaggccatgtttgataagaaggtgcagctccagagaatggtagaccaaaggtcggtgatttcagatgaaaagaaagttgccctcctctatctagacaatgaggaggaggagaatgatgggcattggttttaataagcagaaacattttgttttaatggcagcctgttggcgacgtgccaacatccaaaggccttaacttattttaagaggccgagggagtctatgaaaatctccccttttttacttttttaaagagtactcccggcatggtcaatttcctttatagttaatccgtaaaggtttccagttaattcatgccttaaaaggcactgcaattttatttttgagttgggacttttacaaaacacttttttccctggagtcttctctccacttctggagatgaatttctatgttttgcacctggtcacagacatggcttgcatctgtttgaaactacaattaattatagatgtcaaaacattaaccagattaaagtaatatatttaagagtaaattttgcttgcatgtgctaatatgaaataacagactaacattttaggggaaaaataaatacaatttagactctaaaaagtcttttcaaaaagaaatgggaaataggcagactgtttatgttaaaaaaattcttgctaaatgatttcatctttaggaaaaaattacttgccatatagagctaaattcatcttaagacttgaatgaattgctttctatgtacagaactttaaacaatatagtatttatggcgaggacagctgtagtctgttgtgatatttcacattctatttgcacaggttccctggcactggtagggtagatgattattgggaatcgcttacagtaccatttcattttttggcactaggtcattaagtagcacacagtctgaatgcccttttctggagtggccagttcctatcagactgtgcagacttgcgcttctctgcaccttatcccttagcacccaaacatttaatttcactggtgggaggtagaccttgaagacaatgaagagaatgccgatactcagactgcagctggaccggcaagctggctgtgtacaggaaaattggaagcacacagtggactgtgcctcttaaagatgcctttcccaaccctccattcatgggatgcaggtctttctgagctcaagggtgaaagatgaatacaataacaaccatgaacccacctcacggaagctttttttgcactttgaacagaagtcattgcagttggggtgttttgtccagggaaacagtttattaaatagaaggatgttttggggaaggaactggatatctctcctgcagcccagcaccgagatacccaggacgggcctggggggcgagaaaggcccccatgctcatgggccgcggagtgtggacctgtagataggcaccaccgagtttaagatactgggatgagcatgcttcattggattcattttattttacacgtcagtattgttttaaagtttctgtctgtaaagtgtagcatcatatataaaaagagtttcgctagcagcgcattttttttagttcaggctagcttctttcacataatgctgtctcagctgtatttccagtaacacagcatcatcacactgactgtggcgcactggggaataacagtctgagctagcaccaccctcagccaggctacaacgacagcactggagggtcttccctctcagattcacctggaggccctcagacccccagggtgcacgtctccccaggtcctgggagtggctaccgcaggtagtttctggagagcacgttttcttcattgataagtggaggagaaatgcagcacagctttcaagatactattttaaaaacaccatgaatcagatagggaaagaaagttgattggaatggcaagtttaaacctttgttgtccatctgccaaatgaactagtgattgtcagactggtatggaggtgactgctttgtaaggttttgtcgtttctaatacagacagagatgtgctgattttgttttagctgtaacaggtaatggtttttggatagatgattgactggtgagaatttggtcaaggtgacagcctcctgtctgatgacaggacagactggtggtgaggagtctaagtgggctcagtttgatgtcagtgtctgggctcatgacttgtaaatggaagctgatgtgaacaggtaattaatattatgacccacttctatttactttgggaaatatcttggatcttaattatcatctgcaagtttcaagaagtattctgccaaaagtatttacaagtatggactcatgagctattgttggttgctaaatgtgaatcacgcgggagtgagtgtgcccttcacactgtgacattgtgacattgtgacaagctccatgtcctttaaaatcagtcactctgcacacaagagaaatcaacttcgtggttggatggggccggaacacaaccagtctttttgtatttattgttactgagacaaaacagtactcactgagtgtttttcagtttcctactggtggttttgatattgtttgtttaagatgtatatttagaatgacatcatctaagaagctgattttgctaaactcctgttccctacaatgggaaatgtcacaagaatgtgcaaaaataaaaatctgagg

SEQ ID NO: 31248 - DNA, 3309 bp, Homo Sapiens
cgccgagtctgggcgcggggacgcggggcggcgcgaagcggggccctctgccgccccgcgctcccatgtacgccttttactcgttgctcatctacatcttctacagcctcttccgcagggatggtggcgccgcggcggccgcggagcccggggaccccgcccagagagcccgcaagccccggggtcgccggcgcccagacctgcccgcgccagagctgtggaccgagctgaccggcctggccgccagctccgagcctgaggatgggtcggaaggcgcagccgagggtcgcgcggccgcggtgtccctggaagaggccctactgcgcctcgccgagttcctctccgtccagctgggggcggaagagagctgcgggggcccggcggacctgggccagtctggcgaggtcccctcactgttgacagtgaccagtcagctcttggcccttctggcatggcttcgaagccccagggggaggcaggccctgctccaggggactcagccagcccctcgggtccggcccccctctccagatggatccacatcccaagaagaaagcccttcccacttcaccgcagtcccaggcgagccactgggggatgagacccagggacagcagcccctccagttggaggaggatcagagggcgtggcagcggctggagcagctcatcctgggacagctggaggagctgaagcagcagctggaacagcaggaggaggagttgggtcgactgcgcctgggcgtgggggcgacggactcagagaaaagggttcagcatctgactctggagaacgaggccctgaagcagagcctgagtctcatgcgggacctcctgctgcactggggccccgggccccccatcagggctccgcaggaggaggcggaggcattgctagagctccagggccggcttcaggaggcccaagacaccacagaagccctccgagcccagctgggggtgcaggaggtgcagctgcagggccttcaaggggccctccagcagctccagcaggagacggagcagaactgcaggcgtgagctacagcagatgcatgggcagctggcaggacttcgggcacggatggccagcctgcgtcagggctgcggggacctccgaggtttggtcagcacctttacccagagctgtcagggttcgctgagtgaggcccggggccaggtgtcctgggccttgggggcactgtcatctggagggcctggcactcagctccctgaggggcagcaagggcccccagccggatgcccagggcggctgccagaactcaagggaaatatccgtgtgctgtgtcggctgaggccagggacatcttctagccttgtgagtgtggagcctggcccagggggcaccgtcaccacctgctaccgggggcgccatcgtcgattccgcctagactgggtcttccctccagacgccagccaggaggaggtcttcagagagctggaacctgcggtgctgtcctgcctccgaggctacagcgtctgcatcttcacctatggccagacaggcaccgggaagacctacagcatggagggccctcctgaggaccccggcatagttcctagggcgctgcagtcgctgttccgggagatgggggccggccggcagcaccgggtgacactcagcatggtggagatctacaatgaggctgtcagggacctccttgctccagggcctcccgagcgcctggccgtgaggcagggcccagaaggccagggcgggatccaggtggctggcctcacccactgggacgtgcccaacctggagacattgcaccagatgctgaaactggggaggagcaaccgggccaccgccgccaccgccatgaaccagcgcagctcccgctcgcatgccctggtcacgctgacgctgcgcgcggcgtctccaccgcgcgctccaggcaccgcaggcacgctgcacctggtggacctggcgggatccgaacgcgcacggaaggcaggggcggccggcccgccgcggggagacccagacggcgcccggcgcctgcgggaggcccagaccataaaccgctcgctgctggcgctaggaggcgtgatggccgcactgcgggcccaccggccgcacgtgcccttccgcgactcgcagctcacgcgactgctgcagccggcgctgggcccaggcaccaccgcggtgctgctgctgcaggtgggcgccggggcggggcaggtgtgtgcgtgccggtcgccgcccacccgggcccgcccacccgcgcctcttgcccgcagatctccacgcggccggaggatctcggggagacagtctgctccctcaagttcgccgaccgagtgggtcaagtggagctggggccagcccggcgccgcagggtcccgcgctcctccgggacgccttcttccctcagcaccgacactccgctcaccgggaccccctgcacccctacgccgtcccctggcagtcctccatgccccagtcccgacaacggctcgggctcggctctcgcgcccgcagagggcctgcccctctagtcctgggtcgcggccctgcccatggggtctcaggccaggtctctgctggcagaggcggtagtaaagtccctgtaccccgtctcccagggcacaagctccctagcctctttggatccattgcccctgagctcccagagtcacccctccacctccgcagccagtgaagtgtgttgtgcctgctgaagtgatcaccccccgcccccagccctgcatcaggccacaggtcttggctttctccttatcaccatttgctgttatcacggcacacagcagggaatcccaggcccccccgccaagtggttacccaagtcaccactcctgacccaaaaatcaggcatggcattaaaacgttgcaaattcctttactgttatcccccccaccaccaggaccatgtagggtgcagtctttactccctaacccgtttcccgaaaaaggtgctacctcctttccagacagatgagagagggcaggacttcaggctggatccaccactgggctctccctcccccagcctggagcacgggaggggaggtgacggctggtgactgatggatgggtagtgggctgagaagaggggactaggaagggctattccaggctcagccctgctcctgcagctttgccgctgagtgtaggaaaaacaggcatgacagaccagggtgagggttgtgcccagctgggccacggccatgcgtggggtggcccaataaacaccgtggactcccaaaaaaaaaaaaaaaaaaaaaaaaaaaaaaaaaaaaaaaaaaaaaaaaaaaaaaaaaaaaaa

SEQ ID NO: 31249 - DNA, 4004 bp, Homo Sapiens
agcggagtgcagggatgtgcagatgagtgggctgtggggtgtcctgctcacggtttcatggatgaatggcttattcagaagagcataaaggtatgccctgtggtttcatccgccagaattccggcaactccatttccttggactttgagcccagtatagagtaccagtttgtggagcggttggaagagcgctacaaatgtgccttctgccactcggtgcttcacaacccccaccagacaggatgtgggcaccgcttctgccagcactgcatcctgtccctgagagaattaaacacagtgccaatctgccctgtagataaagaggtcatcaaatctcaggaggtttttaaagacaattgttgcaaaagagaagtcctcaacttatatgtatattgcagcaatgctcctggatgtaatgccaaggttattctgggccggtaccaggatcaccttcagcagtgcttatttcaacctgtgcagtgttctaatgagaagtgccgggagccagtcctacggaaagacctgaaagagcatttgagtgcatcctgtcagtttcgaaaggaaaaatgcctttattgcaaaaaggatgtggtagtcatcaatctacagaatcatgaggaaaacttgtgtcctgaatacccagtattttgtcccaacaattgtgcgaagattattctaaaaactgaggtagatgaacacctggctgtatgtcctgaagctgagcaagactgtccttttaagcactatggctgtgctgtaacggataaacggaggaacctgcagcaacatgagcattcagccttacgggagcacatgcgtttggttttagaaaagaatgtccaattagaagaacagatttctgacttacacaagagcctagaacagaaagaaagtaaaatccagcagctagcagaaactataaagaaacttgaaaaggagttcaagcagtttgcacagttgtttggcaaaaatggaagcttcctcccaaacatccaggtttttgccagtcacattgacaagtcagcttggctagaagctcaagtgcatcaattattacaaatggttaaccagcaacaaaataaatttgacctgagacctttgatggaagcagttgatacagtgaaacagaaaattaccctgctagaaaacaatgatcaaagattagccgttttagaagaggaaactaacaaacatgatacccacattaatattcataaagcacagctgagtaaaaatgaagagcgatttaaactgctggagggtacttgctataatggaaagctcatttggaaggtgacagattacaagatgaagaagagagaggcggtggatgggcacacagtgtccatcttcagccagtccttctacaccagccgctgtggctaccggctctgtgctagagcatacctgaatggggatgggtcagggagggggtcacacctgtccctatactttgtggtcatgcgaggagagtttgactcactgttgcagtggccattcaggcagagggtgaccctgatgcttctggaccagagtggcaaaaagaacattatggagaccttcaaacctgaccccaatagcagcagctttaaaagacctgatggggagatgaacattgcatctggctgtccccgctttgtggctcattctgttttggagaatgccaagaacgcctacattaaagatgacactctgttcttgaaagtggccgtggacttaactgacctggaggatctctagtcactgttatggggtgataagaggacttcttggggccagaactgtggaggagagcacatttgattatcatattgacctggatttagactcaaagcacatttgtatttgcctttttccttaacgtttgaagtcagtttaaaacttctgaagtgctgtctttttacattttactctgtcccagtttgaaacttaaaactcttagaatattctcttattatttatatttttatatttcttgaaagatggtaagtttcttgaagtttttggggcgtttctcttttactggtgcttagcgcagtgtctcgggcactctaaatattgagtgttatggaggacacagaggtagcagaatcccagttgaaaatgttttgatattttattgtttggcctattgattctagacctggccttaagtctgcaaaagccatctttataaggtaggctgttccagttaagaagtgggtgatgtagttacaaagataatatgctcagtttggacctttttttcagttaaatgctaaatatatgaaaattactatacctctaagtattttcatgaaattcaccagcagtttgcaagcacagttttgcaaggctgcataagaactggtgaatggggtaagcattttcattcttcctgctgaagtaaagcagaaagtactgcatagtatatgagatatagccagctagctaaagttcagattttgttaggttcaaccctatgaaaaaaactattttcataggtcaaaaatggtaaaaaattagcagtttcataagattcaaccaaataaatatatatatacacacacacatacatatacacctatatatgtgtgtatacaaacagttcgaatgtattttggtgacagtaataaatcaatgtgaggatggatagaatttagtatatgatagagaaaatgtcataaatggataaaaggaatttacaacttgaggagaaaacctttacaatttcctatgggtgtcagaagtactctcagcgaaaactgatggctaaaacagtatctactattctctgataactttttttttgagacagagtttcattgtcacccaggctggagtacagtggcatgatctcagctcactgcaaactctgcctcccgaattcaagtgattctcctgcctcagcctcctgagtagctgggattacaggcgcccgtcaccacacccaggtaatttttgtatttttagtagagacggagttttgccatgttggccaagctgatctcaaactcctgacctcaagtgatctgcccgcctcggcctcccaaagtgctgagattacaggcatgacccaccgcgtcaagcctctgacaactattgaatttgtaagctgctatgcaaatgggcatttatataaacttgtgatgtttcttgtcagaattctgagtactctgtgaagaacagaaatgatcatattcttatgcatctatctgtatgggtctgaaggtgtatatacaaactgagatgagtccttatgactcttgataagcctgagtttaacaacaacaaaaatgccaagttgtcctgagcccttctgcgttgttatgccacttccctactgctcatatgcacgctggctcccctgggcacgcaaggatgagtatgggccatgggcccctgtagagctgcttacctggtgatgaccatgcaccttacaatttctgaacagttaaccctatagaagcatgctttatatgagtgtcttctgggaagaggaaccttcttaatctcttctgtgggattttcaaaatgctaaagactcacactgcagcaatcatcccagatgattaaattcaaagaaataggttcacaacaggaatatactgaagaactagagtgtcactgctggtgaactgtggcacggttgctcaacacatcacctcggacaaattcaggaagcatttctttagcccacaagtccagacccaggtgctctgtatgtttgtttttaatattcatcatatccaagttcactctgtcttcctgagcagtggaagatcatattgctgtaacttcttttaagtagttgatgtggaaaacattttaaagtgaatttgtcaaaatgctggttttgtgttttatccaacttttgtgcatatatataaagtatgtcatggcatggtttgcttaggagttcagagttccttcatcatcgaaatagtgattaagtgatcccagaacaaggaatactagagtaaaaagcacctctttttcacaaaaaaaaaaaaaaaaaaaaaaaaa

SEQ ID NO: 31250 - DNA, 3674 bp, Homo Sapiens
gcagcagctgctgccactgctcagcgcggtgaggagggagccggtgactcggagacggtgactcagaggcagagcggcgcaagggccaaggagtactggcgtccatggaccctggggaccccgtcaggagcaggtgacatccttccccttccaccctgctccctgctctacatccccagcagggagtggcctctcccttctccatggacttccaagagagggacccgcccttcctgcctgagagcgctcagtcctcaaagcccagcagtgctcagcaggcctctgagctgtgggaggtggtggaggagcctcgggtcaggctggggacagagggtgtcatgcctgagaggcaggaaggtcacctgctcaagaagaggaagtggcctctgaagggctggcacaagagatactttgtgctcgaggacgggatccttcattatgcaacaacccggcaagacatcaccaaggggaagctccatggctccatcgatgtccggctgtcggtcatgtccatcaacaaaaaggcccagcgcattgaccttgacactgaagacaacatctaccacctcaagatcaaatcccaggacctattccagagctgggtggcgcagctgcgtgcccaccgcctagcccaccgcctggacatgccccgtggctcactgcccagtactgctcaccggaaggttcctggtgcccagcttccaacagcagctactgcctcagccctacctgggcttggaccgcgggagaaagtgtcttcctggctgagggacagtgatgggctggaccgctgctctcatgagctctctgagtgtcaggggaagctccaggaactacacaggctcctccagagcctggagtccctgcaccgaatcccctcagcccctgttatccccacacaccaggcctcagtgacaaccgaaagacccaagaaggggaaacggacaagccgcatgtggtgcacccagagctttgccaaggatgacaccattggacgggttggtcgtctccatggctctgttcccaacctgtctcgctacctggagtctcgggactcctcgggcacccgtgggctgccacccacagactatgcccacctgcagcgcagcttctgggccctggcccagaaggtgcacagctccctcagcagcgtcctggccgccctcaccatggaacgggaccaactgagggacatgcaccagggctcagagttgtcaagaatgggggtctctgaggcctccactggccagaggcgcctccactcactgtccacctcctccgacaccacggcggactctttcagctccctcaaccctgaggagcaagaagctctgtacatgaaggggcgcgagctcaccccccagctatcgcagaccagcatcctgtcccttgctgattcccacacggagttcttcgatgcctgcgaggttctcctctccgccagctcttctgagaatgagggctcagaggaggaggagtcctgtaccagtgaaatcaccaccagcctgtctgaggagatgctggacctcaggggagctgagcgctgtcagaaaggggggtgtgttccagggagacccatggggccaccccgccgtcgctgcctgccggcggccagcgggcctggggctgacgtgagcctgtggaacattctgcgcaacaacatcggcaaagacctgtccaaggtgtcaatgcctgtgcagctcaacgagccgctcaacactctgcagcggctctgcgaggagctggagtacagcagcctcctggaccaggccagccgcatcgccgacccctgcgagcgcatggtgtacatcgcagcctttgctgtctcggcctactcctccacataccaccgagccggctgcaagcccttcaaccctgtcctgggggagacctacgagtgtgagcggcctgaccgaggcttccgcttcatcagtgagcaggtctcccaccacccccctatctcggcctgccatgcagagtctgagaacttcgccttctggcaagatatgaagtggaagaacaagttctggggcaaatccctggagattgtgcctgtgggaacagtcaacgtcagcctgcccaggtttggggaccactttgagtggaacaaggtgacatcctgcattcacaatgtcctgagtggtcagcgctggatcgagcactatggggaggtgctcatccgaaacacacaggacagctcctgccactgcaagatcaccttctgcaaggccaagtactggagttccaatgtccacgaggtgcagggcgctgtgctcagtcggagtggccgtgtcctccaccgactctttgggaagtggcacgaggggctgtaccggggacccacgccaggtggccagtgcatctggaaacccaactcaatgccccccgaccatgagcgaaacttcggcttcacccagtttgccttggagctgaatgagctgacagcagagctgaaacggtcgctgccttccaccgacacgagactccggccagaccagaggtacctggaggaggggaacatacaggccgctgaggcccagaagagaaggatcgagcagctgcagcgagacaggcgcaaagtcatggaggaaaacaacatcgtacaccaggctcgcttcttcaggcggcagacggatagcagcgggaaagagtggtgggtgaccaacaatacctactggaggctgcgggccgagccaggctatgggaacatggatggggccgtgctctggtagccctggccccgggggcaggaggctctggttcctcactcctcctgcctccaccccctaccatggacacatgggtgaggccgggctccccgcctcactgcccttgagaccaaaggggcagccctggccctccctcccctctgctggccagagggtctgcatctcagcccacccccaaccccaccgtttggggtgagaagcagaatctgtgcttccccagtctccttgccccagacaaccagcatgtaagacccttcccgcttcaccattccgattcctgtcccctttggggtacttgggggagactctggctcccaggatctgttccctatttcagtgccttcctaggacacaggggactccttgacgctccccaggctttctgtgcccaggcctctgtccccagcggtgaggttgcagtgagtgaaggagaggaggtgatctgttctccctccccttctgcccatctccagcatcttcttccccttccctggccctgcagggccttctccagctccctttggttagtccctggccatccctcctgtcctggatcccttctccctaactgcaaaatgcctgcagcttccagctccttcgtccctgatcctcaagcggttccctcccgtctcagctcagcggatcccccagagtggaggaggcctctccatgaggaggggagcagcccaaggcacctgtcctctgacccaccggcagcgagtgcgcaggtgtgagtgtaagttcatgtaggagagtgtatgcgtgtgcgcctgtgccctgcttgcaggcaagcagggctccctcatgtagccccgccttccccctgctgggggtccaccacatcgctgctctttctcacagtctgcctctgatgagggcgaattgctatgacattccaagctccaataaagactgtcccagactttgaaaaaaaaaaaaaaaaaa

SEQ ID NO: 31251 - DNA, 4149 bp, Homo Sapiens
aaggcgctggcggccggcggctgccccagttctccgccgaggcggtgaggcgcctggccgggctgctccgcagggcactgatccgcgtggcccgcgaggcgcagcgcctgagcgtgctgcacgccaagtgcacccgctttgaggtgcagagcgccgtgcgcctggtgcacagctgggcgctggccgagagctgcgcgctggcagccgtcaaggcgctgtccctgtacagcatgagcgccggcgacgggctgcgccggggcaagtccgcgcgctgcggcctcaccttctcagtgggtcgctttttccgctggatggtggacacccgaatctccgtgcgcatccacgagtacgcagccatctccctcaccgcctgcatggagaacctggtggaggagatccgggccagggtgatggccagccacagccctgatggcggaggggccggaggcggggaggtgtctgctgaggccctggagatggtcatcaacaacgacgccgagctctggggcgtcttgcagccctatgagcatctcatctgcggcaagaacgccaatggtgtcctctccctccccgcatacttcagcccctacaacggcgggtccctgggccatgacgagcgagccgatgcctatgcccagctggagctccgaaccctggagcagtccctcctggccacctgcgtgggcagcatctcggagctgagtgacttggtctcccgtgccatgcaccacatgcaggggcgtcaccccctgtgcccgggtgccagccctgcccgccaggcccgccagccgccacagcccatcacttggtcccccgacgccctccacacgctctactactttctgcggtgtccacagatggagtccatggagaaccccaacctggaccccccgagaatgaccttgaacaatgaacggcccttcatgctgctgccgcccctcatggagtggatgcgcgtggccatcacctacgcagagcaccgccgcagcctcaccgtggacagcggcgacatccggcaggcagcccggctgctgctgcctggtctggactgtgaacctcggcagctcaaacccgaacactgtttcagttccttccggaggctggatgcccgagcagctactgaaaaattcaaccaggacctgggtttccgcatgctcaactgtgggaggacggacctcatcaaccaagccatcgaggccttgggtccggatggggttaacaccatggatgaccagggtatgacgccactgatgtacgcctgcgctgctggggacgaagcgatggtccagatgctgattgatgctggggcaaacttggacatccaggttccaagcaactcccccaggcacccttccatccaccccgacagccggcactggacctcactgacattcgctgtgctgcatggacacatctctgtggtccagttgctgctggatgctggtgcccatgtcgagggctcggcagtgaacggcggcgaggacagctatgcggagacgcccctgcagctggcctctgcggcagggaactatgagctggtcagtttgttgctgagccgaggcgccgaccccctcctcagcatgctggaggcccacggcatgggctcctccctccacgaggacatgaactgcttcagccactcagctgcccacggccacaggaacgtcctgaggaagctcctgacgcagccacagcaggctaaagcggacgtgctgtccctggaggagatcctggccgagggtgtggaggaaagtgatgcgtcgagccagggcagtggcagcgaggggcccgtgcggctgagccggacccgcaccaaggccctacaggaggccatgtactacagcgctgagcacggctacgtggacatcaccatggagctgagggcactgggagtcccctggaagctgcacatctggatcgagtctctgaggacctcgttctcgcagtcgcggtactcggtggtgcagagcctcctgcgggacttcagctccatcagagaggaggagtacaacgaggagctggtgaccgagggcttgcagctcatgttcgacatcctcaagaccagcaaaaacgactccgtcatccagcaactggctaccatcttcacccactgctatggcagcagtcccatccccagcatcccagagatccggaagaccctgccggccaggctagatccacactttttgaacaataaggagatgtcagatgtgaccttcctggtggaaggaaagctgttttatgcacataaagtcctgctggtgacagcttctaacaggttcaagacactaatgaccaataaatcagaacaggatggggacagcagcaagaccatcgagatcagcgacatgaagtaccacatttttcagatgatgatgcagtatctgtactacggaggaacagaatccatggagatccccaccactgacatcctggagctgctgtcagctgccagcctgttccagctggatgccctgcagaggcactgcgagatcctgtgctcccagaccctcagcatggagagtgccgtgaacacctacaaatatgccaagatccacaatgccccagaactggccctgttctgtgagggcttcttcctcaagcacatgaaggccctactggagcaggatgccttccggcagctcatctacggccgcagcagcaaagtgcagggcctggatccactgcaggacctgcagaacaccctggcagagcgcgtgcactctgtctacatcacctcccgggtgtgaggcagggggcggaggctgccgaggccagggcctgtggaggtgccagggcccaccatgtcggggtatggttgtaggccctcttggagccaggttcacggggctgtttcctcctcctcccccagatgtcccccctgtcaccgggcagctcaccctcatctcctctgccctagagctgtttgttcaatcactgatgggcaaaggggagatgtagctaactggtggccctcctccccatctcagtttgcaactcaagggcagccatgcactccccctgggtgtcgctctcccctcctgcaggtcagcagctgatcctgatccacctccgcccaggccctccaagctctactcacccctagggcctcagtaaactcagaccatcccaactggggctcctgggggtacaggaatccttatgaatgtatagaatgcatactgcctaggcccccagtcgtctgcagtaattcaaaagctggtatttttcttcctaaatgtcacatagcaaaggctgcccaaatccccaaacttgttcttcaaaggtttgacaggcttaatgtgggcatccagtggcctgtggacccccccctgccaccacgactgctgccacccggagttcccccattgtctttggtgcctgggcttccagagtccctcccatcaggactaccagcttgctcagttagcagcagagggcagttccccagcttgatggtttctgagctaagtctggcatggaggggcaaggggtaggggatggggtgctgtgtaggaatggcctcagctcttgttttgctgctggttttaggggccaaagtaaatgggtggattctggaacctcaggcctagactaggttgcctttgtgggggcgatgaagcagagtcccctggtcaagtctctcggctcctttaatgtaggattgagagctgggcaaacaggtcccactggggactgtgactcttggagattaaaggacagggcattgatggaaggtaagggccaggagaagaggcctttctgctgtgtcccctcacggccttgccctcgaattctgcaggccctgggctcccctgacacctgtcatatttatggaccagacactggggcagcatcaggcacagtctgtctgggtgcaacttcttcagctgtctggccgcaccttaaaaactatttattcaccaaaagccccaggcatttcagaaggtggcactcaggtcaccctgaaaagcccccaggggcttgcaattctggaaaatattttgactagctgcttggctggatgtacaaagaaataggcattattttattgctgtaatattgtatgatactttaactgtacaataatgttgtcacttactgtaaatgtactatggttttattaacaataaacactcattaacaatg

SEQ ID NO: 31252 - DNA, 3770 bp, Homo Sapiens
cggacgcgtgggctgctgggcccggtggccgcaaaagaactttctttctcccgcccgaacggtcgccgcggccaactgcctcgcccgcctggcagcctaaccctccttctcttcttctcctctccggcttcgcgcggccctgcctccctctcgcccggcggcatccgcttgctgctgccaccgcctcctcatcttctgcccggccaaccggcctgccccgctgcagtgatgtgcgacaaggagttcatgtgggccctgaaaaacggagacttggatgaggtgaaagactatgtggccaagggagaagatgtcaaccggacactagaaggtggaaggaaacctcttcattatgcagcagattgtgggcagcttgaaatcctggaatttctgctgctgaaaggagcagatattaatgctccagataaacatcatattactcctcttctgtctgctgtctatgagggtcatgtttcctgtgtgaaattgcttctgtcaaagggtgctgataagactgtgaaaggcccagatggactgaccgcctttgaagccactgacaaccaggcaatcaaagctcttctccagtgatggatggatggactgataactccggaagaatgactctcctgtggcctcacactgctgcctgtctgtctgtcactctctatctgccagcttcttcagctaaatactttaagaggggtgaggggagagagaaattcataacaaatccgactaccagaaaaaaaaaattgttttggaggaggggcaaaaggaaccatgatcaggcttttactgggattcctgatcaagtaagcctcttccctttctaataaaatatacaccttatacccaagggagagcaaagacaaaatacaccagtaacatttgaccttttcagctccctagctaatttattagattgtgttgaaggtctgattctacaaaggccaactctacatatttggtagccctaactgtctgagcagtagtggctgctgtgatgtaaacttagggtgctgagataagcaattagctctagccttctgccttaagaatgcactctactggggatttcctggcatagttaagagcgctgcctataaggttggtgaccaaatctttcctcggtgactttaagctttatgtgaaagcttagttaaggtgaggaggggcacactcctaaattgctggatgactgaactttggattttctctcccctttcacatggatttcatgtctctttagataaaactgactagttttatttataaaatcttaagttttggaagtctaaaggagaaaccattccagtatgcatatttttttctcctctagattcatacatttatatagcattgaaacactttcaaactcctgctggtagtaaaaggggatttaaaaatagaatcatagccataagcctgttagtatcatatgaagagagaacagttatcttagtacctatggattttctttatttgctgtttgaatggattgaccttggttatgtgttgagaattaaggaacattctttgaaatgcctctctcagacccatcttggaggctgattacttactgcaccaaagctatcactggggtgagatttactgtttggacaaatttagccccatcccttcaaaaatacacttgtaaccaggtttcccagagttgttgataggcttctgctgaacatatgccaacccacctgcataatatatttttgttgcttttataaatcatgcattacataaagtgtgacaacttcaaaatgtattctctgttcttggaatacagtgccctaaaatggtgttcttatgacctgcagaaaatatttacacatatttccaaatatttatttcatgagcagtacagctaattaaaatatataagcttaaattttatatcttacatttaaaatattaagattcctttgacttgccatccatataagcttgctaaaaatattaagaccaagtcatgcaataattgaatgtacctcaaatttttaggggagggtgggttagggactgatactcagattgtggataataattgaattggtttttaaaggcaacatagcattctacagcagggttaatctattatcaagaacagtcaccctggttaataacaagttttactgatcagttgctggttggttggttggttggcatgtgggtgtgtgggtgtataggtgtgtgtgggtgtgtgtgtgtatttttccccatgagtcctttttttaatcctgtggctttttcacttacaactagcctaaccctgtaattttcctacatccaagaaaacaatcacaaagtagtggtttaaatactttgttgtatttggctaattttgctgtcttaatgcagcctattaagagttgggttaaaaatcagtaatcagtactttattacatcactgaactaaaatatggagacatcctcattgaaaatggagggcactctatcagtctataactatcaacgtagtgcaacagggtgttttgatacctttgttttcacctcttgacataatgctatttaaaggcttgaatttttccctttatataattttcacctttactttcaaagtgttttgttgtagttggctattgcagagagtgcattgtcctatcattcctaaacctggtctgctttctacattcatggtatggaaaccatgtgattctttgtacagtttatcctgatgttgcttgtaatgcagtagaggctatttcgccttcgcttttctttctcgacctttttgtaaaccctataattatgaagcgattgcttgagaaaataacatataaacatagaatagaatagactgaccaagatggttcacagtttctttttttaactaggttatttataatgtatttctgaaccacttggcagacaaattcacaacacttaatgttcatattttgagtaaaggaagctaaaaccatgtttgctttctggtactacatgcattagcgaaaggttaagtaagttttgttctccactgaagtaatacttaacatctcagaaaaaattttgcatgttctgtagttttgtattaaatcagtcatttcatatgcactatatcaagtacaaacaggtagtttacctgtttatagtagtgtactaacaaagtctcccttgcagcttcagactgttatctataggcttatcgttcaaatacagcacttgaatatcccaagtagttcttctacgcatagctcacctttctaaacccagttaagcatggaagagaggtagtaggtaggtgcagtgtgtggaagctgcaaacaagtaggccttttattcattgatatcttttcccaagtactggattttaaatctgtatgtatctgtttgatttttttttctaatatttcagttgagctgctgttttcttccatgcaatattgtatactcaattgtgtatagaagaagctggtgagagtgccctcctacataaataagcaattgcagtgttttgcatgcaaaatataaaaaatttaaattgtcctgattctattttgtaaatggagaaacaatcatatctttctaagcggtaatggaggaagactagtgctttgtgcattttgatatatttgagttcattttttccacaatgtcatacttttgacgcagttgggtttctcataagtatcctagttcatgtacatccgaatgctaaataatactgtgttttaagttttgtgttgcaagaacaaatggaataaacttgaattgtgctacgaaaaaaaaaaaaaaaaaaa

SEQ ID NO: 31253 - DNA, 2953 bp, Homo Sapiens
atggcggaccttgattcgcctccgaagctgtcaggggtgcagcagccgtctgagggggtgggaggtggccgctgctccgaaatctccgctgagctcattcgctccctgacagagctgcaggagctggaggctgtatacgaacggctctgcggcgaggagaaagtggtggagagagagctggatgctcttttggaacagcaaaacaccattgaaagtaagatggtcactctccaccgaatgggtcctaatctgcagctgattgagggagatgcaaagcagctggctggaatgatcacctttacctgcaacctggctgagaatgtgtccagcaaagttcgtcagcttgacctggccaagaaccgcctctatcaggccattcagagagctgatgacatcttggacctgaagttctgcatggatggagttcagactgctttgaggagtgaagattatgagcaggctgcagcacatattcatcgctacttgtgcctggacaagtcggtcattgagctcagccgacagggcaaagaggggagcatgattgatgccaacctgaaattgctgcaggaagctgagcaacgtctcaaagccattgtggcagagaagtttgccattgccaccaaggaaggtgatttgccccaggtggagcgcttcttcaagatcttcccactgctgggtttgcatgaggagggattaagaaagttctcggagtacctttgcaagcaggtggccagtaaagctgaggagaatctgctcatggtgctggggacagacatgagtgatcggagagctgcagtcatctttgcagatacacttactcttctgtttgaagggattgcccgcattgtggagacccaccagccaatagtggagacctattatgggccagggagactctataccctgatcaaatatctgcaggtggaatgtgacagacaggtggagaaggtggtagacaagttcatcaagcaaagggactaccaccagcagaactttgttttttccttcttttgagcagagaaagtaaaagtacgacatagaaataggagtggcctcatacaattgtatttctagaactccagactaggagactataaacagtagtctattggaacaccattagcatgacttttaagcacagtaatagagttccggcatgttcagaacaacctgatgagaaattctacaacagaaaaaatcgaaccaagagaactggaccccatcctgactgaggtcaccctgatgaatgcccgcagtgagctatacttacgcttcctcaagaagaggattagctctgattttgaggtgggagactccatggcctcagaggaagtaaagcaagagcaccagaagtgtctggacaaactcctcaataactgccttttgagctgtaccatgcaggagctaattggcttatatgttaccatggaggagtacttcatgagggagactgtcaataaggctgtggctctggacacctatgagaagggccagctgacatccagcatggtggatgatgtcttctacattgttaagaagtgcattgggcgggctctgtccagctccagcattgactgtctctgtgccatgatcaacctcgccaccacagagctggagtctgacttcagggatgttctgtgtaataagctgcggatgggctttcctgccaccaccttccaggacatccagcgcggggtgacaagtgccgtgaacatcatgcacagcagcctccagcaaggcaaatttgacacaaaaggcatcgagagtactgacgaggcgaagatgtccttcctggtgactctgaacaacgtggaagtctgcagtgaaaacatctccactctgaagaagacactggagagtgactgcaccaagctcttcagccagggcattggaggggagcaggcccaggccaagtttgacagctgcctttctgacttggccgccgtgtccaacaaattccgagacctcttgcaggaagggctgacggagctcaacagcacagccatcaagccacaggtgcagccttggatcaacagctttttctccgtctcccacaacatcgaggaggaagaattcaatgactatgaggccaacgacccttgggtacaacagttcatccttaacctggagcagcaaatggcagagttcaaggccagcctgtccccggtcatctacgacagcctaaccggcctcatgactagccttgttgccgtcgagttggagaaagtggtgctgaaatccacctttaaccggctgggtggtctgcagtttgacaaggagctgaggtcgctcattgcctaccttaccacggtgaccacctggaccatccgagacaagtttgcccggctctcccagatggccaccatcctcaatctggagcgggtgaccgagatcctcgattactggggacccaattccggcccattgacgtggcgcctcacccctgctgaagtgcgccaggtgctggccctgcggatagacttccgcagtgaagatatcaagaggctgcgcctgtagctgcctggatgagcacacctggctcatcacacttgcaggcctgttccctaaggggccccagccaaggagctgagcgaggctgtctggcttgggggagatctgacagcccagacctttctacggctggcagcagagaaacaaagtctggacccactccatgctctgccctcagacctggccaggtgatgctctgggggcagcatctccccaccgagagaagcgggctcctaatgaggtgggaaagccacggcaggcagcgagcagcccaggccagctttctgcatggatggtcagtctcttgccctcaaacactacagcaaacaagctacccctgccagtcctagacaacttgggtacatctggggacctagcagttaggcttgactttgaggagaggctgtgatgtttatgatccctgaataaagctactccttgg

SEQ ID NO: 31254 - DNA, 1212 bp, Homo Sapiens
tgcaaggtgggaagtgaagtcagtgcctcagttgctgatcagtgtgttttttgtgtccaattcttttatcaccaaaaaagagaagaaatattgcagtgaatgaagattcctctgcattttagcactgctttttcaactgtagttggcttttgaatgaggatgacaatggaagagatgaagaatgaagctgagaccacatccatggtttctatgcccctctatgcagtcatgtatcctgtgtttaatgagctagaacgagtaaatctgtctgcagcccagacactgagagccgctttcatcaaggctgaaaaagaaaatccaggtctcacacaagacatcattatgaaaattttagagaaaaaaagcgtggaagttaacttcacggagtcccttcttcgtatggcagctgatgatgtagaagagtatatgattgaacgaccagagccagaattccaagacctaaacgaaaaggcacgagcacttaaacaaattctcagtaagatcccagatgagatcaatgacagagtgaggtttctgcagacaatcaaggatatagctagtgcaataaaagaacttcttgatacagtgaataatgtcttcaagaaatatcaataccagaaccgcagggcacttgaacaccaaaagaaagaatttgtaaagtactccaaaagtttcagtgatactctgaaaacgtattttaaagatggcaaggcaataaatgtgttcgtaagtgccaaccgactaattcatcaaaccaacttaatacttcagaccttcaaaactgtggcctgaaagttgtatatgttaagagatgtacttctcagtggcagtattgaactgcctttatctgtaaattttaaagtttgactgtataaattatcagtccctcctgaagggatctaatccaggatgttgaatgggattattgccatcttacaccatatttttgtaaaatgtagcttaatcataatctcacactgaagattttgcatcacttttgctattatcattcttttaagaattataagccaaaagaatttacgccttaatgtgtcattatataacattccttaaaagaattgtaaatattggtgtttgtttctgacattttaacttgaaagcgatatgctgcaagataatgtatttaacaatatttggtggcaaatattcaataaatagtttacatctgttaaaaaaaaaaaaaaaaaaaaa

SEQ ID NO: 31255 - DNA, 1231 bp, Homo Sapiens
gccagaggcgaccggaaggatctttctagtccagcccctcgctttacccggacgaaagacacgggcctgattcgtcgagtctcactgagccttagtcgtcggcaggtcccaggcgcgaagtttctcggcctggaggagggggtcgcgcgaagtgccagatgcaggcggggaagcccatcctctattcctatttccgaagctcctgctcatggagagttcgaattgctctggccttgaaaggcatcgactacgagacggtgcccatcaatctcataaaggatgggggccaacagttttctaaggacttccaggcactgaatcctatgaagcaggtgccaaccctgaagattgatggaatcaccattcaccagtcactggccatcattgagtatctagaggagatgcgtcccactccgcgacttctgcctcaggacccaaagaagagggccagcgtgcgtatgatttctgacctcatcgctggtggcatccagcccctgcagaacctgtctgtcctgaagcaagtgggagaggagatgcagctgacctgggcccagaacgccatcacttgtggctttaacgccctggagcagatcctacagagcacagcgggcatatactgtgtaggagacgaggtgaccatggctgatctgtgcttggtgcctcaggtggcaaatgctgaaagattcaaggtggatctcaccccctaccctaccatcagctccatcaacaagaggctgctggtcttggaggccttccaggtgtctcacccctgccggcagccagatacacccactgagctgagggcctagctcccaaatcctgccccgttggcacagggccacaggagcagaagctgggtgggctgaagaggcctggaaacgagagtcttaattgaggagatgggagactcgaactctagccctggatctgccttcctgctgaaacttgttccacctcagtcccctcatctgtcacacgcatgtggggtggagtagggagatgcggggagcagggtgggcaggaatactgttatctatgtgacggggcagtcgtgaggctgagatgagaatgcggattaaaatgcctggcgtgctcaccgtaacaccacggggaaggctgtgtgccttttctcatccgcttttgttgtgtgtgactccaaagaatgcccgcgctgaaatttggcgtgaattaaactgaagcccaggcctctaaaaaaaaaaaaaaaaaaaaa

SEQ ID NO: 31256 - DNA, 3589 bp, Homo Sapiens
cggacgcggccgccgccgtcgccgccatctgtcacctccactccggcatcagcagccagtcgcccgtgtcccgcctgtctcctcggcggagcctgctgcccgtcctgccacctctctgctctgttcttgtctctgccttcattcccgaatggatctggtaggagtggcatcgcctgagcccgggacggcagcggcctggggacccagcaagtgtccatgggctattcctcaaaatacaatatcttgttctttggctgatgtaatgagtgaacagctggccaaagaattgcagttagaagaagaagctgccgtttttcctgaagttgctgttgctgaaggaccatttattactggagaaaacattgatacttccagtgaccttatgctggctcagatgctacagatggaatatgacagagaatatgatgcacagcttaggcgtgaagaaaaaaaattcaatggagatagcaaagtttccatttcctttgaaaattatcgaaaagtgcatccttatgaagacagcgatagctctgaagatgaggttgactggcaggatactcgtgatgatccctacagaccagcaaaaccggttcccactcctaaaaagggctttattggaaaaggaaaagatatcaccaccaaacatgatgaagtagtatgtgggagaaagaacacagcaagaatggaaaattttgcacctgagtttcaggtaggagatggaattggaatggatttaaaactatcaaaccatgttttcaatgctttaaaacaacatgcctactcagaagaacgtcgaagtgcccgcctacatgagaaaaaggagcattctacagcagaaaaagcagttgatcctaagacacgtttacttatgtataaaatggtcaactctggaatgttggagacaatcactggctgtattagtacaggaaaggagtctgttgtctttcatgcatatggagggagcatggaggatgaaaaggaagatagtaaagttatacctacagaatgtgccatcaaggtatttaaaacaacccttaatgaatttaagaatcgtgacaaatatattaaagatgatttcaggtttaaagatcgcttcagtaaactaaatccacgtaagatcatccgcatgtgggcagaaaaagaaatgcacaatctcgcaagaatgcagagagctggaattccttgtccaacagttgtactactgaagaaacacattttagttatgtcttttattggccatgatcaagttccagcccctaaattaaaagaagtaaagctcaatagtgaagaaatgaaagaagcctactatcaaactcttcatttgatgcggcagttatatcatgaatgtacgcttgtccatgctgacctcagtgagtataacatgctgtggcatgctggaaaggtgaggagcacattttgttaacattcagatttaattactgtaagtaaaatttaaaatgtaaatacatcagttcatgttctgtattgaaataggtctggttgatcgatgtcagtcagtcagtagaacctacccaccctcacggcctggagttcttgttccgggactgcaggaatgtctcgcagtttttccagaaaggaggagtcaaggaagcccttagtgaacgagaactcttcaatgctgtttcaggcttaaacatcacagcagataatgaagctgattttttagctgagatagaagctttggagaaaatgaatgaagatcacgttcagaagaatggaaggaaagctgcttcatttttgaaagatgatggagacccaccactactatatgatgaatagcactaatacccactgcttcagtgttaacacagcagtgattgtcagctgccaatagcaaatgaagttatgggtgacttgaaataccaaaacctgaggagtgggcaatggtgcttctgtgcttttcccccttgtaacccatgtgccagatgtgtggaatttttagctcagcattgagagaataaaatgtcactacctctcatcttatgaacaggataatataattctttaacagctataggttatctggctgaagtagacctaattttatgtgacttgtggtgtaaaatgtcttgatgataatttttaaaacttgggtaacacttccaaatatgggaggaaaggacagatgtgtttacaagggaggattttacaacatacttgctttattcacctccctgttttgtgttgcgtctttccttgaatattttattggcccagagttagcctttctcaattatgtttccagactgtggccgtgattctaaaggaaaatgtgtgctctttagtgggtagaacaaatggaaatttggtttcagaatggctgacagaaatcgacataagtcatgtaatttttgttgatatatcatgaaaatgaacagaattctttttccatacttatatctaagaaaaggcatcataggtttctgaaagagataactatataacagctttttaactatccagtcaactttcagcttttctacatttaggtaaaatggttaggatataactcatggtgtggctaatctacatttatcaataaaatgtaaattatctgaaaggacagaatataagatttaaccatgtttgacgtattttaatttagttaatgaagcaaaattcagtttatatttcactagaactgtgtacttgattgattttcagagaaatatcacaaattagaaatattaaatctaaggatgaaaggtatatataaaacaatttgggggccaggcacgatggctcaaacctgtaatcccagcactttgggagaccaaggcgggtggatcacttgaggtcaggagttcaagaccagcctgggcaacatggcgaaaccctgtctctactaaaaatacaaaaattagccgggtgtggtggcacttctctgtaatctcagcttctcaggaggctgagacaggagaatcgcttgaacccgggaggcagaggttgcagtgagctgagatcatgccactgcactccggcctaggtgacagagggaaactccatctccaggaaaaaaaaaaaaaaacccaatttggataccaaattaatcaactaatttgagctatctggccttactcttagtagtttttagtacgtgctggacaccacttttaaaaagcaatcactgtgctagaaaagtatattggctttgttaggattaaagttcattaacttcaatgtaatcatgcctcctattactgaagtcagattggaaccactaaagatccaaactttctgtctggtaatagaaagtaaaaatctagacatcatttacatttgagaagctgtttttaacattattttaaaatgccaaatatgttctttctagaaaaatatttatttttgtttttgttggatagcttttaattacatttcagagaggtgtaattttgggtagatgctcattacatttttgaaaggtttatgattccaaaataaagatttatatgactggtgatactggctttacagaaatttcagagaactaatttttaaaatctttagcatttaaaactttttttgttttgttttctgacatattctgacaaagagcagcaaaccactg

SEQ ID NO: 31257 - DNA, 1093 bp, Homo Sapiens
ctaaagagtcgccgcagacaagcaggcccccagatggagaaccagcctgtgaggtggcgggccctgccaggcctcccacgccctcctgggctccccgcagccccctggctcctccttggcgtgctgctgctgcccgggaccctgcgactggcaggaggacagtcagtgacccacaccggcctgcccatcatggcctccctggccaacacagctatctccttcagctgcaggatcacctatccatacactccccaattcaaggttttcacagtcagctactttcatgaagatctccagggacagaggagccctaagaagccaacaaactgccaccctggactgggcacagagaaccagagccacaccctggactgccaggtcacccttgtgctgccgggagcatcggccactggcacctactactgctctgtccactggccacactccacggtgagaggcagcggcaccttcatcctggtcagagacgcagggtaccgagagcccccgcagagtccacagaagctcctgctctttggcttcaccggcctcctgagtgtcctgagtgtagtgggcacggccctgctgctctggaacaagaagcggatgcggggtccaggcaaggaccccaccaggaagtgcccagatccaagatctgccagcagccccaagcagcatccttcagaatctgtctacacagctctgcagcgccgcgagaccgaggtctatgcctgcatcgagaatgaggatggcagctcacccaccgccaagcagagccccctctcccaggagagaccgcatagattcgaagatgatggcgaacttaacctggtctatgaaaatctctaggatgggctccaccgctcatagagcttgccctgggtcagaggaccggggcagcccctgccaccaaaggacttgatctgagttgggagtaaggcccccagggacaccccatcatttcaccctcacattcaaggcccttcctgtcttggccggccccactgcccccccattctatgccccaaccaccaaggctttcccatcttggggcctttgcccaggctgttccttctgccaggcaggcccttcctcc

SEQ ID NO: 31258 - DNA, 3485 bp, Homo Sapiens
gcgggccacgtgcgggaggaggggccgccttctggttggcgcccggtgtccgttcctcctatcggcgtaggccccgcgaggaagacaagggcgcgccctggctgggagggcgtggccagagacctgtccatcaccgagtccacgagtggcagcacctaccacaccgcagtaccttggcgaggcggagcaggggcaggcaggtcgcggaagggggaggcggagcaaggccggcgggagccaatcggcctggcggcacgagggggcgggggcggggtcaacgcgcgcgacccaaacacacgggccgggcgcaccctgcagccgcgccgctccgcggccttccggcgcggggccggggaacctcctccccatctgcgcaccccccgccttcgcggcccagatcctcccgccagcccggcccctccttcgcagggggagcgaggcgacggttgccgggaagcgcgcgccacctctccctcccatttttcgttctcccctcgcgcgccacccgtttttcctctttctccgttaataacagctgggtggctgggggaggagggaaggtggccccggcggagtctgggcgggcgcctcccactcagccgccagccgccgtgggagccggaggatggcggcggtagcagcggccgcccgagaggaggcggtgccgagatcgggggcgccgagcgcggcagcagagagcggtagcggcccgtcgtggcgcaccagaaccgaaaccagcggcagccgcacggccacttgagccgccccttcctgctggagccagcgaggggtgcctgcagccgggaccccttcctctccgcgtctcctcgtctcccgcgcccgcgtcaggccgtcggcctcgcccgccgccccaagaagagcgcgccgggcgccgactgcccctctggacgccgggcggcggccctggacgtgcgggggcctctctgggccggccgcggcgcctgggccctgccctctagctcccgcgctcgctcccgccctcccggctctcggggcgcagcgcgcgggcccggcccggggcagggcggacatgggcgccaaacagagcggcccggccgccgctaacggccgcacgcgcgcgtactcgggctcggatctaccttccagtagcagcggaggcgccaatgggaccgcgggcggcggcgggggcgctcgggccgccgccgcggggaggttcccggctcaggtgcccagcgcgcaccagcccagcgcctccggcggcgccgcggcggccgcggcggccccggcagccccggcggccccgcgcagccgctccctcggcggggccgtggggagcgtggcgtcgggggcccgcgcggcgcagtcccccttcagcatcccgaacagcagcagcggcccgtacggctcgcaggactcggtgcacagcagccctgaggacggcggcggcggccgggaccggccggtgggcgggagccccggcgggccgcgcctggtgatcggctccttaccagctcacctctcgccgcacatgtttggaggatttaagtgccctgtatgctcaaaatttgtatcctcagatgaaatggatttgcatcttgtaatgtgtttaacaaagccacgaataacctataatgaggatgtactgagtaaagatgctggggaatgtgcaatatgccttgaagaattgcagcagggagatactatagcacgactgccttgtctatgcatatatcataaaggctgcatagatgaatggtttgaagtaaatagatcttgccctgagcacccttcagattaagcgtcagcttcctgttttataggttttcttgtcttgacaagatgcttgaaaaaccaagaggatatgaaaatctgtctctggagaaacaaagacgcaggcatactcagccagaaatctgagttttgtgagacttggtaatacagagatggacaatcgtactggggtaaaaaaaccctgctgaagagaggacagtgaccacagaactcagtgtaccaaacatgcatacaaaggacacacagggattttgaaaatgctgcacatcccttaatagtcatctacataggtaatactgataaacattttgtattcagacgccaaagttaactgatttaaaagttgatttactttttattaagttctccagagctgcacaactagttatgttttgatttgttttgttttttaatttggggtctctttgttttccccaacataatgttcataatgtttctgcattcatctgttcttaaattgaaaaacatataatttacttcttataaattgaagtcttaaatgtgaaaccaagaaatgtaatcaagcagtaaaaacatctgaatgtagaccatgatctcaagttcttccattttctcccccacgagtggaaaatagacttctacataggaaagctaaaatatgttaatatttttaaattaaaggtttaatatcagaatgcagtccaaagagcaaatcatattacataattacattttaattaaatatagaatattctactgaattgcaatttattaaatattcttatcctcttaaataaaactgctcaacagttaatcagcagtgaatcatcttgcagctatgcaatttaaaaaaaatacagattaccaatttcaagtgctgccagctaaaataactgttttaacgggtatcttttgtttgttcttttcacttaattattttattgtgctttgcatctccaggcagttctctcacatttgggtaaaatgtttagcaggctgtaaacttaagaaaagggtaaaataaaattttctggagaggaacttggaatttgagggagattttatatacctttaaaaactgtaatttaattgggatgccaggtttatagcaatttgcaactttaattttccagataatctggaggttagcatttgataaatgattttttaaagtagatatgaagattttgttaatttataatttattcatgtgttattactgtaattgaaaatgttatagacacttttaaattcagtttgtgtagaaagaaatgtgttaaacaaaattatgttaataaatattcccacataatacatctgaatggttaaaaatactggaagagttgtcagggctacaatagtgaatgtccttttttttaatatcaaaaatatcgataagtaggttttgtgttttcaacgtagggaaaatgttatcagtgaataggtggtgtactttacttggtataatttaaagttgcacagtaagtactgtttccttattttaatctttctttactcataatgtatttaagaatttgctgttttatttaacgctgctactcttaatcttctctaaatttttccccctactttcttgcttctgtttcacattttttaaaagggcaagtacaggagcaactgctgctacccagaaaaatgtgtgtattataaataattaaagagtttttaattgctttctgtatgaaaaaaaaaaaaaaaaaaaaaaaaaa

SEQ ID NO: 31259 - DNA, 2603 bp, Homo Sapiens
gtggacggagaaagtgaaaggtgaggcacggccctgcagattttccagcggatcccccggtggcctcatgtcgcgcagtggaaccgatcctcagcaacgccagcaggcgtcagaggcggacgccgcagcagcaaccttccgggcaaacgaccatcagcatatccgctacaacccgctgcaggatgagtgggtgctggtgtcagctcaccgcatgaagcggccctggcagggtcaagtggagccccagcttctgaagacagtgccccgccatgaccctctcaaccctctgtgtcctggggccatccgagccaacggagaggtgaatccccagtacgatagcaccttcctgtttgacaacgacttcccagctctgcagcctgatgcccccagtccaggacccagtgatcatccccttttccaagcaaagtctgctcgaggagtctggtaactatggatttcccctcttacaactttcaaaccagagttggagactcagcattggggttcggccctgcccgtagcacagccaagccctacctctcggttatcttttctcccgtcaccacccagtaaggtcatgtgcttccacccctggtcggatgtaacgctgccactcatgtcggtccctgagatccgggctgttgttgatgcatgggcctcagtcacagaggagctgggtgcccagtacccttgggtgcagatctttgaaaacaaaggtgccatgatgggctgttctaacccccacccccactgccaggtatgggccagcagtttcctgccagatattgcccagcgtgaggagcgatctcagcaggcctataagagtcagcatggagagcccctgctaatggagtacagccgccaggagctactcaggaaggtgggagagagccaagccctgtgtccccaaggagtccctaactttcttatcccatgagagaggtgtgtaaaggagaaagctagaggtgaactagtagagagagacttgctaggaggccttagcaataatccagtaatctaaaggaaagatgatggtgacttagactcgggtggttagtggtagaggtggtgagaagacatcagatcctgggcacattcttttcttctgcttcccttgcctatttgctgaccacactccggctcctatgtcaccttgatgacttcctatccattctgtcttcctaggaacgtctggtcctaaccagtgagcactggttagtactggtccccttctgggcaacatggccctaccagacactgctgctgccccgtcggcatgtgcggcggctacctgagctgacccctgctgagcgtgatgatctagcctccatcatgaagaagctcttgaccaagtatgacaacctctttgagacgtcctttccctactccatgggctggcatggtgaggcttttcaagtacctatatttagccccaacaccatttctgggctcctggggctcagcctagtgaactgcaacctcaaaggagcaagccttgaaacagttgctgggggaagtggccagagtagagatgctgggactgagggtggagcagcaaacttggtgaaactacatctccaatgtgctttctaatctcctgccagctcttctcaagcaggggatcctgggagatgtagttttcagatacctggttgggtttgggagtaggtgctaacctggataactgtaaaagggctctctctccccactgtctctcttctttctgtcaggggctcccacaggatcagaggctggggccaactggaaccattggcagctgcacgctcattactaccctccgctcctgcgctctgccactgtccggaaattcatggttggctacgaaatgcttgctcaggctcagagggacctcacccctgagcaggtcaggactcagaacagtctggcgtctccagactctcacatgcagtatgtgcaggcacctgatacttctgttgcccttgtgctccagtcattgcacaaggcagaaaacagctctggcaggaagggactgccaaagttaggagccctagggcctggaaggagagtatggtcctcagatcccccttctctcctgcttcctccagggaacccaacagtcatgaccctgatagtttcccataacaacctgggcattccttgggactcaggagctgctaaactctttcatcccctggtggcttcagcagtccttatcaccagcctcacaatcccacaggcccacccccagtgggcctgtggcattcatatttcatattcatatttcaaaccacaatatccagcaaaatgtctcctgagcacccagaactccataccatcggccgggtgtggtggctcatgccttaatcccagcactttgggaggtcaagatgggaggattgcttgagcccagaagttcgagactagcctgggaaacataggaagccctcgtctctacaaaaaaaatttaaaaagttagccaggtatggtggcatatacttgtggtcccagatacttgggaggctgagataggatcacttgggcccaggagtttgaggctgcagtgagccatcatcatggcatcattgcattccagcctgggcaacagagcaagacctcgtctc

SEQ ID NO: 31260 - DNA, 3548 bp, Homo Sapiens
acgtgacctggtgacagtgctgacttggctgtacagctcgatctaggttctgcggcacgggatggcggaggcgcctcctgtctcaggtacttttaaattcaatacagatgctgctgaattcattcctcaggagaaaaaaaattctggtctaaattgtgggactcaaaggagactagactctaataggattggtagaagaaattacagttcaccacctccctgtcacctttccaggcaggtcccttatgatgaaatctctgctgttcatcagcatagttatcatccgtcaggaagcaaacctaagagtcagcagacgtctttccagtcctctccttgtaataaatcgcccaagagccatggccttcagaatcaaccttggcagaaattgaggaatgagaagcaccatatcagagtcaagaaagcacagagtcttgctgagcagacctcagatacagctggattagagagctcgaccagatcagagagtgggacagacctcagagagcatagtccttctgagagtgagaaggaagttgtgggtgcagatcccaggggagcaaaacccaaaaaagcaacacagtttgtatacagctatggtagaggaccaaaagtcaaggggaaactcaaatgtgaatggagtaaccgaacaactccaaaaccggaggatgctggacccgaaagtaccaaacctgtgggggttttccaccctgactcttcagaggcatcctctagaaaaggagtattggatgggtatggagccagacgaaatgagcagagaagatacccacagaaaaggcctccctgggaagtggagggggccaggccacgaccaggcagaaatccaccaaaacaggagggccaccgacatacaaacgcaggacacagaaacaacatgggccccattccaaaggatgacctcaatgaaagaccagcaaaatctacctgtgacagtgagaacttggcagtcatcaacaagtcttccaggagggttgaccaagagaaatgcactgtacggaggcaggatcctcaagtagtatctcctttctcccgaggcaaacagaaccatgtgctaaagaatgtggaaacgcacacaggttctctaattgaacaactaacaacagaaaaatacgagtgcatggtgtgctgtgaattggttcgtgtcacggccccagtgtggagttgtcagagctgttaccatgtgtttcatttgaactgcataaagaaatgggcaaggtctccagcatctcaagcagatggccagagtggttggaggtgccctgcctgtcagaatgtttctgcacatgttcctaatacctacacttgtttctgtggcaaggtaaagaatcctgagtggagcagaaatgaaattccacatagctgtggtgaggtttgtagaaagaaacagcctggccaggactgcccacattcctgtaaccttctctgccatccaggaccctgcccaccctgccctgcctttatgacaaaaacatgtgaatgtggacgaaccaggcacacagttcgctgtggtcaggctgtctcagtccactgttctaacccatgtgagaatattttgaactgtggtcagcaccagtgtgctgagctgtgccatgggggtcagtgccagccttgccagatcattttgaaccaggtatgctattgcggcagcacctcccgagatgtgttatgtggaaccgatgtaggaaagtctgatggatttggggatttcagctgtttaaagatatgtggcaaggacttgaaatgcggtaaccatacatgttcgcaagtgtgccaccctcagccctgccagcaatgcccacggctcccccagctggtgcgctgttgcccctgtggccaaactcctctcagccaattgctagaacttggaagtagtagtcggaaaacatgcatggaccctgtgccttcatgtggaaaagtgtgcggcaagcctctgccttgtggttccttagatttcattcatacctgtgaaaagctctgccatgaaggagactgtggaccatgctctcgcacatcagttatttcctgcagatgctctttcagaacaaaggagcttccatgtaccagtctcaaaagtgaagatgctacatttatgtgtgacaagcggtgtaacaagaaacggttgtgtggacggcataaatgtaatgagatatgctgtgtggataaggagcacaagtgtcctttgatttgtgggaggaaactccgttgtggccttcataggtgtgaagaaccttgtcatcgtggaaactgccagacatgctggcaagccagttttgatgaattaacctgccattgtggtgcatcagtgatttaccctccagttccctgtggtactaggccccctgaatgtacccaaacctgcgctagagtccatgagtgtgaccatccagtatatcattcttgtcatagtgaggagaagtgtcccccttgcactttcctaactcagaagtggtgcatgggcaagcatgagcagtcccactactgggcgtctacccagaagaaaagaagtcattatatgaaaaagatacctgcacacgcatgtttatagcagcacaattcacaattgcaaaaatgtggaaccagcccaactgcccatcagtcaacaagtggataaagaaattgtggtgtatctatacgtaccatggaatactactcagccaggaacgaaataatggcattcacagcaacctggatggatttggagaccattattctaagtgaagtaactcaggaatggaaaaccaaacatcgtatgttctcaattataagagggagctaagctatgaggacgcaaaggcatgagaatgatacaatggactttggggactctggggaaaggacgggaggcgggtgagggataaaaaactacacactgggtccgagcacggtggctcatgcctataatcccagcactttgggaggccaaggcaggtagattatgaggtcgggagttcgaaaccagcctggccaacaaggtgagaccccccccatctctactaaaataattagccgggcctggtggcgcatccctgtaatcccagctactttacttgggaggctgaggcaggagaattgcttgaactcgggaggcggatgttgcagtgagccaatatcgcaccactgcactccagcctgggcaacagagcaagactccgtctcgaaaaaaaaaataaattttaaaaactacacattgggtacaatgtacactcctcgggtgatgggtgcaccaaaatctcaaaaatcactactaaggaacttatccatgtaaccaaacaccacctgttccccaagaactattgaaataagaaaaaagaaaaaaaaaaaatcactgattgcaggtcaccctaacagatataataatgaaaaagtctgagatgttgcgagaattaccaaaatgtgatgcagacacgaaatgagcatgtgctgttggaaaagtggaacagatagacttgctggagacagggttgccacaaagtttcaatttgtaaaaaatgtgatatctatgaaatgcaataaagtgaagtccaataaaa

SEQ ID NO: 31261 - DNA, 1374 bp, Homo Sapiens
ggcgaggccgagcccctcctagtgcttccggaccttgctccctgaacactcggaggtggcggtggatcttactccttccagccagtgaggatccagcaacctgctccgtgcctcccgcgcctgttggttggaagtgacgaccttgaagatcggccggttggaagtgacgaccttgaagatcggcgggcgcagcggggccgagggggcgggtctggcgctaggtccagcccctgcgtgccgggaaccccagaggaggtcgcagttcagcccagctgaggcctgtctgcagaatcgacaccaaccagcatcatgtccatgacactggggtactgggacatccgcgggctggcccacgccatccgcctgctcctggaatacacagactcaagctacgaggaaaagaagtatacgatgggggacgctcctgactatgacagaagccagtggctgaatgaaaaattcaagctgggcctggactttcccaatctgccctacttgattgatggggctcacaagatcacccagagcaacgccatcctgtgctacattgcccgcaagcacaacctgtgtggggagacagaagaggagaagattcgtgtggacattttggagaaccaggctatggacgtctccaatcagctggccagagtctgctacagccctgactttgagaaactgaagccagaatacttggaggaacttcctacaatgatgcagcacttctcacagttcctggggaagaggccatggtttgttggagacaagatcacctttgtagatttcctcgcctatgatgtccttgacctccaccgtatatttgagcccaactgcttggacgccttcccaaatctgaaggacttcatctcccgctttgaggtttcctgtggcataatgtgatggtcaattttctgcatcaacttgactgggctaagggatgctcagatggcaggtaaaatcattgtgcttgtgagggtgtttccagaagagatttgcctttgaatcagaagacagcaaagatttccttcagcaatgaaggaggcatccaccaaactgtcagggcccagagagaagaaaaagacaggaagggtgaatttgacctctctgactgggacatccatctctgcctatcctgggacctccacactcctggttctctggccttcagacttgatcagggactaacaccatcgcctcccacccccacctttgttctgaggcctttagcctctgaatgataccactggctttcctgcttctctatcctgcagtcggcagatcatgggacttcttcactccaaaattgtgtgagccaattcccataacagatagataaatttataaataaacacacaaatttcctacagccttaaaaaa

SEQ ID NO: 31262 - DNA, 1458 bp, Homo Sapiens
gggggctgtagctggtgagaggaagtcctagaggctatggacactctgctgctgggatcaccgagatgagcagcagctgctcagggctgagcagggtcctggtggccgtggctacagccctggtgtctgcctcctccccctgcccccaggcctggggccccccaggggtccagtatgggcagccaggcaggtccgtgaagctgtgttgtcctggagtgactgccggggacccagtgtcctggtttcgggatggggagccaaagctgctccagggacctgactctgggctagggcatgaactggtcctggcccaggcagacagcactgatgagggcacctacatctgccagaccctggatggtgcacttgggggcacagtgaccctgcagctgggctaccctccagcccgccctgttgtctcctgccaagcagccgactatgagaacttctcttgcacttggagtcccagccagatcagcggtttacccacccgctacctcacctcctacaggaagaagacagtcctaggagctgatagccagaggaggagtccatccacagggccctggccatgcccacaggatcccctaggggctgcccgctgtgttgtccacggggctgagttctggagccagtaccggattaatgtgactgaggtgaacccactgggtgccagcacacgcctgctggatgtgagcttgcagagcatcttgcgccctgacccaccccagggcctgcgggtagagtcagtaccaggttacccccgacgcctgcgagccagctggacataccctgcctcctggccgtgccagccccacttcctgctcaagttccgtttgcagtaccgtccggcgcagcatccagcctggtccacggtggagccagctggactggaggaggtgatcacagatgctgtggctgggctgccccatgctgtacgagtcagtgcccgggactttctagatgctggcacctggagcacctggagcccggaggcctggggaactccgagcactgggaccataccaaaggagataccagcatggggccagctacacacgcagccagaggtggagcctcaggtggacagccctgctcctccaaggccctccctccaaccacaccctcggctacttgatcacagggactctgtggagcaggtagctgtgctggcgtctttgggaatcctttctttcctgggactggtggctggggccctggcactggggctctggtaagtgactgccattggtccctcagcctctgatcctcacacatgctctgatgcccatagaccacattcatctccacccttcatgactgcccgctgaacctgtctgattctggaactacctccccatacctccatcccccatgccccacttgattttaactgattcctctcctgaccctttactaataaaccctttggcggagactgagataacccacaaaaaa

SEQ ID NO: 31263 - DNA, 12450 bp, Homo Sapiens
gaagatggcggcggcggcggcggtgacggcgcttcccgtgcggctgaggacgatccgccagtgagcgcggagactgcttccacttcgggcgggggagcgccggaccgaatcggctctctaggccgtggagcttgccgtcccacctccgtccaaatcgacctttcctttctatccccaaccacccctcaacccctgttttcccctgccttccttgcagaggccatggaggacgaggagagacagaagaagctggaggccggcaaagccaagcttgcccagtttcgacaaagaaaagctcagtcggatgggcagagtccttccaagaagcagaaaaaaaagagaaaaacgtcaagcagtaaacatgatgtgtcagcacaccatgatttgaatattgatcaatcacagtgtaatgaaatgtacataaatagttctcagagagtagaatcaactgtgattcctgaatctacaataatgagaactctacatagtggagaaataaccagtcatgagcagggcttctctgtggaactggaaagtgaaatttcaaccacagcagatgactgcagttcagaggtaaatggttgcagttttgtgatgagaacaggaaagcctacaaatttattaagggaagaagaatttggtgttgatgattcttattctgaacaaggagcacaagacagtccgactcatctagagatgatggaaagtgagttggctgggaagcagcatgagattgaagagctaaacagagagctggaagaaatgagggttacctatgggactgaaggactgcagcagttacaagaatttgaagctgccattaaacaaagagatggcattataacccagctcactgctaatttacaacaagcaagaagagaaaaggatgagacaatgagagaatttttagagttgacagaacagagtcaaaaattacagattcaatttcagcaattacaggctagtgaaactctgagaaacagcactcatagtagcacagctgcagacttactacaagccaaacaacagatcctcactcatcaacagcagcttgaagaacaagaccacttattagaagattatcagaaaaagaaagaagacttcacaatgcaaattagtttcttgcaagagaaaattaaagtatatgaaatggaacaagataaaaaagtagaaaactcaaataaagaagaaatacaggaaaaggagacaatcattgaagaattaaacacaaaaataatagaagaagaaaagaaaactcttgagctaaaggataaattaacaactgctgataaattactaggagaattacaagaacagattgtgcaaaagaaccaagaaataaaaaacatgaaattagagctgactaattctaagcaaaaagaaagacagtcttctgaagaaataaaacagttaatggggacagtcgaagaacttcagaagagaaatcataaagacagccagttcgaaactgatatagtacaacgaatggaacaagaaacacaaagaaagttagaacaactccgggcagagctggatgagatgtatgggcagcagatagtgcaaatgaaacaagaattaataagacaacacatggcacagatggaggaaatgaaaacacggcataagggagaaatggagaatgctttaaggtcatattcaaatattacagttaatgaagatcagataaagttaatgaatgtggcaataaatgaactgaatataaaattgcaagatactaactctcaaaaggaaaaactcaaggaagaactaggactaattttagaagaaaagtgtgctctacagagacagcttgaagaccttgttgaagaattgagcttttcaagggaacagattcagagagctagacagacaatagctgaacaagaaagtaaacttaatgaagcacataagtcccttagtacagtggaagatttgaaagctgagattgtttctgcatctgaatccagaaaggaactagaattaaaacatgaagcagaagttacaaattacaagataaaacttgaaatgttagaaaaagaaaagaatgctgtgttagacagaatggctgaatcacaagaagctgaattagagaggctgagaacacagcttctatttagtcacgaagaagagctttccaaactgaaggaagatttagaaattgaacatcgaataaatattgaaaaacttaaagataatttaggcattcactataaacagcagatagatggtttacagaatgaaatgagtcaaaagatagaaaccatgcagtttgaaaaggacaatttgataactaagcagaatcaattaattttggaaatttcaaagctaaaagatttacagcagtctcttgtaaattcaaagtcagaagaaatgactcttcaaatcaatgaacttcaaaaagaaattgaaatactcagacaagaagaaaaagaaaagggtacacttgaacaagaagttcaagaattacaacttaaaacagaattgttagaaaaacagatgaaggaaaaagagaatgatcttcaagaaaaatttgcacaacttgaagcagagaatagcattcttaaagatgaaaagaaaacccttgaagacatgttgaaaatacatactcctgttagccaagaagaaagattgattttcttagactccattaagtccaaatccaaagactctgtgtgggaaaaagaaatagaaatacttatagaggaaaatgaggacctcaaacaacaatgtattcagctaaatgaagagattgaaaagcaaaggaacactttttcatttgctgaaaaaaactttgaagttaactatcaagagttacaagaggagtatgcttgccttctcaaagtaaaagatgatttagaagacagtaaaaataaacaggaattagagtataaaagtaaacttaaagcacttaatgaagagcttcatttgcaaagaataaatccaactacagtgaaaatgaaaagttctgtctttgatgaagacaaaacttttgtagcagaaacattggaaatgggtgaggttgttgaaaaggatacaacagaactcatggaaaaacttgaggtaaccaagcgagagaaattagagctgtcacagagactgtctgatctttctgaacaattgaaacagaaacatggtgagattagttttctaaatgaagaagttaaatctttaaagcaagagaaagaacaagtttcattgagatgtagagagctagaaatcattattaaccacaacagggcagaaaatgtacagtcatgtgatactcaagtaagctctttattagatggagttgtgaccatgacaagcaggggtgctgaaggatcagtttctaaagtaaataaaagttttggtgaagaatcaaaaataatggtggaagataaagtttcttttgaaaatatgactgttggagaagaaagtaagcaagaacagttgattttggatcacttaccatctgtaacaaaggaatcatcacttagagcaactcaaccaagtgaaaatgataaacttcagaaagaactcaatgtacttaaatcagaacagaatgatttaaggctacagatggaagcccaacgcatttgcctctctctggtttattcaactcatgtggatcaggttcgtgaatatatggaaaatgaaaaagataaagctctttgcagtcttaaagaagagcttatttttgctcaagaggaaaagatcaaggaacttcagaaaatacaccagttagaactacagactatgaaaacacaagaaacaggtgatgaaggaaagcctttacatctgctcattggaaaacttcaaaaggcagtgtctgaagaatgttcttattttttacagactttatgcagtgtccttggtgaatattatactcctgctttaaaatgtgaagtaaatgcagaagacaaagagaattctggtgattacatttctgaaaatgaagatccagaattacaagattatagatatgaagttcaagactttcaagaaaatatgcacactcttctcaacaaagtaacagaagaatacaacaaactcttggtacttcaaacacgactaagcaagatctggggacagcagacagatggtatgaaacttgaatttggagaagaaaaccttccaaaagaggaaacagagtttttatcaatccattctcagatgaccaatttggaagacattgatgtcaatcataaaagcaagttatcttctctgcaagatcttgaaaaaactaaacttgaagaacaagttcaagaattagaaagcctcatatcctctttgcagcaacagttgaaagaaactgaacaaaactatgaggcagagatccactgtttacagaagaggcttcaagctgttagtgagtccacggttccgccaagcttacctgttgattcggtggtaattacagaatctgatgcacagagaacaatgtaccctggaagttgtgtgaaaaagaatattgatggtacaatagagttttctggtgaatttggagtgaaagaggaaacaaatatcgttaagttgcttgaaaaacaataccaagaacaattagaagaagaagtagctaaggttattgtgtcaatgagtatagcatttgctcaacaaactgaactgtctagaatatctgggggaaaagaaaatactgcatcatcaaagcaagcacatgctgtgtgtcagcaagaacaacattattttaatgaaatgaaattatcacaggatcaaattggttttcagacttttgagacagtggatgtgaaatttaaagaagaatttaaaccacttagtaaagagttaggagaacatggaaaggaaattttattatcaaatagtgatccccatgatataccagaatcaaaggactgtgtgctgactatttcagaagaaatgttctccaaagataaaacatttatagttagacagtctattcatgatgagatttcagtgtcaagcatggatgcttctagacaactaatgttgaatgaagaacagttggaagatatgagacaggaacttgtacgacaataccaagaacatcaacaggcaacggaattgttaaggcaagcacatatgcggcaaatggagagacagcgagaagaccaggaacagctacaagaagagattaagagacttaatagacaattagcccagagatcctccatagataatgaaaacctggtttcagagagagagagggtgcttttagaggagctggaagcactaaagcagctgtctttagctggaagagagaagctgtgttgtgagctgcgcaacagcagtacgcaaacacagaatggaaatgaaaaccaaggagaagttgaagaacaaacatttaaagaaaaggaattagacagaaaacctgaagatgtgcctcctgagattttgtctaatgaaaggtatgcactccagaaagctaataatagacttttgaagatcctcttagaagttgtaaagacaacagcagctgttgaagaaacaattggtcgccatgtccttgggattctagatagatctagtaaaagccagtcatctgccagcctaatttggaggtcagaagcagaggcatctgtaaagtcatgtgtccatgaggaacatacaagagttacagatgaatccattccctcttattctggaagtgatatgccaagaaatgacattaacatgtggtcaaaagtaactgaggaaggaacagagctgtcacaacgacttgtgaggagtggttttgctggaactgaaatagaccctgaaaatgaagaacttatgctgaacattagctctcgactacaagcagcagttgaaaaactcctagaagccataagtgaaactagcagtcagcttgaacatgcgaaagtgacacagacagagttgatgcgtgagtcatttagacagaaacaagaagcaacagagtcccttaagtgccaagaggaacttcgagagcgccttcatgaggagtccagggccagagaacagctagctgtggagctcagtaaggctgagggcgtcattgatggctatgcagatgaaaaaactctttttgaaaggcaaattcaggaaaaaactgatataatagatcgtcttgagcaggagttgttatgtgcaagtaacaggttgcaagaattggaggcagagcaacagcagatccaagaagaaagagaattactgtccagacaaaaggaagctatgaaagcagaggcaggcccagttgaacaacaattactacaggagacagaaaaattaatgaaggaaaaactagaagtacaatgtcaagctgaaaaagtacgtgatgaccttcaaaaacaagtgaaagctctagaaatagatgtggaagaacaagtcagtaggtttatagagctggaacaagaaaaaaatactgaactaatggatttaagacagcaaaaccaagcattggaaaagcagttagaaaaaatgagaaaatttttagatgagcaagccattgacagagaacatgagagagatgtattccaacaggaaatacagaaactagaacagcaacttaaggttgttcctcgattccagcctatcagtgaacatcaaactagagaggttgaacagttagcaaatcatctgaaagaaaaaacagacaaatgcagtgagcttttgctctctaaagagcagcttcaaagggatatacaagaaaggaatgaagaaatagagaaactggagttcagagtaagagaactggagcaggcgcttcttgtagaggaccgaaaacactttggagctgtagaagctaaaccagaattgtccctagaagtacaattgcaggctgaacgagatgccatagacagaaaggaaaaagagattacaaacttagaagagcaattagaacagtttagagaagaactggaaaataagaatgaagaagttcaacaattacatatgcaattagaaatacagaaaaaggaatctactacccgcctacaagaacttgaacaggaaaacaaattatttaaggatgacatggagaaactgggacttgccataaaggaatctgatgccatgtctactcaagaccaacatgtgctatttgggaaatttgctcaaataatacaggaaaaagaggtagaaattgaccaattaaatgaacaagttacgaaactccagcagcaacttaaaattacaacagataacaaggttattgaagaaaaaaatgaactgataagggatcttgaaacccaaatagaatgtttgatgagtgatcaagaatgtgtgaagagaaatagagaagaagaaatagagcagctcaatgaagtgattgaaaaacttcaacaggaattggcaaatattggacagaagacatcaatgaatgctcattccctctcagaagaagcagacagtttaaaacatcaattggatgtggttatagctgaaaagctggccttggaacagcaagtagaaaccgctaatgaagaaatgaccttcatgaaaaatgtacttaaagaaaccaattttaaaatgaatcagctaacacaggaattattcagcttaaagagagaacgtgaaagtgtggaaaagattcaaagcataccagagaatagtgttaacgtggctatagatcatctgagcaaagacaaacctgaactagaagtagtccttacagaggatgctcttaaatccctagaaaatcagacatacttcaaatcttttgaagaaaatggcaaaggttccataattaatttggaaacaaggttgctacaacttgagagcactgttagtgcaaaggacttagaacttacccagtgttataaacaaataaaagacatgcaagaacaaggccagtttgaaacagaaatgcttcaaaagaagattgtaaacctacagaaaatagttgaagaaaaagtggctgctgctcttgtcagtcaaatccaacttgaggcagttcaggaatatgcaaaattctgtcaagataatcaaacaatttcatcagaacctgaaagaacaaatattcagaatttaaatcaactaagagaagatgagttggggtcagatatatcagcattaaccttgagaatatcagaattagaaagccaggttgttgaaatgcatactagtttgattttagaaaaagaacaagtagaaattgcagaaaaaaatgttttagaaaaagaaaagaagctgctagaactacagaagctattggagggcaatgagaaaaaacagagagagaaagaaaagaaaagaagccctcaagatgttgaagttctcaagacaactactgagctatttcatagcaatgaagaaagtggattttttaatgaactcgaggctcttagagctgaatcagtggctaccaaagcagaacttgccagttataaagaaaaggctgaaaaacttcaagaagagcttttggtaaaagaaacaaatatgacatctcttcagaaagacttaagccaagttagggatcacctcgcagaggcaaaagagaaattgtccattttagaaaaagaagatgagactgaggtacaagaaagcaaaaaggcctgcatgtttgagccacttcctataaaactgagtaagagcattgcatcccagacagatgggactctgaagatcagtagcagcaatcagactccacaaattcttgttaaaaatgcaggaatacaaattaatttacagagtgaatgttcctcagaagaagttactgaaataatcagtcagtttactgaaaaaattgagaagatgcaagaactacatgctgctgaaattttggacatggaatccagacatatttcagaaactgaaaccttaaagagggaacactatgttgccgttcagttactgaaagaggaatgtggtaccttgaaggcagtgatacagtgtctgagaagtaaagagggatcctcaattcctgagctagcacattctgatgcttaccagactagagaaatatgctccagtgattctggatcagactggggtcagggaatttatcttacacacagtcagggatttgacatagcatcagaaggccgaggagaagaaagtgaaagtgcaacagattcctttccaaagaaaataaagggattactgagagctgtccataatgaaggcatgcaggtgctttctctcactgagtctccctatagtgatggagaggaccattctattcagcaggtttcagaaccttggctagaagagagaaaagcttacatcaatacaatctcatctctaaaggatttaattacaaagatgcaactgcaaagagaagccgaggtttatgatagttctcaatctcatgagagcttctcagactggcgaggtgaactactgcttgcccttcaacaagttttcttagaagagcgtagtgttttactagcagcatttcggacggagctgacagctctaggtactacagatgcagttggtttactaaactgtttggaacagagaatacaagaacagggtgttgaatatcaagcagctatggaatgcctccagaaagcagatagaaggagtttgttatctgaaattcaggcactgcatgcacaaatgaatggtaggaaaattactctgaaaagagaacaagagagtgagaaaccaagccaagaactcttggaatataatatacagcagaagcagtctcaaatgctggagatgcaagtggagctcagcagtatgaaagacagagcaacggaactgcaggagcagctgagttctgagaaaatggtggttgctgaactgaagagtgagcttgcacaaactaaattggaactagaaacaacactcaaggcacagcataaacacctaaaagaattggaggctttcaggttggaagttaaagataagacagatgaagtacatttgcttaatgacacattagcaagtgaacagaaaaaatcaagagagctccagtgggctttggagaaagagaaagccaagttgggacgcagtgaagaacgggataaagaagaacttgaggatctgaagttttcacttgagagtcagaaacaaaggaatcttcagctaaatctacttttggaacaacagaaacaactactgaacgaatcccagcaaaaaatagaatcacagagaatgctatatgatgcccagttgtcagaagaacaaggtcgaaacttagagcttcaggtacttcttgaatctgagaaagttcgaattcgggaaatgagtagtaccctagatagggagcgggaattgcacgcacagctgcagagcagtgatggtactggacagtctcggccacccttgccctcagaggacctactgaaagagctgcagaaacagctagaggaaaaacacagtcgcatagtagaattgttaaatgagactgaaaaatataaactggattctttgcaaacacgacagcaaatggaaaaagataggcaggttcacaggaaaacactgcagacagaacaggaggccaacactgagggacagaaaaaaatgcatgagctccagtccaaagtggaagatcttcagcgccagctggaagagaaaagacaacaagtttataagttagaccttgaaggacagcgactacaaggaatcatgcaggaattccagaagcaagaactagaacgagaagaaaaacgagaaagtagaagaattctgtatcagaaccttaatgagccaaccacgtggagcttaaccagtgatagaactagaaattgggttcttcaacagaaaatagaaggagaaacaaaagaatcaaactacgctaaattgattgaaatgaatggaggaggaaccggctgtaatcatgaattagaaatgatcagacaaaagcttcaatgtgtagcttcaaaactacaggttctaccccagaaagcctctgagagactacagtttgaaacagcagatgatgaagatttcatttgggttcaggaaaatattgatgaaattattttacaactacagaaattaactggccagcaaggtgaagagcccagcttggtgtccccaagtacttcttgtggctcattgactgaaagactactgagacaaaatgctgagctgacagggcatatcagtcaactgactgaagagaagaatgacttaaggaacatggttatgaagctggaagagcagatcaggtggtatcgacagacaggagctggtagagataattcttccaggttttcattgaatggtggtgccaacattgaagccatcattgcctctgaaaaagaagtatggaacagagaaaaattgactctccagaaatctttgaaaagggcagaggctgaagtatacaaactgaaagctgaactaagaaatgactctttacttcaaactctgagccctgattctgaacatgtcactttaaagagaatttatggtaaatacttgagggcagaaagttttcgaaaggctctcatttaccagaagaaatacctgctgctgttactgggtgggttccaggaatgtgaagatgccaccttggccctgcttgcccggatgggggggcagccagctttcacggatctagaggtgatcaccaatcgcccaaagggcttcaccaggtttcggtcggccgtcagagtatccattgcaatttccagaatgaaatttttggttcgacggtggcatcgagtcacaggttctgtttccatcaatattaacagagatggctttggactgaatcaaggtgcagaaaagactgactcattttatcattcttctggtgggctggagttatatggagaaccaagacatactacgtatcgctcaagatcagatctggactatattaggtcccctttaccatttcagaataggtacccaggcactccagctgatttcaatcctggttctttagcatgttctcagcttcagaattacgatcctgacagagccctaacagattatatcactcggctagaggcactgcaaagacgacttggaactatacagtcaggttcaactactcaatttcatgctggcatgagaagataatcctttgaaacatcattaattgaagtgattttaaatagatttccttttgtaaatcaatggttcttttgtgcttttgtattgtgaatattcaatgggaccaatatgaacacagcttatgattgtatacaaatcccttgccagcacatgaaaacaaactggaatttgtatatataagcattgtgtatgtattcatgcacaataattattgaattacctgtatatttgtggaatgctaatttaaaacattaaattataaaccttgtgtatttatcaaatgggtgaaaagattaaacttttacgcattacaatactgctgaatgtgtagctcgaggtgtcctgcacttttcttataaggctactgaagttacatgttttgcctaatatattctactggtgatgaagacagataatatcacttgtagagacctatttttgtataatggtagaagttttgaattttatggggtattttgtcaagtactgaaataaaaactgaaataaaaatgacttcaccattttcaccacact

SEQ ID NO: 31264 - DNA, 2818 bp, Homo Sapiens
gtggcgcggacgcctgctcagtgcgcgccggccgggcaaccctatgctggcgtaatcgggttcctccgagccgccgtaggactggttccggcgggctggtgaggaatggagccggtaggctgctgcggcgagtgccgcggctcctccgtagacccgcggagcaccttcgtgttgagtaacctggcggaggtggtggagcgtgtgctcaccttcctgcccgccaaggcgttgctgcgggtggcctgcgtgtgccgcttatggagggagtgtgtgcgcagagtattgcggacccatcggagcgtaacctggatctccgcaggcctggcggaggccggccacctggaggggcattgcttggttcgcgtggtagcagaggagcttgagaatgttcgcatcttaccacatacagttctttacatggctgattcagaaactttcattagtctggaagagtgtcgtggccataagagagcaaggaaaagaactagtatggaaacagcacttgcccttgagaagctattccccaaacaatgccaagtccttgggattgtgaccccaggaattgtagtgactccaatgggatcaggtagcaatcgacctcaggaaatagaaattggagaatctggttttgctttattattccctcaaattgaaggaataaaaatacaaccctttcattttattaaggatccaaagaatttaacattagaaagacatcaactcactgaagtaggtcttttagataaccctgaacttcgtgtggtccttgtctttggttataattgctgtaaggtgggagccagtaattatctgcagcaagtagtcagcactttcagtgatatgaatatcatcttggctggaggccaggtggacaacctgtcatcactgacttctgaaaagaaccctctggatattgatgcctcgggtgtggttggactgtcatttagtggacaccgaatccagagtgccactgtgctcctcaacgaggacgtcagtgatgagaagactgctgaggctgcgatgcagcgcctcaaagcggccaacattccagagcataacaccattggcttcatgtttgcatgcgttggcaggggctttcagtattacagagccaaggggaatgttgaggctgatgcatttagaaagttttttcctagtgttcccttattcggcttctttggaaatggagaaattggatgtgatcggatagtcactgggaactttatattgaggaaatgtaatgaggtaaaagatgatgatctgtttcatagctatacaacaataatggcactcatacatctggggtcatctaaataataattaaagtggctttcataatatgtaacttttgggttctgcctttttcagaaaatggaaacttgggccatgtgtatttcaaacaaaaataactttagatatatcttttttgtagctttgattgatgctctaagatcacatgagggtagtatttaatatattagatgaaggacaactttggacataacactgactaggagttgagagcttttgcatcaggcagaagcaaactgattatagttgtgttgcaccagatcatgtagctgctgtgtaacatgaccttaaatagtcttcctgcataggaagagcaaaagggtattcatcaataggatatagatttaagacattccctgactaccccttgcgttgttaggtgatgtcttttagcagaatcatgaagaccttttttctcccttaataaaggagaaaaatatactgatggctggagaaatttttctctgcctttcagttttatgaattttttcagaagtaacaatattattattgactttttacttatttgataaaaattaaagaactatttttgttttggtcagataaattgacaagactaatcagtattttattataagtaaaagatttttcttctttccttaaaaatatttttttttcacctaggtctaaatagctaactaactggtagaccagagtattacatcatcttattttggttttataccaataaaacatagcgtggaactcattcaggtaatgttttgcatttcattgcttttggatgaacaaaggaagtaaactaatcctttataaatgaaaacccagaatagttggtatgtcagctagtcattcctgtcatattcccagtagaatgattttcaagtttgaatttctgtacaaatatctaaataagagatgtgcagagagcaccaattttccttcaatatccattctttacttttcacataatgatagaacctttgatttttcaagtgggtatgcctcctagaataaagactacatttcccagtctcctgtgcaggtatgactgtgttctggacaatggaatgtgaggggaaacgattttttgtgtccttaaaatggcatgaccatttatttgcccctttctccatcctgttgcttggaatgtggatctggtagtgagccatcttggaccctgaagaggaggcaacacaccattgtagaagaaaaacaacagaaggatcctggtccctgtacgacctcattgaagaaacaccataagtggcgtggactatctacctccagactgttttacaagagagaaattagcatattccatctaatacagtatgatgtaactaatgttacttttgtaacagtcagtggtttgttctaacaggacagtagaacacttgcaaggtaagtaaaaccaaatgtattagcattattcctgcttttccttttttgtcacttttatcctttttttaaaactgaaaatatttttctcttgctatttatatatatatgataaaaatgcttggaa

SEQ ID NO: 31265 - DNA, 2255 bp, Homo Sapiens
cttaggcaaggggtccaggtcagagtttagagctttcaaatcccaacttgcccctggggattgcgcggctgatgtttagaacgcctagtcaagccaaccggctcgctcttgtttcagcaaaccctgacttacgtctcctatttgacttgaggcggcacagtggccaagtcgattggccgtggcaagtgaccctccctgtggctgaagtgttctgaggactggcgagagaggcgcgccatgcttgccccctgctcaggttgggagcttggctgcttccgtctctgtctccgtcaggtccgactgtgggctggcgctgggcgctgggcttgctgggcttgccaagccaggccgtacagctcaggtgggagcgagcgctggcccggatcggagactgaggtccctccgcctggcccggcgcgccgaactctgaaggagtggacactgcaggtgagcccgtttggtcggctgcgggcgcggctcccgtgccacctggccgtgaggcccctggaccccctcacctacccggatggcgaccgcgtgctggtcgcggtgtgcggcgtggagggcggcgtgcggggcctggacggcctgcaggtgaagtacgacgaggatctggaggagatggccattgtgtctgatactatccacccccaggcgtccgtggaggtttagatatcaagtcatcagggtctggctgtgtaaaagttcaaagtattgagggtgataattgcaaaattgaaacagagcatgggactagtatcttgcagtctgttaagggtcaaaaattgcatgttcaaacaaaaggaggcaaagtgatctgtctgggaacagtttatggaaatatagatattcatgcatcagataaaagtgctgtgaccatagataaactgcagggaagttctgttactgtatctaccgaagatggtttgctgaaagccaagtatctttatacagaatcatcatttctgtcttctgctgctggggatattacattaggaagtgttcatggtaatataacattacaaagcaagatgggtaacatcacagtagattcgtcttctggatgtctaaaagcctcaactaatcagggtgccatagatgtttatgtcagccaactggggaaagtggaattgaaatcccataaaggttctattattgtcaaggtcccatcttcacttcaagctcatttacagttatcagggaaagaggttgatgtgaactcagaagtccatgttcaggaaatggctgaagttcgtaaagatgatgttgtaacagtgactggactcatgaatcaagcaagcaaacgtgaaaaatggattaaggctgatgccccaaaaggcactgtaagttttagaaggcaaagttggtttcagtccctgaaactgcaggactaaaactgatttgagttggatttatgatttttaacaatgattcgcagatctgtgactacaaaaatgtaaatcccaccattcatataaaggttgaaaacaacaaattgagaatgaatactggtgaactgttttgggaggctttttcaaaatttgtgctttgctattgtattcattttctactgctctgtaacaaattaccacaaatttagcagcataaaataatactcatttacagctatgtctaggttctccgctcagggaatcacaaggctagaaatcaagattttggccaggctgagttctcatctggagtctctgggaagaaatctacttccaacttcattcagattattgggaaaatccagttccttgtgactggatgactgaggtctccattttcttgctggctgtcagccagcaatcactctaagcttctagaggccacccacatgccttctcatgttgcccctccatcttcaagccagcagtgatgcgctgagttcttctcatgctttgaatatctgacttcttctgcagccagctggaagaatatatacttttaaagggctcacttgattaggtcaggcccacccaggataacctttgttttgccatataatgtaacattcataggagtgatggcccatcacattcagttttcactcccactcaaggaaaggagattatacaaaggcatccatcatgtggggacaattagcttagaattctttataatgtagctctcacatgacaggttttctacttagtaccttttatggcatcaatgtaaatttaagctgtaaataaaaaacaaatatgtgaagcaaaaaaaaaaaaaaaaaaaaaaaaaaaaaaaaaaaaaaa

SEQ ID NO: 31266 - DNA, 2421 bp, Homo Sapiens
ctaaaaaagaaggaactcacacttaaagatgtggaatgtaaattctccaaaatgaaaactgcttatgaagaggttacaactgaattagaagaatttaaggaagcctttgcaggagcagtgaaagctaacaattccatgtcaaaaaaattaatgaaatcggataagaaaatagcagtgatcagcaccaagctctttacggagaaacagcggatgaaatattttctcagcactcttcctacaaggccagaaccagagttaccttgtgttgaaaatcttaatagtatagaactcaacagaaaatatattcccaaaacggccataagaattcctacttcaaacccacagacttcaaataactgcaagaacttcttgactgagatggagctggaccgtgtagaacaaataattacaggaacaaagaaaagttttgctatgttgagcacttgctcccgtctactttcttttgtagaatccactgcaccaaggaagcacaggcgagcccttcccatcatgcgctcactagtccccaacagaagaaccactgtcgcatccactgagagcaggacaaacaggcccggtggtgtcaggagcccaggtctccagctggagggaacgtcaaccctgcagtgggagcaggggcccatcgcacatcctaggcacagatgctaatgcaggcactgcagaccataaaggagaacagcaagaagcccccagcaaacatccacagatggccctggacatcaaccacattctgaggaacatgtcatgttctgggagggctaaggcatcaagtaaggcctgtggggctggaggatcccaggcaaggtggggcaatccagagccatgggggcttcccatgggaattgggaggtcccaaggcagagtcagaggttccacaggaggagtcagagagtcaccaagggctctcctggcccagggagcagtcaacaccatggactgaacacttgctgggctccaacccttgggccaggctgcccatgtggggccaggaggcagctcagagtgggaggcagagagagaagtgtgctcagagggcacctgtatctggatgtaatgtggtcctgagactctggctgggaagtgcttccagggtatcatatgtgttatgcagctacttcctctccccagccttaccctgtaggaattctagtgactatgttgccaccatcttggagctccatgccctcatagtgtaatggcaccagcagatctgcctgtgcacagacttcctgtactacctcactcctgaggggagatgcttctgcgggcctgcgacctggtgctcaactttagacaccatcatcctggagcggcactgcaccctcactagccagggtgttgacgtcctcaaggccaaggccacattcaagactttggacttcattgatgcacttgtgccgagcaagcttatctgatcttctgggatctctactaggatgctggcagcccagccagctggtctggccctggacgtgccttcaggggctgggtatgcttcatgacctgtgttttggtgagtggtaagcagcacctgcttctagcttcactgttgggccagatttcatccccaccgtggctcttcattgcggctgctttctgctccctccatggaccctgcgtggaattgccccatgtttctgtttgggcaccactgaggaaggaagcatgaaggacgcacaggtcaggccattctgttgcccacctcgtgctgggtctttactcctgggatggcttcaggggcagctccttttccatgcctccccccacccaacatctctcaggttgctgctcaaaggtcacctcttggaggggtctctccctgtcactgtgtttggaacagctccctcagtttctttctagctcatctcactctggtaatgtctttcattaccaccaccatctgacctggtcttacgacctgttagcttccttcatcagacaagagcaccaggatggcaggggcctcatctgtcctgttcctcctgtggcctgggtcctagcaccatgtctggtacagtgtaggtgctcaagggaagtttactttatagaactgtctacctgggagaggttactgttagtctaagctgcactatttggtaaaccccttgctgttttgcagatcctggttggagtaaaacattccatgggaactcgggctgtgagaaatgtcctaaccacctgactgcagaaacatccttatcacatcctgctgggcaaaggcccaacagcctgacttcaggaacatccttatcatcttctactgagcagcaagctatactgtccagagccctccctcccagcgctatgattaccccagcctgtgagcggcagtgggcactgacactaagctggtttccccctccgcagggttttgctagtaataaacctgtgttgctgttg

SEQ ID NO: 31267 - DNA, 3641 bp, Homo Sapiens
gagtcaccgcagtggctgagctgctgacaggaggcggcagcggagtaggaggcgaggcaagacctgcggctcggcccggccacagccgcggtagtgctaggcaagcccacggagtcacgccggcctcagccagtctgcgaacctctcgcccccgcccacccctgcatccgcccggcccctgcccgcccgagtggtccggggaggcctagtctgcaccacccgccgggctcctggggccgccgccccgcgcggtcctgtcggcgtccgcggccgcgcccggcccctggcccgctcgcccgccggcaccatgatggaggagatcgaccggttccaggtgcccaccgcgcactcggagatgcagccgctggacccagccgccgcctccatctctgacggagactgtgacgcccgggaggagaagcagcgggagctggcccggaagggctccctgaagaatggcagcatgggtagccctgtcaaccagcaacccaagaagaacaatgtcatggcccgaacaaggctggtcgtccccaataaaggctactcctcacttgaccagagccctgatgagaagccactggtagcccttgacacggacagcgatgatgactttgacatgtctagatactcctcctccggctactcctctgctgagcagatcaaccaagatttgaacatccagctgctgaaggacggctaccggttagatgagatccccgacgacgaggacctagacctcatcccccccaagtccgtgaaccccacgtgcatgtgctgccaggccacgtcctccaccgcctgccacattcagtagcgggcggggccactgcggtcgccggggcggggccgccaagggccgggtaggacgggcagaggccgaccccttcccagctcgtctgcctgcccccggccccgcgcccctacagccgccaacctcgtataacagtcattgcttcctcctatggtaggacgtgtacctctgtgtgttcatggagctggagaaaccaaaactgggtctctctccacccgggagctgaggaggggtgggggccgtttgttcagttacctgggggaacctcacccagcaccctgccccgcttcccagggctggccaagagagaagactggacggcagggaggtcaacattaacgagtggggggatcacaaagccaggggcttggccccaccccagcgaagccatgaactcccaagccccggcctcagcctaaccaggaaaggggctcggagggagaaaggcccagggcagtggggacgggtcccagcacctcggagcccccttcacacgccccctaccggcccatgtttctatttgcatttccccctcctcagatgggaagcctggcaaagctgcccaaccgggtagtgcccctcacccatcggatcactgccttcttcctcctcttgccccattcacccgcttccttgcactctgggagtggggcagggtaaggtgggccttacagacaggctgaggtttgggtggtgtgatctgtcctaattggcccctcaccaatgcatctatctgtctgccaccagcccaccccaccctgcccccaccctcacccacgcttctgctcattggtctcaatcccagcctggaagcagggagtaaggctggactccaatggcccattcccctcaccccagcccaagacgtgggaggctgcttcccagtaagaatccaggagcaagctttggtgaatccagtgggctgagtggctctatggatgtggttgtttggatgtggtagggagtgcttagcagaatgtgtgtgtatctctgaggctgtcagggggtgggtgggtgtgtgtctctgttggacctgtctctcctcagtctattcctgtcatagatgtgggtgtccctggtagggaagtgcctgtgtggtctgtttacagtgcagaaggcggctcagcagtgcaatgggctgacagccttggaccgggagtcagaagcctgggttctggttgtagctctggcccctccctgtgatcttcaacaagccacttgctttctctcgtcttcagtttcctcaactagaaaatgaacagcagctgaaattatgttgaagatccttttatacctgaaagagtttcttcatagaaatttctgtggtggggagggggcaatctctgtgtgtctcagtatacctaaaggttggggtggggcggagttgtgtgtctctgtagaaaggcgaaggggcagttcctatcaggactgtgtatgtctgagcacatgtggctctgtttgggattacgtgtttgtctgtgaatgtgtgtgtgtgttggagggttgtctattgtgtgtggctgtatagggtgtctgtagatcaagatgtgtatacagctgcttctgctattgctggtttgggggaggggactggaaagctgagactgaaaatcaagagggaagaggtgaggaaggcccacccctggggctgggcagtgtagacctgccaccgtgtgaagaaaaatgaaagcacagatagcctaagactgcacaggcctgtgcccacataccttatagcacaggcccaggtggatcatctcatgctaacaccccacatgtgctggtggatccactcccatggatccactcacatgctgcaggcatgcagtagactcacccacagcccactctctggacaccaatcctgggaggtgggagctggaatggggagcaatgagaggagggagtgagactgttggcttaggaagggtggtacctctccctgcatcatacccaggaactgccagctccaaaatattggggtacagctcaccaccccccactccgccaacccattcctacctcctctagtgcagggacccaagttagatgatgagaaaatgccaaacaaagggaggcaaggacagagaaggtacctgcaggacccacaaggcccatactggcccccatctgaacccacctctcccacccagatcaacatccccccaacccctgtgcccccatcatctggaccccagagccagccctcccactaccaccaccaccaccccggggctccttggctcacctttctagaacatgggtacctcctctttttgggggctcatttagactgctgcctttgctgctgacttgcagtgtgactcgggcccattgttcaatctctgtggccctgagacaccagggaaaatctccccccccacaggacatactagttccctggcaggcaagggcttccaactgaggcagtgcatgtgtggcagagagaggcaggaagctggcagtggcagcttctgtgtctagggaggggtgtggctccctccttccctgtctgggaggttggagggaagaatctaggccttagcttgccctcctgccacccttccccttgtagatactgccttaacactccctcctctctcagctgtggctgccacccagccaggtttctccgtgctcactaatttatttccaggaaggtgtgtggaagacatgagccgtgtataatattttttttaacattttcattgcagtattgaccatcatccttggttgtgtatcgtgtaacacaaataatgatattaaaagcatcaaacaagccaaaaaaaaaaaaaaaaaaaaaaaaaaaaaaaaaaaaaaaaaaaaaaaa

SEQ ID NO: 31268 - DNA, 896 bp, Homo Sapiens
gcgcgccatcttggctccggatcgtgcgtgaggcggcttcgtgggcagcgagagtcacagacaagacagcaagcaggatggagcactaccggaaagctggctctgtagagctcccagcgccttccccaatgccccagctacctcctgatacccttgagatgcgggtccgagatggcagcaaaattcgcaacctgctggggttggctctgggtcggttggagggcggcagtgctcggcatgtagtgttctcaggttctggcagggctgcaggaaaggctgtcagctgcgctgagattgtcaagcggcgggtcccaggcctgcaccagctcaccaagctacgtttccttcagactgaggacagctgggtcccagcctcacctgacacagggctagaccccctcacagtgcgccgccatgtgcctgcagtgtgggtgctgctcagccgggaccccctggaccccaatgagtgtggttaccaacccccaggagcaccccctggcctgggttccatgcccagctccagctgtggccctcgttcccgaagaagggctcgagacacccgatcgtgaagacctgctgagccagcctgttctccgggcctgaatgtctggggtgcttgtgccttttctgagaagcgttgtgactgctcaacatccccatcaaggtttgagtccacaaaagtggacctccctatcatgcttccccttccctctagcatgtgggaagggactgctgtgaagaatgacagatgtggggcctctgccaagttctgcattgctaaataagggcttcctctgccttctacctacagtgcatttgaactgccttctgaaagaggtccagggagggatttaggaaataaagtttctacctatttgaaaaaaaaaaaaaaaaaa

SEQ ID NO: 31269 - DNA, 2610 bp, Homo Sapiens
ccgctggttccgtaacaacatcccgttggcttccctcaggcggcgggaccagtgcagccgccgcctcccaggatcgtccgccggtcagggcccttgccctccccggcacaggccaccatggccaccaacccacagccgcagccgcctcctccggcgccgccgcctcccccgccgcagccgcagccgcagccaccgccgccgccgccgggccccggggctggccccggcgcgggcggggcgggcggcgcgggtgcgggcgccggggacccgcagctcgtggccatgatcgtgaaccacctcaagagccaggggctcttcgaccagttccgcagagactgcctggccgacgtggacaccaagcctgcgtatcagaatctgagacagcgtgttgacaactttgttgcaaatcacttggcaactcacacatggagtccgcatctcaataagaaccagctaagaaacaacattagacaacaagtcctcaaatcaggaatgttggagtctggtattgaccgaattatttctcaggttgtggacccaaagatcaaccacacattcagacctcaggtagagaaagctgtgcatgagtttttggccacgctaaatcacaaagaggaaggaagtggcaacacagctcccgatgatgagaaaccagacacttcccttattacacaaggtgttcctactcctgggcccagtgctaatgtagccaatgatgccatgtcgatattggaaaccataacttctcttaaccaagaagccagtgctgctagggcttcaacagaaacatcaaatgccaagaccagtgagagagcgtcaaaaaaacttccatctcagccaaccactgatactagtactgacaaagaaagaacttcagaggacatggctgataaagaaaaatctacagctgactctggaggtgaaggactggaaacagccccaaagtctgaagagttcagcgacctcccctgtccagtcgaagaaattaaaaattacacaaaagagcataataatttaattctgctaaataaggatgttcaacaggaaagcagtgagcaaaaaaataaatcaacagacaaaggtgaaaagaagccagacagcaatgagaaaggagaaagaaagaaagaaaagaaggaaaagactgaaaagaaatttgatcactcaaaaaagagtgaagatacacagaaagttaaagatgaaaaacaagcaaaggaaaaagaagtagagagtttaaaacttccttcagaaaagaacagtaataaagctaaaactgttgaagggacaaaagaagatttctctttgatagattctgatgtggatggacttacagacatcacagttagctctgttcataccagtgacctttcatcttttgaagaagatactgaggaggaagttgtaacgtctgatagcatggaagaaggagagattacgtcagatgatgaagagaagaacaaacagaataaaacaaaaactcaaactagtgattctagtgaaggaaaaacaaaaagtgtacggcatgcgtatgtccacaaaccatatctttactcaaaatactatagtgattctgatgatgagcttactgtagaacaacgacgacagtccattggtattttgtggttttaggccaaagaaaaagaagagaggcttttaagaaggcaaatcaatagagaaaaacttgaagaaaaacgaaaacagaaagcagaaaagacaaagtcttcaaaaaccaagggtcaaggcaggagtagtgtggacttagaagaatcatcaacaaagagtttggaacctaaagccgccagaattaaagaagtccttaaagaacggaaagttttagaaaaaaaagtagccttaagcaaaaagagaaaaaaagattcaaggaatgttgaagagaactccaaaaagaaacagcaatatgaagaagattccaaagaaacccttaaaacaagtgagcattgtgaaaaggaaaaaatttcttcttcaaaggagctgaagcatgttcatgcaaaaagtgaaccaagtaaacctgcccggagactttcagagtctttgcatgtagttgacgaaaacaaaaatgaatccaaattagaaagagaacataaaagacggacatctacccctgttatcatggagggggtacaggaagagactgacacaagagatgtaaaaaggcaagtagaacgctcagaaatttgcaccgaagagccccagaaacagaaaagcacacttaaaaacgaaaagcatctaaagaaagatgattctgaaacaccacatttgaaaagcctacttaagaaagaggtgaaatcctccaaggagaagcctgaaagagagaaaactccatcggaagacaaattgtctgtgaaacataaatataaaggtgattgtatgcataaaacaggtgatgagactgagcttcactcttctgagaaaggtttaaaagtagaggaaaatattcaaaagcaaagtcaacaaacaaagctttcttcagatgataaaaccgaacgaaaaagtaaacataggaatgaaaggaaattatcagtattaggcaaagatggaaagccagtttctgaatatattataaaaacagatgagaatgttcgtaaagaaaaaaaa

SEQ ID NO: 31270 - DNA, 2878 bp, Homo Sapiens
cagcgagcgccgtcgtctgcccgggcccgcccatcggggtccccaaccccatccggaccccgccgcccgagcgcgcggccccggaagcacccgcctcccggcatggtgctcaaggccttcttccccacgtgctgcgtctcgacggacagcgggctgctggtgggacggtgggtgccggagcagagcagcgccgtggtcctggcggtcctgcactttcccttcatccccatccaggtcaagcagctcctggcccaggtgcggcaggccagccaggtgggcgtggccgtgctgggcacctggtgccactgccggcaggagcccgaggagagcctgggccgcttcctggagagcctgggtgctgtcttcccccatgagccctggctgcggctgtgccgggagagaggcggcacgttctggagctgcgaggccacccaccggcaagcgcccactgcccccggtgcccctggtgaggaccaggtcatgctcatcttctatgaccagcgccaggtgttgctgtcacagctacacctgcccaccgtcctgcccgaccgccaggctggagccaccactgccagcacggggggcctggctgccgtcttcgacacggtagcacgcagtgaggtgctcttccgcagtgaccgctttgatgagggccccgtgcggctgagccactggcagtcggagggcgtggaggccagcatcctcgcggagctggccaggcgagcctcgggacccatttgcctgctgttggccagcctgctgtcgctggtctcagctgtcagtgcctgccgagtgttcaagctctggcccctgtccttcctcgggagcaaactctccacgtgcgaacagctccggcaccggctggagcacctcacgctaatcttcagtacacggaaggcggagaaccctgcccagctgatgaggaaggccaacacggtggcctctgtgctgctggacgtggccctgggcctcatgctgctgtcctggctccacgggagaagccgcatcgggcatctggccgacgccctcgttcctgtggctgaccacgtggccgaggagctccagcatctgctgcagtggctgatgggtgctcccgccgggctcaagatgaaccgtgcactggaccaggtgctgggccgcttcttcctctaccacatccacctgtggatcagctacatccacctcatgtcccccttcgtggagcacatcctttggcacgtgggcctctcggcctgcctgggcctgacggtggccctgtccctcctctcggacattatcgccctcctcaccttccacatctactgcttttacgtctatggagccaggctgtactgcctgaagatccatggcctgtcctcactgtggcgtctgttccgggggaagaagtggaacgttctgcgccagcgcgtggactcctgttcctatgacctggaccagctgttcatcgggactctgctcttcaccatcctgctcttcctcctgcctaccacagccctgtactacctggtgttcaccctgctccggctcctggtggtcgccgtgcagggcctgatccatctgctcgtggacctcatcaactccctgccgctgtactcactgggtcttcggctctgccggccctacaggctggcggataaacccactgccctacagccgcgtggtgcacacctaccgcctccccagctgtggctgccaccccaagcactcctggggcgccctgtgccgcaagctgttccttggggagctcatctacccctggaggcagagaggggacaagcaggactgagggaactgctggctcgcctggcaccaccacacggccacagccagccatctgctctgccagggtggcaccagctcagctggcgcatgtcctgtgctttgtggacgctgctgtgtgctcctgaacacggcaggccctgctatcacaccttgggcttggaggtcattgggagtgagcagatgtgggggtggccagccaggctggccgcactccatcactggcactgcctgccttgggacccgcttcccacctgctgcggtcaccatggtggcgagcacagcaaccccaggtgtccagagcactgccccatgcccaccctgtgtacccaggtccagagggtccgtccaccacagcagccccaggtggagggctggtctccctgggggctccccagtggctctgccctggctgtgggggtggagggaccttgccaggatgaaccccccagtcccaggcaccctctagctccctcagccgaacagcaccctgcatctgggggattgaagcagtcgctgacccccgtccccagcgggcccgggccctcactccctgaaccacacggggtttatttgcggatgttccctggagaggtcgctttgtgaagaaaccatcagcaggctgtgagcatcgccaggctgctgtgggggcgggagcagcctcagtgtcaagggcccgcccactgacccagccgtacctattcgtccacggtgccccgtagcagcaggtcctgcggccaaatctgtctcccttcatgggcctcccagggaaggaggaagccctgctgtgcagacacctctgtggccccccaggagtgtgagtggcctggggagggggccgtggcactgaggccgaaagtgcctgccagacggcacggtctgggtgcgggtgttccctgtgagcccgagtccgcttcaggaggggagcctgcaggtgccggctggtgaggggatgacgcgctgtgggtgggaggaggcagcgcccatctcagcagcaccaggactgcctgggactccctggcaacccagcaccggggaagccgtcagctgctgtgacaataaaacctgccccgtgtctggaaaaaaaaaaaaaaaaaaa

SEQ ID NO: 31271 - DNA, 1582 bp, Homo Sapiens
cgggccctgcgggcgcggggctgaaggcggaaccacgacgggcagagagcacggagccgggaagcccctgggcgcccgtcggagggctatggagcagcggccgcggggctgcgcggcggtggcggcggcgctcctcctggtgctgctgggggcccgggcccagggcggcactcgtagccccaggtgtgactgtgccggtgacttccacaagaagattggtctgttttgttgcagaggctgcccagcggggcactacctgaaggccccttgcacggagccctgcggcaactccacctgccttgtgtgtccccaagacaccttcttggcctgggagaaccaccataattctgaatgtgcccgctgccaggcctgtgatgagcaggcctcccaggtggcgctggagaactgttcagcagtggccgacacccgctgtggctgtaagccaggctggtttgtggagtgccaggtcagccaatgtgtcagcagttcacccttctactgccaaccatgcctagactgcggggccctgcaccgccacacacggctactctgttcccgcagagatactgactgtgggacctgcctgcctggcttctatgaacatggcgatggctgcgtgtcctgccccactgttctgggtccaggtgctcctggctggccttgtggtccccctcctgcttggggccaccctgacctacacataccgccactgctggcctcacaagcccctggttactgcagatgaagctgggatggaggctctgaccccaccaccggccacccatctgtcacccttggacagcgcccacacccttctagcacctcctgacagcagtgagaagatctgcaccgtccagttggtgggtaacagctggacccctggctaccccgagacccaggaggcgctctgcccgcaggtgacatggtcctgggaccagttgcccagcagagctcttggccccgctgctgcgcccacactctcgccagagtccccagccggctcgccagccatgatgctgcagccgggcccgcagctctacgacgtgatggacgcggtcccagcgcggcgctggaaggagttcgtgcgcacgctggggctgcgcgaggcagagatcgaagccgtggaggtggagatcggccgcttccgagaccagcagtacgagatgctcaagcgctggcgccagcagcagcccgcgggcctcggagccgtttacgcggccctggagcgcatggggctggacggctgcgtggaagacttgcgcagccgcctgcagcgcggcccgtgacacggcgcccacttgccacctaggcgctctggtggcccttgcagaagccctaagtacggttacttatgcgtgtagacattttatgtcacttattaagccgctggcacggccctgcgtagcagcaccagccggccccacccctgctcgcccctatcgctccagccaaggcgaagaagcacgaacgaatgtcgagagggggtgaagacatttctcaacttctcggccggagtttggctgagatcgcggtattaaatctgtgaaagaaaacaaaacaaaacaaaaaaaaaaaaaaaaaa

SEQ ID NO: 31272 - DNA, 2323 bp, Homo Sapiens
agctgtttccctgtgggtcgggttggactgacttttgacagtcagccttcggctgcggagggggctcggcggcggccggcggagaaagttgctccgatttgaagaccttgcttctcatcacccactggattatgccccaggcttccctacccaatgatcctcttgcaacacgccgtgcttcctccacctaagcagccctcaccctcgcctcctatgtcagtggccaccaggtctacaggaaccttgcagcttccaccacagaagccttttgggcaggaggcttccttgcctcttgcaggggaagaagagttatcgaagggaggggagcaagactgtgccctggaggagctatgtaagcccctgtactgcaaactctgcaatgtcaccttgaactctgcacagcaagcccaggctcattatcagggtaaaaatcatggtaagaaactccgaaattactatgcagcaaatagctgtcctcctcctgctagaatgagcaatgtggtcgagcctgcagctactccagttgttccagtccctccgcagatgggctcctttaagccaggaggccgagtgatcctggccacggagaatgattactgtaagctctgtgatgcctccttcagttccccagctgtggctcaggctcactatcaagggaagaatcatgccaagaggctgcggctggcggaagctcagagtaactcattctcggaatcctcagagctgggtcaacggcgggccaggaaagaagggaatgagtttaagatgatgcctaacaggagaaatatgtatacagtacagaataattcaggtccttacttcaatccccgctctcggcagagaattccacgtgatctggccatgtgtgttactccaagtggccagttttactgctcaatgtgtaatgttggagctggcgaagagatggaattccggcagcatttagagagcaagcaacataagagcaaggtgtctgaacagcggtacaggaatgagatggagaatctgggatatgtatagtgattatcatattaagatagagcagcttttcctgcctgttgtttgccttttgtcaacttgccctgctttgtggtctttttgatatgagtacattcctctgcttaatgttaatacatgtaacccacagtggtaccatgagatgtcaaaacctgggggcccgggggcggggcggggggaggtgggtgtgaagaacgtgcttcttaggtcataacgcttttgcagggtcaatggtgttgagccgctcatagcatgtgacctacctaccccatcagaaataactttttatcttgctcaagttctggtcaactagtagcctgacggcttagaactttgactatttaaaagtttcattttcttttgcaattttagttttatgtactgttaaagaattgtactgaattctttttagatcacagtaaaaataggttggcagagatttcagtttcccagggcttaaccagaaccgccacctcaatgcattgtcagtagaatacattattagaaactgttaaggtctttcccgggacatttttttctgccattttcttttgcaattgtagttttatgtactgttaaagaattgtattgaattctttttagatcaaagtaaaaataggtcagcagagatttcagtttcccagggcttaaccagaaccgccacctcaatgcattgtcagtaggatacattattagaaactgttagggtctttcccaggacatttttttttctgtatcatgtctccccatcattgaagcgcaaattttcttgaattcaaatactcccaatgagcttgtatacttccaaacagctaaacttgatttccagttgtggatttcacacatataattgccgccttcttccctcctcttttttcccccctagttgaatcagcttgtctaacaagcccattttcatgccccagctgtgctgtgggttttccaagcctcatatttgaatattcaatgagtttaagatggatatgatttcaaaaaatagggccgggcgcggtggctcacgcctgtaatcccagcactttgggaggccgaagcaggcggatcacgaggtcaggaggtcgagatcatcctggctaacacagtgaaaccccatctctactaaaaatacaaaacattagccgggcgtggtggtgggtgcctgtagtcccagctactctggaggctgaggcaggagaatggcgtgaacccgggaggcggagcttgcagtgagccgagatcgcgccactgcactccagcctgggtgacagagcgagactccgtctcaaaaaaaaaaaaaaaaaaaaaaaaa

SEQ ID NO: 31273 - DNA, 4914 bp, Homo Sapiens
cccgggccggggcacggagagagccgagcgccgcagccgtgagccgaatagagccggagagacccgagtatgaccggagaagcccaggccggccggaagaggagccgagcgcggccggaaggaaccgagcccgtccgaagggagcggagcgcagcctggcctggggcccggtcgagcccgcgccatggcggccgaggcgacagctgtggccggaagcggggctgttggcggctgcctggccaaagacggcttgcagcagtctaagtgcccggacactaccccaaaacggcggcgcgcctcgtcgctgtcgcgtgacgccgagcgccgagcctaccaatggtgccgggagtacttgggcggggcctggcgccgagtgcagcccgaggagctgagggtttaccccgtgaggtgggaggtcaggggtcagcctctccggtgcgcggatcggggtcaggggtcagccgcggggccctcaggatgctccatgttttcgcccccctcttgcgcccgcgcctggggcggggcggggccggcctggccgggagggggccggggccgcggcaggtagggccggccgcgggctgagcgcgcctggtgtgggtctgcagcggaggcctcagcaacctgctcttccgctgctcgctcccggaccacctgcccagcgttggcgaggagccccgggaggtgcttctgcggctgtacggagccatcttgcaggtgaggggggtgtgagcgccgcagcaccagtggctttagggcctgtcgcttacgcgatgcgggtagtattgttcccgttgcgcagttgaggacaccgaggttcacggtctgagtaacacctcattacaccgaagcctgggcctgtattcccagagctttgggaggctgaggcgagaggatcacttgagcacaggagttcgagaccagcctggacaacatagtgagacccccatctctaaataaaaatagaccaacgctaaagcctgtgctccagagcctccaggcaattggatcagaagtcgcagctctggtgggaggaaggcgagccctcatgtgtgtccctgtgccactttgccttggcccctttgctgtccatcctttttcagggcgtggactccctggtgctagaaagcgtgatgttcgccatacttgcggagcggtcgctggggccccagctgtacggagtcttcccagagggccggctggaacagtacatcccaagtcggccattgaaaactcaagagcttcgagagccagtgttgtcagcagccattgccacgaagatggcgcaatttcatggcatggagatgcctttcaccaaggagccccactggctgtttgggaccatggagcggtacctaaaacagatccaggacctgcccccaactggcctccctgagatgaacctgctggagatgtacagcctgaaggatgagatgggcaacctcaggaagttactagagtctaccccatcgccagtcgtcttctgccacaatgacatccaggaaggtaggagaaggcatctgagtctcctaacccaagatggaagagccagagggctctggagtgagcagaacctcaccccattcccccagggaacatcttgctgctctcagagccagaaaatgctgacagcctcatgctggtggacttcgagtacagcagttataactataggggctttgacattgggaaccatttttgtgagtgggtttatgattatactcacgaggaatggcctttctacaaagcaaggcccacagactaccccactcaagaacagcagttgcattttattcgtcattacctggcagaggcaaagaaaggtgagaccctctcccaagaggagcagagaaaactggaagaagatttgctggtagaagtcagtcggtatgctctggcatcccatttcttctggggtctgtggtccatcctccaggcatccatgtccaccatagaatttggttacttggactatgcccagtctcggttccagttctacttccagcagaaggggcagctgaccagtgtccactcctcatcctgactccaccctcccactccttggatttctcctggagcctccagggcaggaccttggagggaggaacaacgagcagaaggccctggcgactgggctgagcccccaagtgaaactgaggttcaggagaccggcctgttcctgagtttgagtgccgaccaacccccaggatggcggaagctcaccaggccgtggccttccagttcacggtgaccccagacggggtcgacttccggctcagtcgggaggccctgaaacacgtctacctgtctgggatcaactcctggaagaaacgcctgatccgcatcaagaatggcatcctcaggggcgtgtaccctggcagccccaccagctggctggtcgtcatcatggcaacagtgggttcctccttctgcaacgtggacatctccttggggctggtcagttgcatccagagatgcctccctcaggggtgtggcccctaccagaccccgcagacccgggcacttctcagcatggccatcttctccacgggcgtctgggtgacgggcatcttcttcttccgccaaaccctgaagctgcttctctgctaccatgggtggatgtttgagatgcatggcaagaccagcaacttgaccaggatctgggctatgtgtatccgccttctatccagccggcaccctatgctctacagcttccagacatctctgcccaagcttcctgtgcccagggtgtcagccacaattcagcggtacctagagtctgtgcgccccttgttggatgatgaggaatattaccgcatggagttgctggccaaagaattccaggacaagactgcccccaggctgcagaaatacctggtgctcaagtcatggtgggcaagtaactatgtgagtgactggtgggaagagtacatctaccttcgaggcaggagccctctcatggtgaacagcaactattatgtcatggaccttgtgctcatcaagaatacagacgtgcaggcagcccgcctgggaaacatcatccacgccatgatcatgtatcgccgtaaactggaccgtgaagaaatcaagcctgtgatggcactgggcatagtgcctatgtgctcctaccagatggagaggatgttcaacaccactcggatcccgggcaaggacacagatgtgctacagcacctctcagacagccggcacgtggctgtctaccacaagggacgcttcttcaagctgtggctctatgagggcgcccgtctgctcaagcctcaggatctggagatgcagttccagaggatcctggacgacccctccccacctcagcctggggaggagaagctggcagccctcactgcaggaggaagggtggagtgggcgcaggcacgccaggccttctttagctctggaaagaataaggctgccttggaggccatcgagcgtgccgctttcttcgtggccctggatgaggaatcctactcctatgaccccgaagatgaggccagcctcagcctctatggcaaggccctgctacatggcaactgctacaacaggtggtttgacaaatccttcactctcatttccttcaagaatggccagttgggtctcaatgcagagcatgcgtgggcagatgctcccatcattgggcacctctgggagtttgtcctgggcacagacagcttccacctgggctacacggagaccgggcactgcctgggcaaaccgaaccctgcgctcgcacctcctacacggctgcagtgggacattccaaaacagtgccaggcggtcatcgagagttcctaccaggtggccaaggcgttggcagacgacgtggagttgtactgcttccagttcctgccctttggcaaaggcctcatcaagaagtgccggaccagccctgatgcctttgtgcagatcgcgctgcagctggctcacttccgggggtaagttctgcctgacctatgaggcctcaatgaccagaatgttccgggagggacggactgagactgtgcgttcctgtaccagcgagtccacagcctttgtgcaggccatgatggaggggtcccacacaaaagcagacctgcgagatctcttccagaaggctgctaagaagcaccagaatatgtaccgcctggccatgaccggggcagggatcgacaggcacctcttctgcctttacttggtctccaagtacctaggagtcagctctcctttccttgctgaggtgctctcggaaccctggcgtctctccaccagccagatcccccaatcccagatccgcatgttcgacccagagcagcaccccaatcacctgggcgctggaggtggctttggccctgtagcagatgatggctatggagtttcctacatgattgcaggcgagaacacgatcttcttccacatctccagcaagttctcaagctcagagacgaacgcccagcgctttggaaaccacatccgcaaagccctgctggacattgctgatcttttccaagttcccaaggcctacagctgaaggttggagaaatgccagctgccctttcgtccccacactgtggaggaagggacctgtggcagctcacaggcatgaggggtggccgtgcacaggtgcccaggctccaaggacagctccggcagcaggtcctcgctgggcagatgctgctccctgagggcccaggtggtggagcccttaggtacctgtgttttgtttgggaactcggaggccctccccctcccccagctcagaccacagaggtggcaagagaagggctgaagctggaagactgttcatgagggacttgtgtgacctgctttgaaatgtgtgactctgctgagtgacgtaggctctgagatagctgtccacgcccacgtgtttgcttggaataaatacttgcctcagaaccttca

SEQ ID NO: 31274 - DNA, 2551 bp, Homo Sapiens
tattacctgaaaacttaaaagaaggcctgaaggaatcttcctggagttcattaccatgtactaaaaacagaccttttgattttcattcagtgatggaagagtctcagtctctcaatgaacctagcccaaagcagagtgaagaaataccagaggtcacttcagagcctgtcaaaggaagcttaaaccgtgctcagtcagcacagtctataaattcaacagaaatgcctgccagagaggactgtttaaaaagagtgtcctcagaacctgttctgtcagttcaagaaaaaggtgttctgctgaaaagaaagttgtctcttttagaacaggatgtgattgtaaatgaagatggaagaaataagctgaaaaaacaaggagaaactcccaatgaagtctgtatgttttccttagcttatggtgatattccagaagaattaatcgatgtctcagatttcgagtgttctctctgcatgaggttgttttttgagccagtaacaaccccttgcggacattcgttctgtaagaattgtcttgagcgttgtttagatcatgcaccatattgtcctctttgcaaagaaagcttaaaagagtatctagcagataggaggtactgtgtcacacagctgttggaagaattaatagtgaagtatctgcctgatgaactgtctgagagaaaaaaaatatatgatgaagaaactgctgaactctcacacttgaccaagaatgttccaatatttgtttgcactatggcctaccccactgtgccttgccctctccatgtatttgagccaagatacagattgatgattcgaagaagtatacagactggaaccaaacagtttggcatgtgtgtcagtgatacacaaaatagttttgcagattatggttgtatgttacaaattagaaacgtgcatttcttaccggacggaaggtctgtggttgatacagttggaggaaagcggtttagggttttaaaaagaggaatgaaagatggatattgcactgccgacattgaatatctggaagatgttaaggttgagaatgaagatgagattaagaatctcagagagcttcatgatttggtttactctcaagcctgcagctggtttcagaatttaagagacagatttcgaagccaaattcttcagcatttcggatcaatgcccgagagggaggaaaaccttcaggcagcccctaatggacctgcatggtgttggtggcttcttgcagttctccctgtagacccacgataccagctgtcggttttgtcaatgaagtctttgaaagaacggttgaccaagatacagcatatactgacctatttttctagagaccaatctaagtaactaactctttggatctccctttaaagtgaccctaatctggctgcattgatggccagattgtctgctgcctttgcacatctagtgctggtttcagaaatttaatgaaacttttctttttccttcgacctcctgaatcatgtggttctgcaaatgaataccttcaactaggatttagaccactaagaacttgcacagaaaaacacgcattgaatgtgtgtcgaacctctacattgtgaagttgcactatgtaccatactctaaaatgaaataagaactctttatgtctgtgagagagtgtgtgtgtgtgtgtgcgtgcgtgtgtgcttgtgggggttgggtagtgtgtgtgtattttctctggctttaaaattttaaaacaaacaaacaaaaaagccatagagagcagaacttgccgagggtcatttattgcccaagtttacaagagtagcgatacaagtttttgcaaattgaatttgcctcagatatatctgtcctaatgcttatatttgcacaagtatgtaaaatatcgtgttgaggatcattctttgttggaaatactgctcttgctgaactgtcttgaccattgactatgacacagtttcttatttatgtaaatacttgcatcacagtggccgacaggcattggatgcagaacctagagccagttttcaggaacaattgtaaacctgacatggtactgtgcatctattcataaaacactcaaaactgtgaaaatatggtttacatttaattgtacataaaggtaaagggagaactcaattcagtaccagttagtttgtacattttagggggcttttcacattaactgcccatttgtgtaatttatagtttgacatgatgtgtttgttttaaaaaaaaatgcatagtataaacccattaaggatctgggaaaagagaagaagtttaatatagaactaagcttttaaagtttgtttttgtttttaattctggtctcggtgcaaatgttagttatgccttattcatatcacagttagatcaccatgctgcaacatggtttatattcatgctgccctagaaacttttgtaattatttgttgcaaatttgtgactgtccttattaactttcttttatgtaagtaatttgtaaaagtttcttaaaatttttgcttttgcttatttaattttgaataaaagctaaattcctaataaaaaaaaaaaaaaaaaaa

SEQ ID NO: 31275 - DNA, 5103 bp, Homo Sapiens
agaaggcggagcctacctctcatcaggaccagtctgactgcacctgcatccttagctcagagcatccccggagcatcttaagagctgagcgcagctgacaactaggggccggaccgtcgcaggaggcgtccgctggataccttcccccttccctgacctagagctctacagctgctgcctcggtactgaccgagggttcccagagctgtctcaccattgcaaaaacgttatagcaacagcctctgattacgacatggctgagatcaccaatatccgacctagctttgatgtgtcaccggtggtggccggcctcatcggggcctctgtgctggtggtgtgtgtctcggtgaccgtctttgtctggtcatgctgccaccagcaggcagagaagaagcacaagaacccaccatacaagtttattcacatgctcaaaggcatcagcatatacccagagaccctcagcaacaagaagaaaatcatcaaagtgcggagagacaaagatggtcctgggagggaaggtggacgtaggaacctgttggtggacgcagcagaggctggcctgctaagccgagacaaagatcccagggggcctagctctggatcttgtatagaccaattacccatcaaaatggactatggggaagaactaaggagccctattacaagcctgacccctggggagagcaaaaccacctctccatcatctccagaggaggatgtcatgctaggatccctcaccttctcagtggactataacttcccgaaaaaagccctggtggtgacaatccaggaggcccacgggctgccagtgatggatgaccagacccagggatctgacccctacatcaaaatgaccatccttcctgacaaacggcatcgggtgaagaccagagtgctgcggaagaccctggaccctgtgtttgacgagaccttcaccttctatgtcatcccctacagccagctgcaggacctggtgctgcacttccttgtcctcagctttgaccgcttctctcgggatgatgtcattggcgaggtcatggtgccactggcaggggtggaccccagcacaggcaaggtacaactgaccagggacatcatcaaaaggaatatccagaagtgcatcagcagaggggagctccaggtgtctctgtcatatcagcctgtggcacagagaatgacagtggtggtcctcaaagccagacacttgccgaagatggatatcaccggtctctcaggtaatccttatgtcaaggtgaacgtctactacggcagaaagcgcattgccaagaagaaaacccatgtgaagaagtgcactttgaaccccatcttcaatgaatctttcatctacgacatccccactgacctcctgcctgatatcagcatcgagttcctcgttatcgacttcgatcgcaccaccaagaatgaggtggtggggaggctgatcctgggggcacacagtgtcacagccagtggtgctgaacactggagagaggtctgcgagagcccccgcaagcctgtggccaagtggcacagtctgagcgagtactaatcctgttcttctctcctctaatccccgggggccaagctggggagggatgtggaggggaaaaagatgacagagaagtggactccaaacctcattttagttgtagaagaaaatttcttacaaaacaaattccacaaagaacaccctatatgaccacagctgcagatcagttcttagcaatgatgtttttttttctgctttgcaaggcgctagaatcttttattttactttattttttttgaggtggagtttcgctcttgttgcccgggctggagtgcaatggtgagatctcaactcactgcaacctctgcccttcaggttcaagtgattctcctccctcagcctcccaagtagctgggattacaggcacccacgagcatgcccggctaattttttgtattttcagtagagatgggtttcaccatgttggccaggctggtctcgaattccagacctcaggtgatccacccgcctcggcctcccaaagtgctgggattacaggtgcgagccaccgtgcccggcctctggttttgttttgttttttttttttaatgggggacaaaagagagggaaagacccctataaatctatatataacaatgtaaccatatacttgcatgtctaatacaaactgaagaaattagcctaactgccaatatcaagttgcagattttaatccatggaaattgtgttttgtgctgaattgtatttgctgattacctgaaattggcttctttttattgggcttctctggagaatttctcccactccccacctctgcagaagaaaattttgctcttataaaacctcatgttttcatcattcctatcttttctttttattgcctcttatatctctgctctttgacctcaaggtctagaggtctgcagtaagccaagaaacaaaggtggggtggatgaggcaaggtttgcaggagaaagaggaattgagaaatggggtatttttgctatcagctcttctgctatgaagtagtaaaaggcagtctataattaactgacagacctaactgaagcacagagaatacatcagacttatgcatccaagacatcagaacttggattttatcaaacttgatgacttctctaaaaggagctttggaaacttcaaattcagctataggatagtaccaatgaacacatccagctgatcccaaaagctgttttcaggtataaggacaaggagaggagacaagtgacgacagccattcccctttgcagctatctactgtagtgacagccatttcttggttgatgggttggaagtcatcagaggtttgaagaattacactggcctttgtttttctggaaatgccgaccatggagatgctttagagtcttctaaaatagcttagatgttgtaatgaggttagctttgcttcataaaacaggggccctcagaagttctccttaaatttttcaataaaaatttagctcttaaaaaaataacagtgtgactgagtgaatgaagataagttggattctttcagagcattcttttcctcaaaacgagctgcataattcttggaatttatgtcttaccacatggtggagggatgggggaactacaggatgcaattcttcttctaccaatgggcaatagaggttgagagagattcagcatctttctgggattagaattcaagtctctttactcctacagcagctgcgtctccaacgttgagactttgcagatggcacagactccatggataataggtaaacttggggccgggcgcagtggctcacgcctgtaatcccggtattttgggaggccgaggtggaaagatcgcttgagcccaggagttcaagaccagcctgggctacatgacgaaactccatctctatcaaaaatacaaaaaattaactaggtgtggtgctgcacgcctgtggtcccagctattcaggaggctgaggtgggaggatcatttgagcccagaggtagaggctgcagtgagccatgatcatgccactgcactctgggctgggtaacagagtgagatcctgtctcaaaaattaattaattaattaattaaaataaactaggtaaacttggataggcagtagatatttttgcccacctgaggaggatctcagtcaagctgttgcttaacagcttgatccagggcgtgaaaggttagttgagactgaagtgttcacttccatagaagaacatcacttttaaccttgctttggcgaagggagtcggaaagctgagtctctatggacgggggggtgatcttgctttcagtgttccctcagcttttgtggatttaaaaccattctgctccccctaaaccttttgtttgatttcagcccatgttcttgacaatgcagagcaattctgagcagtcacaaagcctactctctgttcttgtccctgccaacccccaccccccataatctgactcacaacttcaccatcagttggggtcataccactagtctctgtcctataccccatgaaatgtaaatactgtatcataagtagaagaaaataatttttgttttctaaaaatgcattttgagatagtttaatgtaaatctgacaggagcattctgaagccccattaggaaaaaatttaaatggttcctcttcatcgccttaatgtctaaagatcagaaatcgctgagcaaacccgcttttgtttccttcccagaaacaatgcaaaacaacaggtggagatagtctggtctttgccctgctgtgtgtgcctctgtagctcctcctgacaaacgtctgggaaaacagcctcaccccactctcctctctcttccccatttccttgtagctttattccttgcatctttgggtctactgagcagtgggtgctgaggtgacaggggaggaaccagttgttctgtagcctaggaactgcctcagtgtctttgccagaaaaaggcaaagaggcggacagtgcagggctcctccctcctacctcaggcctgatccatcgtgcccttgactttgccgtctcaaagtttcttagctgactttggctttcacatttgttctttccagagctaactgataagagtggaggaggaatgccttctcctaagagtcagttgaaagaaagacaagagagtcacatcttagcttttgcacaaggcattcgtggtcaggaataggttagggaatggtcacttctgattttccaacagttgctccttctctgaagagatcttgattcctttgggaagacaagaatttttcttaataacaaaggtcactttatgagttattccttctttcagttcatctcactggagcacagccaagatggacatgtttatggacagtgctctagatgtgaaaacagatagaactggtttgtgggacaggggcagcttgctcaggagagggaataacgcaggtcccttttcttggaaggcttgtactatggccatgacagtgacattgccctcaccatgatccctctccaaagtggttgtctttctttaccttgtgtcttctcttgtaaaaatgaaactcaaaaataaaataaatgtgtcaaatttcgaaaaaaaaaaaaaaaa

SEQ ID NO: 31276 - DNA, 2186 bp, Homo Sapiens
gcggccggggaaaaacccggatgagctgggcagcagtgttggcagtcgcggctgcgagatttgggcacttttgggggtgccggtggcccgggccgatggcgcaaggttgggcaggcttctctgaggaggaactgaggagactaaagcagactaaagatccatttgaaccacagcgacgtctccccgcgaagaaaagtcgacaacaacttcagcgagaaaaagcccttgtagagcaaagccaaaaacttgggcttcaagatggatcaacctcattacttccagagcagctgctttcagcaccaaaacagagagttaacgttcaaaaaccacctttttcttcccctactcttccgagtcatttcactctcacctcccccgttggtgatggacaaccacagggcattgaaagtcagccaaaggaactgggacttgagaattcccatgatggtcacaacaatgttgagattctacctccaaagccagattgcaaattggagaaaaagaaagtggaattgcaagaaaaatctcgttgggaagtcctccaacaagaacaacggctaatggaagagaaaaataaacgtaaaaaagctcttttggctaaagctattgcagaaagatccaaaagaactcaggcagagaccatgaaactaaagcggatccagaaggagttgcaggctttagatgacatggtgtcagctgacactggaattctcaggaaccggattgatcaggccagcctagactattcatacgctcggaagcggtttgacagggctgaagcagagtacattgcagcaaagctagatatacagcgcaagactgagataaaagagcaactcactgaacacctttgtacgatcatacagcaaaatgagctccgaaaggccaagaagttggaggagttgatgcaacaactagatgtagaagccgatgaagagactttggagcttgaggtggaggtcgagggattgctacacaaacaagaagtagaatcaaggagaccagtggttcgtttagagaggccatttcagcctgcggaggagagtgtgacattagaatttgctaaagagaacagaaagtgtcaagaacaagctgtttccccaaaggtagatgaccagtgtggaaattccagtagcatcccctttcttagtccaaactgcccaaatcaagaaggtaatgacatttcagctgctttggccacatgaagttctggtattcttttgagctaatatggtattgagtaaagtatactttttgcagtagatcatgccctgacctccaataaaaacctcttcaaaacaatgctgatttttgaattcatgattagttttagtaaattaataggtttggccattctaaaatccaaaattatgataactgtatttctaggggtatgtttcaccttgattttggcccggttctttcagtgttccgtttaccctttttactgaaagtaagtgacttaaaaggatggaagaaaaactacatggttggagtgtttttagatcagataaatatagaaaagtaaaatggaaaatgatactcaatacctagttaaactcatttcacttctcctgggagacgtattaagactggaagtcctattttatttaatcagtatcagtaaaaagacaaaaattacagtgtgaacaagagaaaaacaggaatagaagaaaaaagttgcaggttgaattatctatctggatattactagagttgtaaaacacaacttggaaactggaatttatgtgaagaaccaaacaacttaaaccagcatcacttttgtcttcaatttgccttccagtgattttagtttacaacctgcgttttgttatttgaaacacacacacttatatataaacacatgtaattttactattttattgtctttcctttaatcgatgaattgattaaatttagacaattaaaacatttctaaagtgagactgaaaataatatagaaaatctcattgctacttgtgattatcaaaaaaagtatgtattttctttctaaagttatctataaatatgtttttgatatgttggacatgaattaccctgtcatgaagcgtttaaattgttaaaatgctgattttcttattagtttgttaattgcctgttactagtacttgaccaatacattgtgctatatgtaaatgtgtaaataaatattgtaattttctcac

SEQ ID NO: 31277 - DNA, 3150 bp, Homo Sapiens
ccgagccgggcgcgcagcgacggagctggggccggcctgggaccatgggcgtgagtgcaatctacggatcagtctctgatggtgggtcgttaacctcagtggggactccaagatttccatgaagaaaatcagttgtcttcattcaagaattggggtctggctcagaattcctgcagctggtgaaaatctgttttctagaagaggtttaattaatgcctgcagtctgacatgttcccgatttgaggtgaaaccatgaagagaaaatagaatacttaataatgcttttccgcaaccgcttcttgctgctgctggccctggctgcgctgctggcctttgtgagcctcagcctgcagttcttccacctgatcccggtgtcgactcctaagaatggaatgagtagcaagagtcgaaagagaatcatgcccgaccctgtgacggagccccctgtgacagaccccgtttatgaagctcttttgtactgcaacatccccagtgtggccgagcgcagcatggaaggtcatgccccgcatcattttaagctggtctcagtgcatgtgttcattcgccacggagacaggtacccactgtatgtcattcccaaaacaaagcgaccagaaattgactgcactctggtggctaacaggaaaccgtatcacccaaaactggaagctttcattagtcacatgtcaaaaggatccggagcctctttcgaaagccccttgaactccttgcctctttacccaaatcacccattgtgtgagatgggagagctcacacagacaggagttgtgcagcatttgcagaacggtcagctgctgagggatatctatctaaagaaacacaaactcctgcccaatgattggtctgcagaccagctctatttagagaccactgggaaaagccggaccctacaaagtgggctggccttgctttatggctttctcccagattttgactggaagaagatttatttcaggcaccagccaagtgcgctgttctgctctggaagctgctattgcccggtaagaaaccagtatctggaaaaggagcagcgtcgtcagtacctcctacgtttgaaaaacagccagctggagaagacctacggggagatggccaagatcgtggatgtccccaccaagcagcttagagctgccaaccccatagactccatgctctgccacttctgccacaatgtcagctttccctgtaccagaaatggctgtgttgacatggagcacttcaaggtaattaagacccatcagatcgaggatgaaagggaaagacgggagaagaaattgtacttcgggtattctctcctgggtgcccaccccatcctgaaccaaaccatcggccggatgcagcgtgccaccgagggcaggaaagaagagctctttgccctctactctgctcatgatgtcactctgtcaccagttctcagtgccttgggcctttcagaagccaggttcccaaggtttgcagccaggttgatctttgagctttggcaagacagagaaaagcccagtgaacattccgtccggattctttacaatggcgtcgatgtcacattccacacctctttctgccaagaccaccacaagcgttctcccaagcccatgtgcccgcttgaaaacttggtccgctttgtgaaaagggacatgtttgtagccctgggtggcagtggtacaaattattatgatgcatgtcacagggaaggattctaaaaggtatgcagtacagcagtatagaatccatgccaatacagagcatagggaaaggtccacttctagttttgtctgttactaagggtagaagattattgctttttaaaggctaaatattgtttgtgggaaccacagatggttggggttgaacagtaagcacattgctgcaatgtggtacgtgaattgcttggtacaaaatggccagttcacagaggaatagaaggtactttatcatagccagacttcgcttagaatgccagaataatatagttcaagacctgaagttgccaatccaagtttgcactcttctggcctgccccatgttactatgtgatggaaccagcacacctcaaccaaaatttttttaatcttagacatttttaccttgtccttgttaagaatttcttgaagtgatttatctaaaataaaggttggcaaactttttctgtaaagggccagattgtaaatatttcagactgtgtggaccaaaaggccacatacagtctctgtcataactactcaactctgtttctgaagcaggaaagccaccacagacagtacataaaggaatatgtgtagctgggttcccaggccagacaaaacagatggtgaccagacttggcccctgggctgtagtttgctgacccctcatctaaaaaataggctatactacaattgcacttccagcactttgagaacgagttgaataccaagaattattcaatggttcctccagtaacttctgctagaaacacagaatttggtctgtatctgacactagaacaaaacttgagggtaaataaacattgaattagaatgaatcatagaaaactgattagaagaatacttgatgtttatgatgattgtggtacaagatagttttaagtatgttctaaatatttgtctgctgtagtctatttgctgtatatgctgaaatttttgtatgccatttagtatttttatagtttaggaaaatattttctaagaccagttttagatgactcttattcctgtagtaatattcaatttgctgtacctgcttggtggttagaaggaggctagaagatgaattcaggcactttcttccaataaaactaattatggctcattccctttgacaagctgtagaactggattcatttttaaaccattttcatcagtttcaaatggtaaattctgattgatttttaaatgcgtttttggaagaactttgctattaggtagtttacagatctttataaggtgttttatatattagaagcaattataattacatctgtgatttctgaactaatggtgctaattcagagaaatggaaagtgaaagtgagattctctgttgtcatcggcattccaactttttctctttgtttttgtccagtgttgcatttgaatatgtctgtttctataaataaattttttaagaataa

SEQ ID NO: 31278 - DNA, 2777 bp, Homo Sapiens
tgactgtggagggactttccggagcagctcgagccttcgggtccacaaacggatccacactggggagaagccgtacaagtgtgaggaatgtgggaaagcctacatgtcctactccagccttataaaccacaaaagcacccattctggggagaagaactgtaaatgtgatgaatgtggaaaatccttcaattatagctctgttctggaccagcataaaaggatccacactggggagaagccctatgaatgtggtgagtgtgggaaggccttcaggaacagctctgggctcagagtccacaaaaggatccacacgggggagaagccctatgaatgcgacatctgtgggaaaaccttcagtaacagctctggccttagggtccataaaaggatccacacaggtgagaaaccttacgaatgtgatgagtgtgggaaggccttcattactcgtagaacacttctcaaccataaaagcatccactttggagataaaccctataagtgtgatgagtgtggtaaagctttcagaaataattctggccttaaagtacataaacgaatccacactggggaacgaccttacaaatgtgaagaatgtgggaaagcatacatctctctctcgagccttataaatcataaaagtgtacaccctggggagaagccctttaagtgtgacgagtgtgagaaggccttcatcacataccgaacccttacaaaccacaaaaaagttcatcttggggagaagccctacaaatgtgatgtgtgtgagaaatcttttaattacacatcgctcctttctcagcacagaagggtccacactagagagaaaccctatgaatgtgacaggtgtgagaaggtcttcagaaacaactcaagccttaaagttcataaaagaatccatactggggagaggccctatgaatgtgatgtgtgtggaaaagcctacatctcacactcaagccttattaaccataagagtacccaccctggcaagacaccccatacatgtgatgaatgtggaaaagcttttttctcaagcagaactcttataagccataaaagagtccatcttggggagaaacccttcaagtgtgttgagtgtgggaaatctttcagttacagctctctcctttctcagcacaagaggatccacacaggggagaaaccctatgtgtgtgataggtgtgggaaggccttcaggaacagctcaggcctcacagtgcataaaaggatccacacaggtgagaaaccctatgaatgtgatgagtgtgggaaggcatacatctcacactcaagtcttatcaatcataaaagtgtccaccaggggaagcagccctataattgtgagtgtgggaaatccttcaattatagatcagtccttgaccagcacaaaaggatccacactggaaagaagccataccgatgtaatgagtgtggtaaggcttttaatatcagatcaaatctcaccaagcataaaagaacccatactggagaggaatctttaaatgtgatatatgtgggaagttatagtggcacatcccagaagagaacctatgagggagggaatgccctggatgggggcaggatgaggatgcctctgtagcaggcagagcttaccaagtctctccgaactcaaatggaagaaataccttatgaatgtaagaatgtagggggtcatggcttgtaatttacacagtgtaaatgaaaccatcctagaggattatgaggaatcctttctatgtgattttcaatcatagcaagcaagaaaggctccagtgtcaaggtagttcagctcttacaggatataaaacagtccatacttgagagaaaaacttagatctgagtgatggaatgtgaagcaaatcttcaaaatcagtagacatttctggacataaaacacagatgaggaaagggcttcaattagaagttacgtaatcaccatcagaaagttcatgtttggtaaattctgttactagaaatgtaggaaattcaggtatagctttgaatcccaattacacattggtcagtgggaaaactaagggcctccaacaggcaaattcagggaggataggtttcagggaatataaatttatttaatattagtggtctttaagtataaacttgatgtaattggtttgggagggggcagtgatgatgacttctgaaacaaaatttggatttccttttaggaaaagtagaaagcatagacttacaagtctaacaggagataggagagagtcactcataaaaaatgcaaattgatgaacgtactattgtgatacattagttgaatggatgaaacttttttaaagtttcagatgaactcccataatgaatgatgaatttgtgatgagggataacctggaagtggtattcacacattatgctacaataaaaggttctaccgtggagaggattttgacacattcagtaactaatggaacacaccgtcaacatgaattcgcaccttacatgacagaagtgattcagggattcctatgaatagaaatgctgagaaggaacgcattttattgcagaagctaaaaagctaaagtaccagtcatctagagagaaggaaattaatgtttcttaataatcctgttaaatgtttgattgtttttggaatgtgttattgtaaagatgtcatgcaggacatgtatatgttgtctgttgtaaaatgttaacgaatactttgttcagggctcactctctctttgtcatgaaagccagctccttgtggcgaggtaaagtggaattccaataaagaaattccttaaatc

SEQ ID NO: 31279 - DNA, 1660 bp, Homo Sapiens
gccaggaaatgccctggagtgtgtgtcacctgtccaggacgacttgttgattcccaggagggccgcctttccggtctgggtccccgagaggactgccttgctcacctgtcccctcggcgcggccccggggagctcccgagaggcccccgggatcgctggccctccgaactccacagcaatgagcaagttgggcaagttctttaaagggggcggctcttctaagagccgagccgctcccagtccccaggaggccctggtccgacttcgggagactgaggagatgctgggcaagaaacaagagtacctggaaaatcgaatccagagagaaatcgccctggccaagaagcacggcacgcagaataagcgagctgcattacaggcactaaagagaaagaagaggttcgagaaacagctcactcagattgatggcacactttctaccattgagttccagagagaagccctggagaactcacacaccaacactgaggtgttgaggaacatgggctttgcagcaaaagcgatgaaatctgttcatgaaaacatggatctgaacaaaatagatgatttgatgcaagagatcacagagcaacaggatatcgcccaagaaatctcagaagcattttctcaacgggttggctttggtgatgactttgatgaggatgagttgatggcagaacttgaagaattggaacaggaggaattaaataagaagatgacaaatatccgccttccaaatgtgccttcctcttctctcccagcacagccaaatagaaaaccaggcatgtcgtccactgcacgtcgatcccgagcagcatcttcccagagggcagaagaagaggatgatgatatcaaacaattggcagcttgggctacctaaactaaaacacatttttgatacctaaattaatgagctatagataaaatataaaaaatgtttttaccaagttcagaagttaacaaagactctgctttataattatattgaatgaataattgtgttttaagcctcctaagtaaaagtaaaaaaggagtcatgtgcatacatagaatcagtgatggaggccaggcacggtatctcatgcctataatcccagcactttgggaggctgaggcagttgagaccaggagttcgagtccagcctgaccaacatgaagaaaccctgtctgtactaaaaatacaaaaattagccggacatggtggcaggcacctgtaatcccagctacttgggaggctgagtcaggagaatcgcttgagcccaggagatggaggttgcagtgagccaagatcatgccactgcactccagactgggcaacagagggagactccgtctcaaaaactaaaaaaaaaaaatacatttagtatagcggggggtgggggggagaaataatgttatttcctatgcgaatgacgtgtatccctgtacccatggtaaatgtaaatatactgtgtctcttttgggagagccttttagtagaggagtcttatatgagtctctacataagtagtttcacttgagttttgcagtttgaaatcttaaaggagctttaattgacatttattataccaattaagcttggaatggggcaatggatgcatttcccaaaacgtgtgaaagcactaacagcttatattgctgaatgagaatctcctgggtg

SEQ ID NO: 31280 - DNA, 3548 bp, Homo Sapiens
cccacgggtgttagtggcgggggcggcagagtccgggtgggttgtcgcgacggagccgggcctcttcgccgtcttgagacggggctggcgagaagggcccctcacggagttgccatgggcgtctaaccgcggcagccaggcccctctctacgtgagaccccggcccccctcccctttctgcagcccgcccgccacctgcgcgccgcgtggcctccgccggcgcctgcccgccccgcgcctccgtctcccacggagcaggccgggctctcgccatgggtcactgtcgcctctgccacgggaagttttcctcgagaagcctgcgcagcatctccgagagggcgcctggagcgagcatggagaggccatccgcagaggagcgcgtgctcgtacgggacttccagcgcctgcttggtgtggctgtccgccaggaccccaccttgtctccgtttgtctgcaagagctgccacgcccagttctaccagtgccacagccttctcaagtccttcctgcagagggtcaacgcctccccggctggtcgccggaagccttgtgcaaaggtcggtgcccagcccccaacaggggcagaggagggagcgtgtctggtggatctgatcacatccagcccccagtgcctgcacggcttggtggggtgggtgcatggacatgcggccagctgcggggccctgccccaccttcagaggacactgtcctccgagtactgcggcgtcatccaggtcgtgtggggctgcgaccagggccacgactacaccatggataccagctccagctgcaaggccttcttgctggacagtgcgctggcagtcaagtggccatgggacaaagagacggcgccacggctgccccagcaccgagggtggaaccctggggatgcccctcagacctcccagggtagagggacagggaccccagttggggctgagaccaagaccctgcccagcacggatgtggcccagcctccttcggacagcgacgcggtggggcccaggtcgggcttcccacctcagccaagcctgcccctttgcagggccccagggcagttgggtgagaagcagcttccatcttcaacctcggatgatcgggtaaaagacgagttcagtgacctttctgagggagacgtcttgagtgaagatgaaaatgacaagaagcaaaatgcccagtcttcggacgagtcctttgagccttacccagaaaggaaagtctctggtaagaagagtgaaagcaaagaagccaagaagtctgaagaaccaagaattcggaagaagccgggacccaagcccggatggaagaagaagcttcgttgtgagagggaggagcttcccaccatctacaagtgtccttaccagggctgcacggccgtgtaccgaggcgctgacggcatgaagaagcacatcaaggagcaccacgaggaggtccgggagcggccctgcccccaccctggctgcaacaaggttttcatgatcgaccgctacctgcagcgccacgtgaagctcatccacacagaggtgcggaactatatctgtgacgaatgtggacaaaccttcaagcagcggaagcaccttctcgtccaccaaatgcgacattcgggagccaagcctttgcagtgtgaggtctgtgggttccagtgcaggcagcgggcatccctcaagtaccacatgaccaaacacaaggctgagactgagctggactttgcctgtgaccagtgtggccggcggtttgagaaggcccacaacctcaatgtacacatgtccatggtgcacccgctgacacagacccaggacaaggccctgcccctggaggcggaaccaccacctgggccaccgagcccctctgtgaccacagagggccaggcggtgaagcccgaacccacctgaggacggcagtgaggatgagcacctctagcagcctggactccgcagtggctgtgtcagcctcacccttcgtgtgcacccgcatgggagggtcggagggtgctgcccgcccttggtgctggaggcgggcttggtgtccggctcaagtagccttcctctgctctgggaccagtggtttattttcccgcaaacgctgagtgactcggggccggacagttcataaataattgattcctttccccactaaagcagtcgaggagatttgtaatccactttttagtgcaacaagagctccatgttatgcttgtaataaattatttacacgggagctgggctggtgtgcagtggcaggtcccgtcagaagagatgaggctcctgggacaggtcagcgtcaggggcagcctgctgtctgctctggagggcggcgctcacctctgggtcgcagtccccacgatcagccagcagctgtgagagaggagcaggtcctcagcccatgccgcccactaggcctcagaccacaggggaggggctctggcagaaatagtcgagttgtattgccagccaggcaggcacatggcccaggcagctgtcaattctcatgtcccccacatggcccaaggtgggcatcttgacgttacctctgccacgtgtgagaagctctttttcgggcaccgaggtattaactgcagcagaaaaagacgagcttttgttatcagttccacggggttgccctagagagaaaacaggcaaactcacaggttagaagacatacagaaacagggctggtgtgtcccccatagtctgcatgctgtgccggaacattctttggcagaaggagcctccggctggggggagctcccctggaggtgggactggcccttgcacctgcctgacccttgagctccaggctcctgccagctggaggtgaaactgtgcttgtatccccagccacgaagagctggaccagcttcaagtacatgtccacagcaacatgcaggaaggcctcttccctgatggccgcgtcttcatggaagtaggagagaagactagaggtaaagacatagtgacaaatggctacagactgctggaaaggtagcaggtgatgccaagggatactgctcatctgtggagcagaggcacagacaacccttcccatctggcgggacccagaggtgctgagatgggggtctgggaaacactgcccagccctgaccagccctgtgggtggaggtacctgtaaaaagcgaaaggcagcagcctggtgtgctgatccggggccacacggaggaggagccgccccagcctgaggtctgcaacaccaagaagtggctcaggcaactctggacatctctgcctattatcagtgctggggacacccctgggggtcgggacgtgtaccctgggaggcctggctgtggggatagtgtggggcgaacagcctgagctgaggatacccaggtacctgtcagcagctgggagaggatgggggggtcgacctcttgcaggagggtgggtgtggtgcagagagaggcagtccccatgataggcccattggtcctggggttgaccagtgagccagtaaattatcttattgctttaaacaagtttgtgcttaatctgtcccaactaaaatggagcttataaacttacttagcaagg

SEQ ID NO: 31281 - DNA, 3462 bp, Homo Sapiens; identical to SEQ ID NO: 26823

SEQ ID NO: 31282 - DNA, 3711 bp, Homo Sapiens; identical to SEQ ID NO: 26613

SEQ ID NO: 31283 - DNA, 2020 bp, Homo Sapiens
gaactagtggcgggctgaggacgccgtacccctcggaaggcagccctgcggtccctttgccgcccgttccctcccggacatggaggacgtggaggcgcgcttcgcccacctcttgcagcccatccgcgacctcaccaagaactgggaggtggacgtggcggcccagctgggcgagtatctggaggagctggatcagatctgcatttcttttgacgaaggcaagaccacaatgaacttcattgaggcagcgttgttgatccagggctctgcctgcgtctacagtaagaaggtggaatacctctactcactcgtctaccaggcccttgatttcatctctggaaagaggcgggccaagcagctctcttcggtgcaggaggacagggccaatggggttgccagctccggggtcccccaggaggcagagaatgagttcctgtcgctggatgacttccctgactcccggactaacgtggatctcaagaatgatcagacgcccagtgaggtcctcatcatccccctcctgcccatggccctggtggcccctgatgaaatggagaagaacaacaatcccctgtacagccgtcagggtgaggtcctggccagccggaaggatttcaggatgaacacgtgcgttccccaccccagaggggccttcatgttggagccagagggcatgtcccccatggaaccagcgggcgtttcccccatgccagggacccagaaggacaccgggaggactgaggagcagccaatggaagtttccgtgtgcaggagccctgtcccagcactcggcttctcccaggagccaggcccctctccagaaggcccgatgcccctgggtgggggcgaggacgaggatgcagaggaggcagtagagcttcctgaggcctcggcccccaaggccgctctggagcccaaggagtccaggagcccgcagcagagtgctgccctgcccaggaggtacatgctgcgggagcgggagggggccccagagcctgcatcctgcgtgaaggagactccagacccctggcagagcctggacccctttgactccttggagtctaagcccttcaagaaaggtaggccttactctgtgcccccctgtgtggaggaggctctgggacagaagcgcaagaggaagggcgctgccaagctgcaggacttccaccagtggtacctggctgcctatgcagaccatgccgacagcaggcggcttcggcgaaagggtccgtcctttgcagacatggaggtcctgtactggacacacgtgaaggagcagttggaaactctccggaagctgcagaggagggaggtggctgagcagtggctgcggcctgcagaggaggaccacctggaggattccctggaagacctgggggcagcagatgactttctagagcctgaggagtacatggagcccgagggagcagaccccagggaagccgctgaccttgacgcagtgccgatgtccctgagctacgaggagctggttcgaaggaatgtggagctcttcatcgccacctcccagaagtttgtccaggagacagagctgagccagcgcatcagggactgggaggacacagtgcagcctctgctccaggagcaggagcagcatgtgccctttgacatccacacctatggggaccagctggtctcacggttcccccagctcaatgagtggtgtccctttgcggagctggtggctggccagccggccttcgaggtgtgtcgttccatgctggcctccctgcagctggccaatgactacacagtggagataacccagcagcccgggctggagatggccgtggacaccatgtccctgagactgctcacgcaccagcgagcgcacaagcgcttccagacctacgctgccccctccatggcccagccctgagtggggagcaccgaggcaggggtgggggaatgtgtactgaggagccgtgcgtctgctcctggctggcccggcctaataaagcagtgttgccatctcaaaaaaaaaaaaaaaaaaaaaaaaaaa

SEQ ID NO: 31284 - DNA, 3538 bp, Homo Sapiens; identical to SEQ ID NO: 24989

SEQ ID NO: 31285 - DNA, 1714 bp, Homo Sapiens
atcagcgggcacggagccggaagtgttgtggccgccgccgccgcgcgtcgcggaggcacgtgtggagccccggcagcaggagcgtcgcaggtccttggcccttgccagacattagcaccatgagcttcgtggcatacgaggagctgatcaaggagggtgacacggccatcctgtcactgggccatggtgcaatggtggcagtgcgtgtgcagcgtggggcacagacccagacccggcatggtgtcctgcggcactcagttgaccttatcggccgccccttcggctccaaggtgacgtgcggccgaggtggctgggtgtatgtgctgcaccccacgcccgagctctggacgctgaacctgccgcaccgcacgcagatcctctactccacagacatcgccctcatcaccatgatgttggagcttcggcccggctctgtggtctgtgagtctggcaccggcagtggctctgtgtcccacgccatcatccgcaccattgcacccacgggtcacctgcacacggtggagttccaccagcagcgggcagagaaggcccgggaggagttccaggagcaccgtgtgggccgctgggtgactgtgcgcacccaggacgtgtgccgcagtggctttggcgtgagccacgtggccgacgccgtcttcctggacatcccatcaccctgggaggccgtgggccacgcctgggacgccctcaaggtcgaaggcgggcgcttctgctccttctcaccgtgcatcgagcaggtgcaacgcacatgccaggcgctggcagcgcgcggcttctcagagctgagcaccctggaggtgctgccacaggtctacaacgtgcgcactgtcagcctgccaccgcccgacctgggcacaggcacagatggccctgccggctccgacaccagccccttccgcagcggcacgcccatgaaggaggccgtgggccacaccggctacctgaccttggccagaagctggggtgagctgacccagaatccctgccctgctctccccagcgctaggagaccaggccagcccaggaaccagggaggtgaccctgctctctggcctcctggctgatgtcacagcactgagctcagcccaggccttcgtccactcatgtccaagaggcggggcatcccccacccagccagagcccctgacatgggctgcactcgctgaggccaggcagcgctgcggagaggagcggcagagtgggttgtctgccgcaggcaaccaggcaagtgtgtcggggctggggtgtgaatgccagcctgtgagtcccggaactatgtgggtacccctacccctcacagaagccaagggcatggaggaggtccctccacagtgacaacggtgtggggtaggggaggtgcattcaggacaccacccagggacagtgcctatgtgatcacctcttaaaggctaagcttaggggcatttcccaaagtggggacagagggcaggacgcccaggctgggggctctcctcgcccgccctggtgtctgacagcctcaaggaaggagcagtgcctgtgtcagccatggggcccttggagctgccactggtgcctagggggcctgggtttctgcccaggcagccagtggctgttgggagcctctgtttcccctgtgctgggggccttgagtgctatgctagcaggggcctggccccaagtgtgagtgatgagcaataaacgtaccgtccccctc

SEQ ID NO: 31286 - DNA, 4817 bp, Homo Sapiens
gaagcgccagagcggcggccggtcccgcgcggagcccggcgcccctccagcccgagccaggacgccgccggccccggtcccggccccgggcacgcagcgagccagggatgtgagcggcgccccgcggcatggcagcctcaggggtgcccagaggatgcgacatcctcatcgtctacagcccggatgccgaggaatggtgccagtacctgcagaccctgttcctgtccagtcggcaggtccgcagccagaagatactgactcacaggctgggccccgaggcctccttctcggcagaggacctaagccttttcctcagcacccgctgtgtcgtggtgctgctgtccgcggagctggtgcagcacttccacaagcccgccttgctgcccctgctgcagagagctttccatcctccgcaccgcgtggtcaggctgctctgcggcgtgcgggacagcgaggagttcctagacttctttccagattgggcccattggcaggagctcacctgtgacgatgagccagagacctacgtggcagctgtgaaaaaagccatttccgaagattctggctgtgactcagtcactgacactgagcctgaggacgagaaggttgtttcctactcgaagcagcagaacctgccgacggtgacttcacctgggaacctgatggtggtgcagccggaccgcattcgctgtggggcagaaaccactgtctatgttattgtgagatgtaagctggatgacagggtggcgacagaagcagagttttctcctgaggattctccctctgtaaggatggaagccaaggtggagaatgagtacaccatttcagtgaaggctcccaacctttcatctgggaacgtttctctgaagatatattctggagacttagtggtgtgtgaaaccgttatcagctattatactgacatggaagaaattgggaatttattgtccaatgccgcgaatcctgtggaattcatgtgtcaggcctttaaaattgtgccctacaacacagagacccttgataaactgctaaccgaatccctgaagaacaatatccctgcaagcggactgcacctctttggaatcaaccagctggaagaagaagatatgatgacaaatcagagggatgaagagctgcccaccctgttgcattttgctgcgaagtatggactgaagaacctcactgccttgttgctcacctgcccaggagccctgcaggcgtacagcgtggccaacaagcatggccactaccccaacaccatcgctgagaaacacggcttcagggacctgcggcagttcatcgacgagtatgtggaaacggtggacatgctcaagagtcacattaaagaggaactgatgcacggggaggaggctgatgctgtgtacgagtccatggcccacctttccacagacctgcttatgaaatgctcgctcaaccccggctgtgacgaggatctctatgagtccatggctgcctttgtcccagctgccactgaagacctctatgttgaaatgcttcaggccagtacatctaacccaatccctggagatggtttctctcgggccactaaggactctatgatccgcaagtttttagaaggcaacagcatgggaatgaccaatctggagagagatcagtgccatcttggtcaggaagaagatgtttatcacacggtggatgacgatgaggccttttctgtggacctggccagcaggccccctgtcccagtgcccagaccagagaccactgctcctggtgctcaccagctgcctgacaacgaaccatacatttttaaagtttttgcagaaaaaagtcaagagcggcctgggaatttctacgtttcctcagagagcatcaggaaagggccgcccgtcagaccatggagggacaggccccagtcgagtatatatgacccttttgcgggaatgaaaacgccaggccagcggcagcttatcaccctccaggagcaggtgaagctgggcattgtcaacgtggatgaggctgtgctccacttcaaagagtggcagctcaaccagaagaaacgatcggagtcctttcgtttccagcaggaaaatcttaaacggctaagagacagcatcacccgaagacagagagagaagcaaaaatcaggaaagcagacagacttggagatcacggtcccaattcggcactcacagcacctgcctgcaaaagtggagtttggagtctatgagagtggccccaggaaaagtgtcattccccctaggacggagctgagacgaggagactggaaaacagacagcacctccagcacagcaagtagcacaagtaaccgctccagcacccggagcctcctcagtgtgagcagcgggatggaaggggacaacgaggataatgaagtccctgaggttaccagaagtcgcagtccaggccccccacaagtggatgggacacccaccatgtccctcgagagaccccccagggtgcctccgagagctgcctcacagaggcctccgaccagggagaccttccatcctcctccacctgttccacccagaggacgctgattccacctcctaaaacctgcctacttcaggactttaagactcacagtcttcagcctgttaatgatgtcttcatgttgagttttatagcatgactgttgaccttaagatccattctcattgctgataatgctgcagccctgctggtttgggcttgcctcgaagattttattaaggcacgaagaagtgaaaaactaagggcttcattcaccatcaccaagtatatcgaaccatatacttgtttgccaaaaggatgaagacttaatcgaaatacttacctctaatttgccatatcagaagcctaaaaagaatgatcataaatgtacttcaccagtgattttactgaaatgcacttatattagtctttatgtatttgctagttcagcctgatttctagaagaggttatagtgtgagacttgtagtattcaagtaagataagtgacctaattttaaaataattcttctacttttctgtatattcagcagggtatttaagtgctagggctggtcacacacaaccaactgaaaaagactagagggattagtacaaactcctcttatacagaaggcaaatctgaggttccacagaagtctggaaccaagactattcagttggttaaataaagaggttagtctagactgggcctgctcattctaggtcaccacattttccatctccaaatagccaggccctctctccctcaagaaatgcccagatgtagaaattcatcagtgcctattggtcttccagaattttccatcttccgtatctcccaggcatgagactaccaagtttgtttgttttctttccaatttgggaatttatacttcagtatggtttcaacgcagttatgtttccagagaacatctagaagtggctggaaaccagaagctggggattccagggaccccacttagtgctctatttcctttataggttttatttctggtcatagagagagaaggacctttgactttttcttcgttgaggcttctgaggaggaaaaacaaacctaaaatagaaatacagtcagcctttcaaatccatgggttctgtgtccgtggattcaaccaaccttggatcaaaaatatttgaaaaaaaatctacaaagtttcaaaaagcaaaacttgaatttgctgcatgccaagaagtatgttgaattcatgtaaatgaagtgatgtgtaggcattgtattagatattataagaaatctagaaatgatttaaagcatacaggaggatgtgcataggttatatgcaaatactatgctattttatatatgggacttgagcatttgtggattttgatactgggggatcctggaaccaatcccccatggataccaaagtacgactgtagttatctattttttacatacttattattaccaccatgctcagtaagtccatttttgcatggaatatggagccttaaaacatgtcatgaatttggagtccctggcacataaatctaccttcaaatcagaggtccttaatgatgcctaaacatacagtaaaattagaatcagaaatacttctttaaaaaatattcaaaatgtgtttgtttcccatgggattattctctatcccacacgaatgtaaaaaaatccacattaatgatccatttaagtatagttttattgggtccttttctaatgattaaaggttctttctcaatttcattcctcagtcctgcaagtaaggactcatactgaagagtactgaaacaaggacttcttgtcagaaacagcttctggaatcttgggttttgtttttgttttttgacaaaatacactattggccatgtccatcacgagagtgtttgtagtaattaattaccttgtacaggacctggcacttagtagcattcttcaaatgttccctcagtgatccttttactctccttgtcacttatttgggagaaataggggcacgtgagataagaagaagaataattttgatgttggtatgcttgccctgttacttatagacagtctttgtcataggcaaacttgaatttgatttaaaatagggctgggaaaaatattcaataactgtaagcccccttttggatgccaaacttagaattttgtacattctctgatgaacaagcatttagatcgtaacatggtaaagcctattaccagccaatgttgttagcatctttgtatgcacatcactgtttgtgcaatatatgaatattttgttgcattgtattcttatataaaaataagtagaaaacataaaattgaaattgctgatgagaaaaaaaa

SEQ ID NO: 31287 - DNA, 2493 bp, Homo Sapiens
ccctccgggcaggggaggtaggcctgggcctgacgccggccacgcagcggcgggagagtgagcactcgggcggcggcgtcctggagacccgcgagagatggaagcggcggcgacgccggcggctgccggggcggcgaggcgcgaggagctagatatggatgtaatgaggcccttgataaatgagcagaattttgatgggacatcagatgaagaacatgagcaagagcttctgcctgttcagaagcattaccaacttgatgatcaagagggcatttcatttgtacaaactcttatgcaccttcttaaaggaaatattggaactggccttttaggacttccattggcaataaaaaatgcaggcatagtgcttggaccaatcagccttgtgtttataggaattatttctgttcactgtatgcacatattggtacgttgcagtcactttctatgtctgaggtttaaaaagtcaacattaggttatagtgacactgtgagctttgctatggaagtgagtccttggagttgtcttcagaagcaagcagcatgggggcggagtgtggttgacttttttctggtgataacacagctgggattctgtagtgtttatattgtcttcttagctgaaaatgtgaaacaagttcatgaaggattcctggagagtaaagtgtttatttcaaatagtaccaattcatcaaacccttgtgagagaagaagtgttgacctaaggatatatatgctttgctttcttccatttataattcttttggtcttcattcgtgaactaaagaatctatttgtactttcattccttgccaacgtttccatggctgtcagtcttgtgataatttaccagtatgttgtcaggaacatgccagatccccacaaccttccaatagtggctggttggaagaaatacccactcttttttggtactgctgtatttgcttttgaaggcataggagtggtccttccactggaaaaccaaatgaaagaatcaaagcgtttccctcaagcgttgaatattggcatggggattgttacaactttgtatgtaacattagctactttaggatatatgtgtttccatgatgaaatcaaaggcagcataactttaaatcttccccaagatgtatggttatatcaatcagtgaaaattctatattcctttggcatttttgtgacatattcaattcagttctatgttccagcagagatcattatccctgggatcacatccaaatttcatactaaatggaagcaaatctgtgaatttgggataagatccttcttggttagtattacttgtgccggagcaattcttattcctcgtttagacattgtgatttccttcgttggagctgtgagcagcagcacattggccctaatcctgccacctttggttgaaattcttacattttcgaaggaacattataatatatggatggtcctgaaaaatatttctatagcattcactggagttgttggcttcttattaggtacatatataactgttgaagaaattatttatcctactcccaaagttgtagctggcactccacagagtccttttctaaatttgaattcaacatgcttaacatctggtttgaaatagtaaaagcagaatcatgagtcttctatttttgtcccatttctgaaaattatcaagataactagtaaaatacattgctatatacataaaaatggtaacaaactctgttttctttggcacgatattaatattttggaagtaatcataactctttaccagtagtggtaaacctatggaaaatccttgcttttaagtgttagcaatagttcaaaaaattaagttctgaaaattgaaaaaattaaaatgtaaaaaaattaaagaataaaaatacttctattattcttttatctcagtaagaaataccttaaccaagttatctctcttttatgctactcttttgccactcacttgagaacagaataggatttcaacaataagagaataaaataagaacatgtataacaaaaagctctctccagatcatccctgtgaatgccaaagtaaactttatgtacagtgtaaaaaaaaaaaatctcagttatgtttttattagccaaattctaatgattggctcctggaagtatagaaaactcccattaacataatataagcatcagaaaattgcaaacactagaattaattttacactctaatggtagttgatcttcatagtcaagaggcactgttcaagatcatgacttagtgtttcaatgaaatttgaaaagggactttaaaacttatccagtgcaactcccttgtttttcgtcagaggaaaaggaggcctagaaaggttaagtaacttggtcgagaccactcagccttgagatcaagaaaacctaatcttttgactcccaggccaggatgttttatttctcacatcatgtccaagaaaaagaataaattatgttcagcttaaaaaaaaaaaaaaaaaaaaaaaaaaaaaa

SEQ ID NO: 31288 - DNA, 1953 bp, Homo Sapiens
gccagttaagaactcacaggtacttttccagccacccagataggagagatcattaaaacagtgcattctgtgctacctgacacctattggctttggtctgctctaaacttatccatctctgtccattactggaacaactccgcaaagtccttattccctaaaacatcactgataccattaaagccactaacagagactgaactcagaataaaggaaatcatagagaaactagatcagcagatcccacccagacctttcacccatgtgaacaccaccaccagtgccacacacagcacagccaccatcctcaaccctcgagatacatactgcaggggagaccagctggacatcctactggaggtgagggaccacttgggacagaggaagcaatatggtggggatttcctgagggccaggatgtcctccccagcactgacggcaggtgcttcaggaaaggtgatggacttcaacaatggcacctacctggtcagcttcactctgttctgggagggccaggtctccctgtctctgctgctcatccaccccagtgaaggggcgtcggctctctggagggcaaggaaccaaggctatgataaaattattttcaaaggcaaatttgttaatggcacctctcatgtcttcactgaatgtggcctgaccctaaactcaaatgctgaactctgtgaatatctggatgacagagaccaagaagccttctattgtatgaagcctcaacacatgccctgtgaggctctgacctacatgaccacccggaatagagaggtatcttatcttacagacaaggaaaacagccttttccacaggtccaaagtgggagttgaaatgatgaaggatcgtaaacacattgatgtcactaattgtaacaagagagaaaaaatagaagagacatgccaagttggaatgaagcctcctgtccctggtggttatactttacaaggaaaatggataacaacattttgcaaccaggttcagttagacacaattaagataaatggctgtttgaaaggcaaactcatttacctcctgggagactctacactacgtcagtggatctactacttccccaaagttgtaaaaacactgaagttttttgatcttcatgaaactggaatctttaagaaacatttgcttctggatgcagaaagacacactcagattcaatggaaaaaacatagctatcccttcgtcactttccagctctactctctgatagatcatgattatatccctcgggaaattgaccggctatcaggtgacaaaaacacagccatcgtcatcacctttggccagcactttagaccatttcccattgacatttttattcgcagggccatcggtgttcaaaaggctattgaaagactgttcctaagaagcccagccactaaagtgattattaagacagaaaacatcagggagatgcacatagagacagagaggtttgtagacttccatggttatattcactatcttatcatgaaggatattttcaaagacctcaacgtgggcatcattgatgcctgggacatgaccattgcatatggcactgacactatccacccacctgatcatgtgattggaaatcagattaacatgttcttaaactacatttgctaagggataaatactatacaaaatcactaggaaccaatctctgcacataatcccacatgtattgtaaagtaagttttactcattttaggaactaaggaaaataaatttaaaagaatctgtttggggaggaaggctatgtaaggacaatgacaactgataagggatgcaaaaccaagagaatcattcatgaagaatgactataccatgcctggttctgatgctcgtttaaaatattaaaaaagttttttaaaagccaaaaaaaaaaaaaaaaaaaaaaaaaaaaaaaaaaaaaaaaaaaaaaaaaaaaaaaaaaaaaaaaaa

SEQ ID NO: 31289 - DNA, 1626 bp, Homo Sapiens
gacggtcccgctgtcctgcctggccggggccgcactgcgccgcccgccgcccgccgcccgccgcccgccgccggcgacggcaccgccgccctgcgatccggccgcggcggctcagagcgcggctgcggcgggcgcgggcggcggtggctccctcccgtgcgtccgtcgtgggacctttgcccgctcgcccgcgggggacagcgcgcgctccggtccgcggcaggggcggggacgcccggcctgtggcccccgcgccccccatggcctggctctgccgtggcttgctgaccttggagaattggagaagcttgtgccctgctggaaagtgggatggcagtacccgcttcatctagtagtcggggagatcaagagaggtatgggacctgaagaggatggcagactgtgcagtgcggtgcacaccggtctccaggttgttttcaccctcctatctcctcccaggagctaacgtataaagctgaggctcggccagggactgtgatatacccacatccccggaactaggtgatcgcggtgcaggaaccaggtgtgccttcgcgggatccatgccttgaggcccaggaacgccccgccgccagcatgccgtgggacgcgcggcggcctgggggtggcgcggacggcgggcccgaggcctcgggcgcggcgcgctcgcgagcgcagaagcagtgccgcaagtcgtcgttcgccttctaccaggcggtgcgcgacctgctacccgtgtggctgctggaggatatgcgcgccagcgaggccttccactgggacgagcgcgggcgcgccgccgcctactcgccctctgaggcgctgctctacgcgctcgtgcacgaccaccaagcgtacgcgcattacctgctggccacgttcccgcggcgcgcgctcgcaccgcccagtgccggcttccgctgctgcgcggctcccgggccgcacgtggcgctggcagtgcgctacaaccgcgtgggcattctgcgccgcatcctgcgcaccttgcgcgacttcccggccgaggagcgggcgcgcgtgctggaccggcgtggctgcagccgcgtggagggcggtggcacgtcgctgcacgtggcctgtgagctggcgcgccccgagtgcctcttcctgctgctgggccacggcgcctcgcccggtctgcgggacggcggcggcctcacgcctctcgagctgctgctgcgccagctgggccgcgacgccggggccactccctccgccgccggagcccccgcctcagctcccggggagccgcgccagcgccgcctgctgctgctggacctcctggcgctgtacacccccgtgggtgccgccggctcggcccgccaggagctgctgggcgaccggccgcgctggcagcggctgctgggtgaggacaagttccagtggctggcgggcctggcgccgccctcgctcttcgcgcgcgccatgcaggtgctggtcaccgccatctctccaggccgcttccccgaggccctggacgagctgccgctgcccccattcctgcagccgttggacctcactggcaaaggctaggcccggagcaccctaggcgctggattttgggacaaaactatttttcagagcgttgtaccggcactttatatatat

SEQ ID NO: 31290 - DNA, 2649 bp, Homo Sapiens
aagcgagtggcgctttcaccttagcaaccagcgcggctcccaccatggctgaagaagaggaaactgctgctctcacggagaaggttatccggacccagagggtgtttataaacctgttggattcctacagcagcggaaacatcgggaagtttctatctaactgtgtagttggggcttcgcttgaagaaattacagaggaagaggaagaggaagatgaaaataagtcagctatgctggaagcttcctcaaccaaagtgaaggaaggcacattccagattgtgggcacgctgtccaagcctgacagcccgcggcctgactttgcggtggagacgtactctgccatctctcaagaagaccttctcatgcgcctgctggagtgtgatgttattatttataacatcactgagagctcacagcaaatggaggaagccatctgggcagtctctgcactcagtgaagaagtcagccactttgaaaagcgaaagctatttattttactgtcgacggtgatgacttgggcgcgctccaaagccctggaccccgaggattctgaggttccattcactgaagaagattatcgaagaagaaagtctcatcctaattttctggaccacataaatgctgaaaaaatggttctcaaatttggaaaaaaggccagaaaatttgcagcatacgtagttgctgctggactccagtatggagcggaaggaggcatgttacacacattttttaagatggcttggttgggcgagattcctgcattaccagtttttggcgatggaacaaatgtaattccaacaatccatgttcttgatctagcaggagtgatacaaaacgtcatagatcacgtgccaaagcttcactacctggttgctgtggatgagtctgttcataccctggaagacatagtcaagtgtatcagtaaaaatactggccctgggaaaatccagaaaatacccagagaaaatgcatacctaaccaaggacttaacgcaagattgtcttgaccatttactggtcaacttaagaatggaagcgctctttgtgaaggagaattttaatattcgatgggctgcccaaacaggatttgtggaaaatatcaacactatcctcaaggagtacaagcaaagcagaggattgatgccaatcaagatctgcattcttggtccccctgctgtgggaaaatccagtattgctaaagaattggccaagtactacaaactgcatcacatccaactgaaggatgtcatttctgaagccatagcaaaactgggggcgattgttgcccctaacgatgtaggggaaggagaagaagaagtcgaagaggaagaggaggaggagaatgtggaagatgcacaggagctcctagatggcatcaaggagagcatggagcagaatgcaggtcaactagacgatcaatatataattagatttatgaaagaaaagctaaaatcaatgccttgcaggaatcaaggttatattttggatggattcccaaagacctatgatcaagcaaaagacctgttcaatcaggaagatgaggaggaggaagatgatgtcagaggcagaatgtttccctttgataaattaattatacctgaattcgtttgtgcactggatgcttcggatgagtttctgaaggagcgtgtgataaaccttcctgagagcatcgtggcggggacccactacagccaagaccgattcctccgggctctgagcaactaccgggacatcaatatcgacgatgagactgtcttcaactattttgatgaacttgaaattcacccgatacatattgatgtaggaaaacttgaagatgctcagaatagacttgctatcaaacagctcatcaaagagattggggagcctcgaaattatggtttaacagacgaagaaaaggcagaagaggagcggaaggctgcggaggagcggctggccagggaggctgctgaggaagcagaacgcgagcaccaggaggccgtggagatggcagagaagatagctcgctgggaggagtggaataaacgactggaggaagtgaaaagagaagaaagagaattactggaggctcagtcaattcccctgagaaactatttaatgacctatgtgatgccaactcttattcagggcctgaatgaatgttgcaacgtccgacccgaagaccctgttgattttctggcagaatatctcttcaagaacaatcctgaagcacagtgaaacttgaaagatctggtattatctacctttacagaaccacagatcacttattatactttgaaaaattgctttgaaaaatgcttttccagttcttagaaaattctttttttgtagacaaatattctataaactagaatctctattaaaagctatatgacatgactatgtcattaaaactatatttgaaatgtaaattgataaagacatttgtgcatagctcatgagacaaatactgatttaatattttattctttagtcagatctaaatataccgcttctgtacactaatgtttataggtatttatagcatgaagaaaatcagactatatattgtagactatgtattattctaacatgtaggctgatttacatgacttgttatcgccccaataacaatgttattagaaatggaaataaattgaagtgatttatg

SEQ ID NO: 31291 - DNA, 1399 bp, Homo Sapiens
gaattccccgctccggctccaagatgtcagcaacgctgatcctggagcccccaggccgctgctgctggaacgagccggtgcgcattgccgtgcgcggcctggccccggagcagcgggttacgctgcgcgcgtccctgcgcgacgagaagggcgcgctcttccgggcccacgcgcgctactgcgccgacgcccgcggcgagctggacctggagcgcgcacccgcgctgggcggcagcttcgcgggactcgagcccatggggctgctctgggccctggaacccgagaagcctttttggcgcttcctgaagcgggacgtacagattccttttgtcgtggagttggaggtgctggacggccacgaccccgagcctggacggctgctgtgccaggcgcagcacgagcgccacttccccccgccaggggtgcggcgccagtcggtgcgagcgggccgggtgcgcgccacgctcttcctgccgccaggacctggacccttcccagggatcattgacatctttggtattggagggggcctcttggaatatcgagccagcctccttgctggccatggctttgccacgttggatcttcaaagttataactttgaagatctccccaataacatggacaacatatccctggagtacttcgaagaagccgtatgctacatgcttcaacatccccaggtaaaaggcccaggcattgggcttttgggcatttccctaggagctgatatttgtctctcaatggcctcattcttgaagaatgtctcagccacagtttccatcaatggatctgggatcagtgggaacacagccatcaactataagcacagtagcattccaccattgggctatgacctgaggagaatcaaggtagctttctcaggcctcgtggacatcgtggatataaggaatgctctcgtaggagggtacaagaaccccagcatgattccaatagagaaggcccaggggcccatcctgctcattgttggtcaggatgaccataactggagaagtgagttgtatgcccaaacagtctctgaacggttacaggcccatggaaaggaaaaaccccagatcatctgttaccctgggactgggcattacatcgagcctccttacttccccctgtgcccagcttcccttcacagattactgaacaaacatgttatatggggtggggagcccagggctcattctaaggcccaggaagatgcctggaagcaaattctagccttcttctgcaaacacctgggaggtacccagaaaacagctgtccctaaattgtaatgcatttgtctgttgttgacatgagagattcaagatcagattctagtgttcagtaaccctatgtgaatcagatgtctcctggataacattaaagccatgtctttgtcatt

SEQ ID NO: 31292 - DNA, 4620 bp, Homo Sapiens; identical to SEQ ID NO: 27304

SEQ ID NO: 31293 - DNA, 2694 bp, Homo Sapiens
ccacgcgtccgcccacgcgtccgcccacgcgtccgcccacgcgtccggcagccccgcgagcaggcagcgccggccccccgccccgcggccccgggccccggctccggcgccgtccctcctccccggccgggcgccgcggccccggcatgaggagcgggcgatgatccccgccaacgcctccgccaggaaggggcccgagggcaagtatccgctgcactacctcgtgtggcacaaccgccaccgcgagctggagaaggaggtccgcgcgggccaggtggacatcgagcagctggatccccgcggccggactcccctgcacctggccaccacgctggggcaccttgagtgtgcccgtgtgctcctggcgcacggcgcagacgtgggcagggagaatcgcagcggctggacagtgctccaggaggctgtgagtacccgggacctggagctggtgcagctggtgcttcggtaccgggactaccagcgggtggtgaagcggctggcgggcatccccgtgctcctggagaagctgcgcaagccccaggacttctacgtggagatgaaatgggagttcactagctgggtgcccctggtgtccaagatctgccctagtgacacctacaaagtgtggaagagcggccagaacctgagggtagacaccacactcctgggctttgaccacatgacctggcagcgagggaaccgcagctttgtcttcaggggccaagacacaagcgccgtggtcatggagattgaccacgaccgccgggtggtgtacacagagactctggcactggctgggcaggaccgggagctgctgctggctgctgctcagcccactgaggaacaggtgctgagccggcttaccgcgcccgtcgtcaccactcagcttgacaccaagaatatctcctttgagaggaacaagactggcatcctgggctggcgcagtgaaaagacggagatggtgaatgggtatgaagctaaggtgtatggggcatctaacgtggagctcatcacccgcacacggacagaacatctttcagaacatcacaagggcaaggtcaaaggctgtaagacacctttgcagtccttcctgggaatcgctgagcagcacgggggcccccaaaatgggaccctgatcactcagactctgagccaagccaaccccactgccatcactgcagaagaatacttcaaccccaactttgagctgggcaaccgtgatatgggccgccccatggaactgaccaccaagacacagaagttcaaggccaagctgtggctgtgtgaggagcatcccctgtccctgtgtgagcaggtggcccccatcattgacctcatggccgtcagcaatgcgctttttgccaagctccgggacttcatcaccctgcgtctgcctcctggcttcccagttaagattgaaatcccgatcttccacatcctcaacgcccgcatcaccttcgggaacctcaacggctgcgacgaaccggtgccatcggtgcgaggcagccccagcagcgagacgccttccccaggcagcgactcctccagcgtcagcagctccagctccacgacctcctgccgcggctgcgagatctccccagcgttgttcgaggccccgcgcggctacagcatgatgggcggccagcgggaggcggcgacccgggacgacgacgacgacctgctgcaattcgccatccagcagagcctgcttgaggcgggcagtgagtatgaccaggtcaccatctgggaggcgctaaccaacagcaagccaggcacccaccccatgtcctacgagggtcgccgacaggacaggagcgccccgcccacgccgcagcgccagcctgcgcccccggcgtcagtgcccagccctcggcccagctcagggccaggttccggcggccacgtgttccggagctacgacgagcagctgcggctggcgatggaactgtcggcgcaggagcaggaggagaggcggcggcgcgcgcgccaggaggaggaggagctggagcgcatcctgaggctctcactgaccgagcagtagcgccccctgccgggaccctcgccagcgccacgcgcgccacgcccagggccaggagccagacaaaccccggcctgcgcgcctgcagagcggcggctggagactggagccaccgcctcgcgggtgcagcagcacagcagggagtgtgtccaacgtagccccctggcctgtgcaagccctgactccctcatggtgcctcggagagtggggagcatattgggctggggtaagcactagacccaagtagactggacacaaagggctcgcccagggccctggcgccacccccaccccttcccaccagctgctgctagcctctgtggttgtacatcccacttgcccccacacggagactgactctaaaacccttcatccaatggtgctaacccccggctctcccctgccccacctcacccacccagagaagcacagaccccgccaggggcaggggcccaccgcacacccttgtcccgggcctgtctgggactggccttcccggctcagccagtgaggctcagaagggacacaaagagggatggaagaaaagaacaaagagaaactgttcctcccacccccttccctgatgccaggggcaccagactgattctgaggcacaaataaaagaggcttcataccggaaaaaaaaaaaaaaaaaa

SEQ ID NO: 31294 - DNA, 3944 bp, Homo Sapiens
agggctagagcagcgccgcccgaggggcggcaggggctgaccacagagagcgcgggggcctccagccgagaggaagggagggcagctcgggccgaagtcgttggcttcgtaagagcagggtctatgggaagcctcctcagcgtgggttcttggaagaggtggagtttggagaggcttatgcggtacctgattcatccagcaaattaagacctgccaactttttgataatctcgtcaataaattacagaacaattgttcctttcaagatttattcaaaacgtgtcaactctgcttaattaagcactttgatgatttaagaaatcttggaaatccttttgtactattgctcattcatacttgttcatcaaagcctggagtccttaaggacagaatttacctctaaacagaaagatggaaactaaagtacatttattctgccaggcagaggaaaatattgacttattagatgatggctctaattcttttgcaactgacttgtcatcaggaactattaaccacaagaaatacatcaagttttctaaaacaatagagaaggaaatttcaccggaaattaggagtttgagcccagaatataaaaaaatatttgaaacatcaataatcttttgtggagaagaaaagtcctctgatttttcaggagaaaaaaaagttgggagaaagagtttacaagtacaacagcacagtaaaagaactgagattatccctccttttctgaagctgtcaaaggagaaggtgacaaggaaagaaaactctttatgcaagttgccgaatcagtacagcgttcacaagacttcatcacctctttgtacatcttctgcaattactcgggaaaaggaaatgctgtctaacctctacatgacattatatgatgaagtaacccatggatatttacactcaaaagaattaagtgcacttcataaagcctgtaaaatttttagtaaaattcgaagtggtaagatttatgtgaatgatcttccagtgatcctttgcatcttgagaatttctataagtgatttagaaatgcgacaggcactaaagactgttgatattgatgcattccaggatgccttgaagattttctgtaggataaaaggtggtcgagtttcaactgatgacgtgtttgctgttttggatagcatgggtatccctataaaccgtgaaattttagaagaagtgacaaaacatacctatattgacagtaaccacatggtggatattggggatattatatttactttgaatgagctacaggaacagtatgaggatgtttcaattacagaaggatcacctttgaatgaaattacttcagacagaaagttatcaagtgtagcaggatgctatctaaaatataagaagaaaaatagtttgtcttccaaactccctgaaccttcaatatccaaaaagttaaataaaaaaagcaaccaatattatagcaaaattatggagaatgatgaccttgaatctaaaagaccaaaaaatacttggcaaataagaaaatttctgggtggggttggcagcagtaatgtaggagtccaagaaccatattcaaagaatggcataaactttaaaaaacattcagagaagggtgaaattcatgactcaaagtctaaaccacaaagcttgaagagtagtacaagcctcagtaagtctctggataaaagtgatatttctagtatcccaaaacttcagaagccagctgtaagaaagcattccagtctccaaaaacaggtttcgtctacggaaaaaactgcaattagtactctggaaaacttctgtgaagctatcagtaaacttcaagaaaattacattgcagcagaagaacttcagtctattttgccttcaacaggaattaatttattagatgaagaattccagaagattgtgacagacactagtagaaatgagaatggaatggtggagttagatgactttgtaaatgctctcgccaaggagcgaagttttcctgaatgcaatgcgttgcctggtgtcattaaagccattgataaaattaaagataaaaatgtggattatgaggatctaaatacttgtcttcaaaattttggtatttacctttctaagccagaatttaagaagatcacagaactgactgaagctggtgaaacaaaaaaagtgaattttaaagaattcattgatactatgatgagcaacacggaatgcttctctgaaaaattagtattgcctgatgctattgaaaccctcgacgatctcagaaaggagacggtgagtgtttctgacctgtggaatactctgtctagtttgaatagtaatttaaaaaaggatgaatttctagctgcattggaactagtgacagttgatgaaggtgacaaagtacaatttgaagaatttgcaaaagtagtaaggaatatgcgtgatgctgccaggttagaagagttacaggaagttgtcttagctgctgatttgctggaaggtgacatgatagctgggaagaacttggaagactttctaagaaatgttgggattaagtcacctaaagaagaggtagagaaaattcttcaatcagattttgtttctgaagataacatggtgaacattaaagactgtatgagggctttgagggacacccagaaattttccaattatattgatttcaggaaagaggcttcaaatctaaaattaccaaaggtaaacgagattaaagaagctgctaacatcttgtcacatgtcgataatggcaagattggtatacctgatttggagcatgccttgaaatgtttgaatgttaatttaactgaggaggacttcaatgaagcccttaactgttgtaacgtcagtgataatatggaggtggatttaaaagatttcttaatgaaaatgaaagaaagtccacatttccaaaagtccaaggctacacagatactcttagctactacccaaattctccagaatgatctagttgatgtctctgacctcaagacattattgatggacaaggaccttcatacagctaatgctatacttactgtaatgttaagacatgtacctgaacatgaaagtggcaaggttagcattcaagaatttatgactaaattatccgatatattgacaattcctaaagctgcaggtaagttttatttaatatgtacttattgcccagatctagaaaggcaagcagtggtttacatgttaaaaacaatacaggattcgatagttaaagcacaggtaagtaagaagcaatacaatatgaatataaaacaacacaagattagtttacataacttctgtttgaattctaaggcaaatattgctaagcttaacccaaactcaaaattttaggtagtcttacttgatagtgctagaaaattactagattatatattattcagtatgcatatttgacttctgaaattattagaaaataatttttaaaacttttgacaaatccagtagaatttttatcactatctgttatgttctcatgtatcttcagcgactctcttgatcacactttttaaacattcatgctttttgaggtataatgtacatatggcaaaattcactctttttaggtatacagttctttggattcttaaaaataatgtaatgtaacccttactatacacaacatatagactatattatcccccagaagtctcttatgcccttttggtaatccatttcttcctctaccctgagcccctggcaactactgattcattctttgtccctctagttttgccttttgtggaatatcatgtaaatgattaaatatgaagtggtttgagtttggcagtcattgcatgcatataccttgaatttactttgtttatactctcatttatactaccaaccctccctagaaaaaatggattctgattggttctggttgcagtattacaaattccaaataaagctttatttgaggacccccaaaaaaaaaaaaaaaa

SEQ ID NO: 31295 - DNA, 3789 bp, Homo Sapiens
aaagagcaggcgaaagccacggcgtctgcgtttgcaatgcatgctggtccgtgtagttctcagcctgacaccgtcgttcccagaacccagcgcgctctgtgctggcgggcgcagaggcctcccaggaggagagcaaggacctggcaggggctgctgaggaggagagcgggctgcccggggccgggcctggctcctgtgcttttggggaggagattcccatggatggggagcctcctgcctcctcgggcctggggctcccagactacacgtctggcgtcagcttccacgaccaggctgacctccctgagacagaggacttccaagccgggctctatgtgactgagtctccccagccccaggaggctgaggctgtgagcctgggccggctgagtgacaagagcagcaccagcgagacctccctgggtgaggagcgggctccagacgaggggggtgcccccgtggacaagagcagccttcgatcaggtgacagcagccaggacttgaagcaaagcgagggctccgaggaggaagaggaggaggaggacagctgcgtggtgctagaggaggaggagggggagcaggaggaggtcaccggggcatctgagctcactctgtctgacacggtgctgtccatggagacggttgtggccggcggcagtgggggagatggagaagaagaggaggaggcactgcctgagcagtcagaaggcaaagaacagaagatcctccttgatacagcctgcaagatggtccgctggctgtctgccaagctcggccccacagtggcctctcgccacgtggcccggaacctgctccgcctgctgacgtcttgttatgttggacccactcggcagcagttcacagtgagcagtggcgagagcccaccgctgagcgccggcaacatctaccagaagaggccggtcctgggcgacatcgtgtcagggcctgtgctcagctacctcctccacatcgcccgcctgtatggggagcctgtcctcacctaccagtacctgccctacatcagctacctggtggccccagggagtgcctcaggccccagccgactgaacagccgtaaggaggcggggctgctggccgcggtgacgctgactcagaagatcatcgtgtacctctcagacaccacactcatggacatcctgccccggatcagccatgaggtcctgctgcccgtgctcagcttcctcacctccctcgtcacggggttcccaagtggggcccaggctcggaccatcctgtgtgtgaaaaccatcagcctcatcgccctcatctgcctgcgcattggacaggagatggtccagcagcacctgagcgagcccgtggccacctttttccaggtcttctctcagctgcatgagcttcggcaacaggatctgaagctggaccctgcgggccgtggtgagggccagctgccacaggtggtcttctctgatgggcagcagcggcccgtggaccccgccctgctggacgagctgcagaaggtgttcaccctggagatggcatacacaatctacgtgcccttctcctgcctgttgggtgacatcatccggaaaatcatccccaaccacgagctggttggggagctggcggcgctgtacttggagagcatcagccccagcagtcgcaaccctgccagcgtggagcccaccatgcccggcaccgggcccgagtgggacccccatggtgggggctgccctcaggatgacggccactcagggacctttgggagcgtcctggtggggaaccgcattcagatccccaatgactctcggcctgagaaccccggaccactgggccccatctcgggggtgggtggcgggggcctgggcagcgggagcgacgacaacgccctgaagcaggagctgccgcggagcgtgcacgggctgagcggaaactggctggcgtactggcagtacgagatcggcgtgagccagcaggatgcccactttcacttccaccagatccgcctgcagagcttcccgggccactcgggggccgtcaagtgcgtggcacccctgagcagcgaggacttcttcctgagcggcagcaaggatcgtaccgtgcgcctctggccgctgtacaactacggcgacgggaccagcgagacggccccacgcctcgtctacacccagcaccgcaagagcgtcttcttcgtgggccagcttgaggccccacagcacgtggtgagctgtgacggggctgtgcacgtctgggaccccttcacagggaagacccttcgcacagtggagccgctggacagccgggtgcccctgactgcggtggctgtcatgcccgccccccacaccagcatcaccatggccagcactgactctaccctgcgctttgtggactgcaggaagcctggtctgcagtacgagttccgactgggcggtgggctgaaccctgggcttgtccgtgccctggccatcagccccagtggccgtagtgtcgtggccggcttctcctcaggcttcatggtgctcctggacacccgcacgggcctggttctgcgaggctggccagcccacgagggggacattctgcagatcaaggcggtggagggcagcgtcctggtcagctcctcctctgaccattccttgaccgtctggaaggagctggagcagaagcccacccatcactacaagtcagcatccgaccccatccacacctttgacctgtacggcagtgaggtggtcactggcaccgtgtccaacaagattggcgtctgctccctgcttgagccaccctcgcaggccaccacgaagctcagctctgagaacttccgcggcacgctcaccagcctggccttgctgcccactaaacgccacctcctgctgggctcagacaacggggttatccgcctcctggcatagactgaggcaggagctggccgggcaagggtgggaagacatctgcgggcgcgtgtccgctcaccctgttccctgagcagcagctccctccagggaggccctgggtcccacgccctgggtgcccacatggcctgccaactagggcctgcaaatggagtgggggagtcctggcccctgaatcaccagagccaccaagcctgccagaggggtcccattcatggcttggggacacagggctcctagcaagcaggaagttaagagcaggaggaagcgttgctaccttcacttctccccagctctgccctctgggtccacatgaggacagggaagctcgggaaggggaagggagactggccctgcccagccggtctctagcccctcagcccccgctgggcactctctgtcccatccctctaggacagggaagctggcctggtccagggcactgatggtgcttggattccagcctaaggaaggctggccgtggtccaggagttaagggcttgggtctggggtttaagtggccacccatccaggccctggccagtgtgggaccgggacgggaaggaagaaggaggctaggagcagggggaaaaggtgcacttggccagtggcgcctgccaggagtgagtccatgcgttgtctgcccacccctaccacagtgtttgtgccttcagctgagggggcagcctctgggccctgaacccctgctggggctccacgaccctgagagaagggttgagaagaatcatctctgcacctcgggtctctgccagaggaagacttaagcatccctgcgacctcacattctagacagagatgaggtccaagggttggcccctgctgccttctcacaatttgcaatagatgtaaataggaccaataaatcctttggaagagc

SEQ ID NO: 31296 - DNA, 4182 bp, Homo Sapiens
agtgctgcgccgacagcggtcaggatctcggctttcttgcttcgagagggactaggtgcctccaccagagcttctgtcgctctgtaacctgcactgtgacctacactagtcgcgggagccacgcagaggacgccggaacaccctggaagccgagaaatggacccagtggcttttaaggatgtggctgtgaacttcacccaggaggagtgggctttgctggatatttcccagaggaaactctacagggaagtgatgctggaaactttcaggaacatgacctctttaggaaaaaggtggaaagaccagaacattgaatatgagcaccaaaaccccaggagaaacttcaggagtctcatagaagaaaaagtcaatgaaattaaagatgacagtcattgtggagaaacttttaccccagttccagatgacagactgaacttccaggagaagaaagcttctcctgaagtaaaatcatgtgaaagctttgtgtgtggagaagttggcctaggtaactcatcttttaatatgaacatcagaggtgacattggacacaaggcatatgagtatcaggaatatggaccaaagccatgtaagtgtcaacaacctaaaaaagccttcagataccgcccctcctttagaacacaagaaagggatcacactggagagaaacccaatgcttgtaaagtatgtggaaaaacctttatttcccattcaagtgttcgaagacacatggtaatgcacagtggggatggaccttataaatgtaagttttgtgggaaagcattccattgtctcagattatatcttatccatgaaagaattcacactggagagaaaccatgtgaatgtaaacagtgtggtaaatcctttagttattctgctacccatcgaatacataaaagaactcacactggagaaaagccttatgaatatcaggagtgtgggaaagcatttcatagtcccagatcctatcgtagacatgaaaggattcacatgggagaaaaggcttatcaatgtaaggaatgtggaaaagcattcacgtgtccccgttatgttcgtatacatgaaaggacccactctaggaaaaatctctatgaatgtaagcagtgtgggaaagcattatcctctcttacaagttttcaaacacacgtaagattgcactctggagaaagaccttatgaatgtaagatatgtggaaaagacttttgttctgtgaattcatttcaaagacatgaaaaaattcacagtggagagaaaccctataaatgtaagcagtgtggtaaagccttccctcattccagttcccttcgatatcatgaaaggactcacactggagagaaaccctatgagtgtaagcaatgtgggaaagccttcagatctgcctcacaccttcgagtgcatggtaggactcacactggagagaaaccgtatgaatgtaaggaatgtgggaaagccttcagatatgtgaataaccttcaaagtcatgaaaggacacaaacacacataagaatacactctggagaaagacgttataaatgtaagatatgtgggaaaggcttttattgtcccaaatcatttcaaagacatgaaaaaactcacactggagagaaactctatgaatgcaagcaacgttcagtagttccttcagtagttccagttccttttgatatcatgaaaggactcacactggagagaagccctataaatgcgagcaatgtgggaaagccttcagagctgtgtcaatcctttgaatgcatggtaggactcaccctgaagagaaaccctatgagtgtgagcaatgacggaaagccttcagatctgccccacacctttgaatacgtggtaggacacacaatggagagaaaccctatgcatgtaaggaatgtgggaaacccttcggatctgcccagaaccttcgaattcatgaaaggacacaaacacacataatgcactctgtagagagaccttataaatgtaagatatgtgggaggggcttttattctgccaagtcatttcaaatacatgaaaaatcttacactggagagaaaccctatgagtgtaagcaatgtgggaaagcccttgtttccttcacttcctttcgatatcatgaaaggactcacactggagagaacccctatgagtgtaagcaatttgggaaagccttcagatctgtcaaaaatcttcgatttcataaaaggacacacactggagagaaaccctgtgaatgtaagaaatgtagaaaagcattccataatttctcttctttgcaaatacatgaaaggatgcacagaggagagaagctctgtgaatgtaagcattgtgggaaagcattcatatctgccaagatcctttgaatacatgcaagaacacacaatggagagaaaccctatgaatgtaaagaatgcagaaaagcattcagcttgcctacttcctttcatagacatgaaaagacttacactggaaggaaacactatgaatgcaagcaatgtggcaaagctttctcttcttccagttcttttcaatatcatgaaagaacacactagggagaaaccctatcaatgtaagcaatgtgcaaaagcctttatttcttccacttcttttcaatatcatgaaaggactcacatgggagagaaaccctatgagtgtatgccaagtgggaaagccttcatttcttctagttcccttcaatatcatgaaaggactcacactggagagaagccctatgaatataagcaatgtgggaaagccttcagatcagcctcgcaccttcaaatgcatggaaggactcacactggagaaaaaccctatgaatgtaagcagtatgggaaagcgttcagacctgacaagattctttgaatacagataatgaatgtaaacaattaactgtttataataactgtatactaacaaatgatattctttttaaataagaagctataatatcccattggtgtcatgtattagatcagccttatactgttaaattgttattatttggacattgtgagtcagtataaccatgtggataaaatgccagacatctttttattcgaaaattttacttttcatgcttctgtacttacatttttatctcaaccttaatttttctttcttttttttttttcccccagaaagaatctcgctctgtcacccaggctggagtgcagtggcgtgatctcgggtcactgcaacctctacctccagggttcaagcaattctcctgcctcagtctcctgagtagctgggactgcaggcatgcgccaccatgccaggctgattttttgtgttttttagtagagacggggtttcaccgtgttggctaggctggtctcaaactccagacctcatgatttacccacctcggcctcccaaaatgctgggattgcagacatggaccatcatgcccagctgcaaccctaatttttcattcagtcataataccaatagttatctcatgcacctctgagtgccttcttccccaaaaccagcagtgccatacctgctgtcagcaagggtgtaatataccatagtgataaatatgaccaaaagccataaatgactgtgagatgtatgagaattacaagtcacattagtaagaagagaaaaattttggtcatgtttatgatttgaaatacgttttcctctatcacatttaaaaatatagttacaaaatgcccttgtttttgtcctgattcatcatggtcactgaggagcatcgtctcatatgcctggtatgtgacacgtgtctctccaacaataaaagacttggccttggctgggcatggtggctcacgcctgtagtcccagcactttgggaggccgaggtcaggagttggagaccattctgaccaatgtggtcaaaccccgtctctactaaaaatacaaaagttagcagggcgtggtggcatgctcctgtggtcctagctattcaggaggctgacataggagaattgcttgaatataggaggcagaggttgcagtgagccgaggttgcaccattgtactccagcctgggcaacaagagtgaaactctgtcttaaaaaacacaaaaaaagacttggccttagggccgagtgcggtggctcacgcctgtgatcccagcactttgggaggccgaggcgggcggatcactaggtcaggaaatggagaccatcctggccaacacagtgaggcccagtctctact

SEQ ID NO: 31297 - DNA, 1865 bp, Homo Sapiens
gcatacagcagtgcagtgccgttattccagtctccgtagaaacgctgggactatggcggagccgactgggctgttggagatgtccgagctccccggagatagcagtgtcccacaggtgggcaccgcgagtggcgtcagcgacgtactgcggggggcagtcggcggcggggttcgggtgcaggaggcccgggaaggcccagtggccgaagctgcgcggtccatggcgcggatgccgggccctgtgcccgggcccatccccagcagcgtcccgggcctggcctccgcgccagacccccatcagcagctcgctttcttagaaattaaccggcagctgttgttccgcgagtatctggatggtagctccatgattccggtcagattactacgggatttcgaggaacgccgcaggctgtttgtggaaggctgcaaggcgagggaagcagcctttgacgcggatcccccgcagatggacttcgctgctgtcgcgtttacggtagcgctgactgcctccgaggccctcagtcctctggccgactgagtcggctgtgatgatgacattggtggcaaggaatagccaagtgacccttttgggatcaaaagaacaggcaggctgtgccagtttagttaactcagtcattagggggaatgcaaactggaagggaatacggcaatgtgcaattgaaggaggaagcacactccgaaatggaaacagacaagactgttgaatcttgttttctttcttcttttttagtattatttaaatagagaagggagtctcgcatccctaggctggtcccgaacgcttggacccgagcgatcctcccgcttcggcctcccaaagtgctgggattactttacaggcgtgagccaccgcgcccggccgaatcttgttttcaaacaggtcccaagacacttctgacttagcactttgttagcaatgcattttcctgcatttgtgaagaatccttcatgactttcaccataaaggatggttttgcaaagatatgagaaaaaaaaaatgccaataacagaacccatagaaatgaacctaagtgatgaaagaaaacaaagaaatagagttgtcaggaatccaggtgtacctgagttactaggattggaaggctattgagaggactttgaaatttcacaatttgtggtcatgtcaacaaatcctagtgtaagattcatatttgtgttttctgaggtactttagatgaacagtaaatattcaatagaaaaaaccacgtattatatgatcagtgttttcaagtctatgtgaaattgggtaggtgtggaataaacttgttttttgttaattttaagctttttattttattctagaatatgtattctattcacaagactcaacaaaaaaaagtatcggccgggcgcactggcttacgcctgtaatcccagcactttgggaggccacggtgggtggatcacctgaggtcaggaattcaagaccaccctggccaacatggttaaaccccatctctacgaaaaataaaaaattaactgggtgtggtggcacgcgcttgtagtcccagctactcgggaggctgaggcaggagaatcacttgaacccgggaggcggaggttgcagtaagccgagatcacgccactgcactccagcctggtcaacagagtgggactccgtctcaaaaaaaagaaaaaaagtatcaaaagatgctgtgagaaatctctcttgttgctgtcctttgccaaactcagaactattccatgcaggtgccattgcttgtggcttggagttttgttgttgttttcttggttttgcttgttttttgctttttcactgtacgcctttcaggttttctaatgcatatgcaaataaacatcaatct

SEQ ID NO: 31298 - DNA, 2209 bp, Homo Sapiens
ccccggccccggctccggcgctgctcccaccgccgcggcaacggccccggcccacggaggcggctggacggacccccgacggttggacgtacggactctgcttcgagagtaggccatggacaccttcagcaccaagagcctggctctgcaggcgcagaagaagctcctgagtaagatggcgtccaaggcagtggtggccgtgctggtggatgacaccagcagtgaggtgctggatgagctgtaccgcgccaccagggagttcacgcgcagccgcaaggaggcccagaagatgctcaagaacctggtcaaggtggccctgaagctgggactgctgctgcgtggggaccagctgggcggtgaggagctggcgctgctgcggcgcttccgccaccgggcgcgctgcctggccatgacggccgtcagcttccaccaggtggacttcaccttcgaccggcgcgtgctggccgtcgggctgctcgagtgccgcgacctgctgcaccaggccgtgggtccccacctgaccgccaagtcccacggccgcatcaaccacgtgttcggccacctagccgactgcgacttcctggctgcgctctacggccccgccgagccctaccgctcccacctgcgcaggatctgcgagggcctgggccggatgctggacgagggcagcctctgaaccccggcgccgcccaaccgcgcccctcgcgccttttggggctctcctgctgggcgcgggtggggtttgtgggtttttttccacctcttttctcccaatcggactccggccaaactcccctagacagatgggtgacctgtctcctttgagaggatgctgaggcatctgtagcagctgtttcaaacaccaatgtcacctctcctcctggcccccgcccaatggggagaggaatttggggccctactctggggaccacctttcacccgtttgtactttctgggccacgccgacccctgggtcgcttgatgtaaaagccaaaagctgctgcctcccacttggatcatgtcgcctgggattttcatccctcgcacaaggactacgggttcacacggtgaactgggggaagggaagtgttagggggcaagtcgcggcacccccccttccataaactcacgtcctaacccccaggacctcagaagatgatctgatttggaaataggatcattacagatggaattagttcagatgatctcatcttggagtagggtgggccccaattcaaggactggggtccttaaaaaaagggggcctggggcagggcgcggtggctcacgcctgtaatcccagcactttgagaggctgaggcgggcggatcacgaggtcaggaggtcgagaccatcctggctaacacggtgaaaccccatctctactgaaaatacaaaaaattagctgggcatggtggcacatgcctgtagtcccagctactcgggaggctgaggcaggataatcacttgagccaggaggaggaggttgcagtgagccgagattgtgccactgcactccagcctgggtgacagggcaagactctgtctcaaaaaaagaagcgggggagtgggggattgaggccacgtgcagtggctcactactgtaattccagcactttgggaggccgaggcaggaagattgcttgaactcagaagttcaagaccagtctgggcaacatggtgagaccctcgtctctacaaaaaaaaaattatcgtggtgggccgggcgtggtggctcacacctgtaatcccagcactttgggaggctgaggcgggcagatcacaaggtcaggagatcgagaccatcctggccaacatggtgaaaccccgtctctactaaaaatacaaaaattagccgggcatggtgttgcgtgcctgtagtcccagctacttgggaggctgaggcaggagaatcgcttgaacctgggaggcgcaggttgcagggaggcggaggttgcagtgagccgagattgcaccactgcacttcagcctggtgacagagcgagactcgtctcaaaaaaaaaaaaaaaaaaaaaaaaaaaagtgactgtggtggtgcacacgtataatcccagctacttgagagatgacgagggaagatcacttgagcccaggagttaagaggctgcagtgaccgatgatcatgccactgcactccagcttgggtgagagtgggactctgtcttaaaaaaaaaaaaaaaaaaaaaaa

SEQ ID NO: 31299 - DNA, 2893 bp, Homo Sapiens
aagtaggaaatcgaccgaccaggcggtgcgcttcggacccagccagggcatgtgctcggaggcccgcctggctcgcaggttgcgggatgcgctgcgggaggaggagccgtgtagaggagctgctgcgctgcggcgcggaccctaatttggtgctagaggacggcgcagcggctgtgcacttggcggccggagcccggcacccgcgcggcctgcgttgcctcggggccctactgcgccaaggcggggaccccaacgttcgatctgtcgaggcactgacgccgctgcatgtggccgccgcctggggctgccgccgcggcctggagctgctgctgagccaaggagcggacccggcgctgcgcgaccaggacggactccggccgctggacctggccctgcagcagggacacctggagtgcgcgcgagtcctgcaggatctcgacacgcggaccaggacccggacccggatcggggcagagactcaggagcccgagcctgcacctggcaccccaggcctctctggacctaccgatgagacgctggactccatagcactccaaaagcagccatgcagaggtgacaacagggacattggcttggaggctgacccaggaccccccagcctccctgttccccttgaaactgtggacaaacatgggagctcggcgtcccctccagggcactgggattacagctcagacgcctctttcgtcacagcggttgaggtctctggagctgaggacccagcctcggacactcccccctgggctgggtcattgccaccgaccaggcagggacttctgcatgttgtccatgccaaccagagggtacctaggtctcagggcacggaggcagaactgaatgcccgtctgcaggccctgactctgaccccaccaaatgctgctggcttccagtcctccccttcctccatgcctctcctggacaggagtccagctcatagccccccacggacaccaccccctggagcttctgactgccactgcctgtgggagcaccagacatccattgatagtgacatggccacgctctggctgacagaggatgaggcaagctctacaggtggcagggaacctgtcggcccttgccggcacctgccagtctccactgtgtctgacttggagttgctgaagggactccgagcacttggcccagagttttcagggcacagcctagaactggctgcagccctgcggacgggctgtattccagatgtccaggcagatgaagacgcgctggcccagcagtttgagcggccagatcctgccaggaggtggcgggggggggtcgtgaagtctagcttcacgtatctgctgctggaccccagggagactcaggacctgccagcccgagccttctcactgaccccagctgagcgccttcagactttcatccgtgccatcttctacgtgggcaaagggacgagggcccggccatatgtccacctctgggaggcccttggtcaccatgggcggtcaagaaaacagccccaccaggcctgccccaaggtgcgtcagatcttggacatctgggccagtggttgcggcgttgtgtccctacattgcttccagcacgtggtcgctgtggaggcttatacacgggaggcgtgtattgtggaagccctagggatccagacgctcaccaaccagaagcaagggcactgctatggagtggtggcaggttggccacctgctcgtcgccggcgcttgggggtgcacctgctgcaccgtgccctccttgtcttcctggctgaaggcgagcgacagcttcatccccaggacatccaggcccggggctgagtgctggggagttggccatccagcctggggagaaatgtttgaatgttccagctgccccatgctgacagcagcccccatctctggtttcagaaggggtgtgtgtgtgtgtgtgtgtgtgtgtttgtgtgtgtgtgtgtgtgtgtgtgtagggagcacccaggcagatctcccccaggctgagagaggactttgttacagatggtactgctggagaggtagtaagtagtgagctccccatcgtgggaggaggacaagaagggaagcagaaggtgctttggaacagtccggtgcttctgtaagaggcgtttgaacctgggcaactccccctggaataggagctgggtaaaatgaggctgaaacctactgggctgcattcccagatggttaaagcattctaagtcacgggatcaggtaggaggtcagcacaagataacgggtcataaagaacctgctgataaaacaggttgcagtaaagaagccggccaaaacccaccaataccaagatggcgacaagagtgacctctggtcgtcctcattgctacactcccaccagcgccatgacagtttacaaatgccatggctggccaggcgcggtggctcacgcctgtaatcctagcattttgggaggccaaggagggcagatcacctaaggtcaggagttcaagaccagcgtggccaacgtggcgaaaccctatctctactaaaaataacaaaattagctgggcatggtggcgcgtgcctgtaatcccagctactaggggggctgaggcaggaggatcgcttgaacccgggaggtggaggttgcagtgagctgagattgtaccattgcactccagcctgggcaacagagcgagagtctgtctcaaacaaacaaacaaaaaaacaaatgccacgtcaacatcaggacgttaacctttagaccctatatggtctaaaaaggggaggcatgaataatccaccccttgtttagcatatcatcaagaaataaccataaaaatgggcaaccagcagccctgccctgtctatggagtagccattcttttattcctttagtttcttaataaatttgctttcactgt

SEQ ID NO: 31300 - DNA, 2051 bp, Homo Sapiens
gggcgaccacggagagaaagccgggacttgaggtgggaaccccggctggcgtccggtagggggaggttcccggggaaacccgcggaaggcgaggtgcctggcctgccatgtaggggctcgttccaagccgcagaccccaccgccctccctctccccggggcccatggcggtggctgtgcccccgggtcgggccgcaggctcaggctgggcctggaggccagtggcgcgggacgcgcttttggctagagctttccattcatgcaccgaactgcggggacggttctatctcgtaggtggtctcctagcaggaggagcgagagagcccagcagcgatacggtggttttcgacccagctaggggccaggccgtacgattgggagcccggggcagccccccgcgcagtcaccacgacgcggcacccgtggacgggcgttggctctgcgtggtgggcggctgggacgggtctcgccgcttggccacagtgaccgcactggacacagagcgcggtgtgtgggaggcgtggacagggacccctggtgactgcccccccgccggcctcagtagtcacacctgcacccgaatctctgaccgagagctgcaggtggctggccgggagggcggtatccacactcagcgacgctatggaagcatctacacattaaggctggaccccagcgcccgcacctattggtatggcaccctccgcccaaaacctttcactctcatccacactctcgaaaaacaaaagcctaagcagatttctcaggcaatttatccacctcctcactctagcaccctccttccaggggaacctaccatgtttaagctagctgagctctctacagtattaccctccctcttatcccacctaccgcactgccccatgcctcttctccatccatccttggcaagggcggtggcacttacattttccagaaaacccactcagccctgaatttctgcatgtccacagctacaagcaagaaggctgccacacagcctcacgctcaggtcactgtgcggccctgctccaaactcctggaccccatccaggtcatcagctattgctctttggaggttgcaacttagctgaaccagaagtagctgggcattggagtcatgggaaaattaaggtattagctcctcacacatcttgtttaggatgggaagaggctaaaattgtgatgcccaggtctcttcggacagtcctttctttctccccaaggaggaaccacctgttgctcctcatttgatggaacagcttgcaaggcttgtgagcagtgggcaggggtcccagaaggggccccatggactacggcatcactcatgttctgtggtcgggccctttgctgtgctgtttggtggagaaactctgaccagagctagagacaccatctgcaatgatctctacatctatgatactcgtgagagccagactaatggctgaagggggggaaggtgggaagatgggggaacctgaagactacagaaagaggatggagtgatggggtagggaggaggaaaaattagttgacaggagttaaaggagtacacagaatattaagcatttgaagaggcctacaaatcaagtgagcagaaaaacaatgggcaagcccttggtcatgttgaattctgtgaatgacaaagtgctactgcctcaataaccaccctctgcccgtatccaacaggcacatctcctcctttgtggttccacttcccctgtgcagatcgtgggatgaaacgcatgggccatcgcacctgcctttggaatgatcagctttacctggttgggggttttggtgaggatggcaggacagccagtccacaggtttgcatcctggactttatctaaatagtgccaagacacatcactaagcctcgttttgttttgctttgttgcaaacctataaagcgttatcaccagagctatctgcttcacttcaaatgcttattaaatttcaatccgagactcaaaaaaaaaaaaaaaaaaaaaaaaaaaaaaaaaaaaaaaaaaaaaaaaaaaaaaaaaaaaaaaaaaaaaaaaaaaaaag

SEQ ID NO: 31301 - DNA, 4856 bp, Homo Sapiens
attcccacgccaggatcgatgtttggccccagcgtggaattcacctcggtgctgaagccagtctttgctcgtgagaaggaacccttctccctgtcatgcttgttttcggaagatgtgttagatgctgagagcatccagtggttccgagatgggagcctactgaggtcctcgagacgtcggaagatcctctacacagaccgccaggcatccctgaaggtgtcctgcacctacaaggaggacgaggggctctacacggtccgggtgccctcgcccttcggaccccgggaacagagcacctacgtgcttgtgagagatgccgaggccgagaaccccggggccccaggctccccgctgaacgtccgatgcctggatgtgaacagagactgcctcatcctgacttgggccccgcccagtgacacccggggcaaccccatcactgcctacaccattgagcggtgccagggcgagtctggggaatggatcgcctgccatgaggcccccggagggacttgtcggtgcccaatccgaggcctcgtcgaaggtcagagctatcggttccgggtgagagccatcagcagggtaggcagcagcgtcccctccaaggcctcagagttggttgtcatgggtgaccatgatgcagcccggaggaagacagagatcccctttgatctgggaaacaagatcaccatcagcacagacgcttttgaagatactgtgaccatcccctcaccgccaaccaatgtccatgccagcgagatccgagaggcctatgtggttctggcctgggaggagccgagcccccggggcagagcaccactgacgtactccctggagaagtcagtcataggtagtggcacctgggaggccatcagctcggaaagccctgtgagatccccgagattcgccgttctggacctggagaaaaagaagtcgtatgtcttcagagtgcgagcaatgaaccagtatggcctgagcgatccctcggagcccagcgagcccatcgccttgcggggcccgccagctaccctccctcctccagctcaagttcaagctttcagagacacacagacctctgtctccctgacatgggatcctgtgaaagacccagagctcctgggttattacatctactcccggaaggtggggacatctgagtggcaaacagttaacaacaaacccatccaaggcaccaggtttacagttcccaggctgaggacggggaaggagtacgagttttgtgtcaggtcagtcagcgaggctggggtaggcgagagctcagccgccaccgagcccatcagggtcaagcaggctctggctaccccgtctgccccatatggctttgccctcctgaactgcgggaagaatgaaatggtcattgggtggaaaccccccaagcgtcgtggaggtggcaagatcctgggctacttcctggaccagcatgactcggaagagctggactggcatgcggtcaatcagcagcccatccccacccgggtctgcaaggtcagtgaccttcatgaaggccacttctatgagttccgtgcccgggctgccaactgggcaggtgttggcgagctgtcggcacccagcagcctgtttgagtgcaaagagtggacaatgccccagccaggccccccgtacgatgtacgggcatccgaggtgcgggctacatccctggtgctgcagtgggaacccccactgtatatgggggctgggcctgtcacaggctatcacgtcagtttccaggaggaaggctctgagcagtggaagccggtcaccccaggccccatctctggcacccacctgagggtttccgacttgcagccaggaaagagttacgtgttccaggtacaggccatgaattcagctggtctggggcaaccgtccatgcccactgatcccgtgctcctggaggacaagccaggtgcccatgagatcgaggttggtgtggatgaagagggctttatctatttggcttttgaagcccctgaagcccccgactcctcagagtttcagtggtccaaagactacaagggcccactggacccccagagggtcaagatcgaggataaagttaacaagtccaaggtcatcctgaaagaacccggcctcgaggatttgggcacctactcagtcatagtcactgatgccgatgaagacatctccgcaagccacacgctaaccgaggaagagctggagaagctgaagaagctgagtcatgagatcagaaacccagtgatcaaactgatctccggctggaacattgacatcctggagcgaggggaggtgcggctttggctggaagtagaaaagttatctccagccgctgagctacatctaatcttcaacaacaaggagatcttcagctcgccgaaccgcaaaatcaattttgaccgagagaagggcctggtggaagtgatcatccagaacttgtctgaggaggacaaagggtcgtacaccgctcaactccgagatggaaaagccaaaaaccagattaccttgacactggtggatgacgattttgacaagcttctgaggaaggcagatgctaagagaagggactggaagagaaaacagggtccctattttgagcggccgttgcagtggaaggtcacggaggactgccaagtgcagctgacgtgcaaggtgaccaacaccaagaaggagactcgctttcagtggttcttccagagggcagagatgccagatggtcagtatgacccagagacgggaacgggacttctctgcattgaagagttgtccaaaaaggacaagggaatttacagagcgatggtttctgacgatcgaggggaggacgacaccatattggacctcacgggtgacgccctggatgccatcttcaccgagttgggcaggattggtgccctctctgcaactccactgaaaatccaggggaccgaggaagggatccggatcttcagcaaggtcaagtactacaacgtggagtacatgaaaaccacctggttccacaaagacaaacgtctggagagtggtgatcggataaggacgggcaccaccctggatgagatctggcttcacatcctggaccccaaagactcagacaagggcaaatacactctggaaatagctgcagggaaggaagtccggcagctctcaacagatctctcagggcaagcttttgaggatgcaatggctgaacaccagagactgaaaaccttggccatcatcgagaagaatcgtgccaaagtggtgagaggtctgccggatgtggccactatcatggaagataagaccctgtgcttgacttgcatcgtctcaggagaccccacccctgaaatctcttggctgaagaatgaccagcctgtcaccttccttgaccgataccgcatggaagtgagggggacagaggtcaccatcaccattgagaaggtcaacagtgaagacagcggccgctacggcgtcttcgtcaagaacaagtatggctccgagacgggccaggtcaccatcagtgtgttcaagcacggggacgagcccaaggagctgaagagcatgtgacagcgtgtgtccaggcacagtctgagtctagtctgcatggaccagtagggacaacctgtaccagggtcacagcctggcacaggctacaggggtggggcagaaggaaaggggacaagatagaacccaggatgtgagggtgggggtggagcggatgcaccaaagtggagaagcaaagatctttctggggtcctgagtggcttccaggagagcgggatgaaccctggacctggagtaggagacccggatgcactggggctatctaacagtactggcatctgataggtagaggtcaggtacgctgctaaacactgcagctcccaccacatagaattatccgaccccagatgtcaaaagtgccaagggccatgagccctgccataaactgatacatcgcacccctcttttaggatcccatagtttcaattcatgtaagttcaacagacacctgaagtctagcatgtgggaggctaaggatggagctgggaacacaaaggcagctgataagcaggttctgcttgcaaagaggcctcagtccagtgggagaaacagacctgggcgcaaacaactccaggacaaggcaggacatgataaagattataaagcaggtccaaggaaagtgccgccagtggtccaaggagggagacagagggtcgtcccaacagggggaggtagggctttgaaaacaccttcatccaggctgggcgaggtggctcacgcctgtaatcccagtagtttgggaggccaaggcgggcagatcacctgaggtcaggagttttagaccagcctggccaacatgacgaaacccggtctctactaggaatacaaaaattagccaggcgtggtggcaggtgcctgtaatcccggctattcagaaggccgaggtgggagaatccgttgaacctgggaggcggaggttgtgatgagccaagattgagccaaaaaaaaattagcagaattggtgttgggccctgaaaaattagtccgattttgtggtggtaatgggagaaggacatcccaggagcagggtctggtgggaggaaagggaaggaggaggctaaggctgcccaggaggccttggataccaggcttggagctggtaacctccagggcttccagcacggggcctctgcctggtgtgacagataccggctggcctcacttgatggatctcagtactgagctgggcatttctctgccccccaacttttttctttttaaaaataagatggggagtgttcataaaattatagatgtttgttgtaaaattttggaaaaccctggaaattatagagaaaataaacataatctatactcccaac

SEQ ID NO: 31302 - DNA, 2989 bp, Homo Sapiens
aggggagaccagggttgtttaccagcaggacagagcccgggcgcaggcggcggatggagcggaacggctaggggtcttgagaagcaatggccacagaagcccctgtgaatatagcaccacctgagtgtagcactgttgtcagcacagcagttgacagcctcatttggcagccaaactcactaaatatgcacatgataaggcccaagtccgccaagggacggacaagaccgagtctgcagaaatcccagggcgtggaggtgtgcgctcatcatataccatctccgcctccagccattccctatgagttgccaagcagccaaaaaccaggagcctgtgcacccaaatctccaaaccagggagcttctgatgagatccctgagctgcagcagcaagtacccactggggcttcctcttctctcaataagtatccagtccttccttccatcaacagaaagaacctggaggaggaggctgtggaaaccgttgccaaaaaggccagctcactgcaactgagcagtatccgggctctttaccaagacgagacgggcaccatgaagacaagtgaagaagattccagagctcgagcttgtgccgtggagaggaaattcatcgtccgaaccaagaaacagggctcttccagggctggaaatctggaggaaccatcggaccaagaaccaaggttgctgcttgctgttagatcaccaacaggccaaaggtttgtacgccatttccggccaacagatgatttgcaaaccattgttgctgtggccgaacagaaaaacaaaacctcctaccgacactgcagcattgaaacaatggaggtgcccaggaggcgattttctgacctcaccaaatctctgcaagagtgcagaatcccccacaagtctgtgctgggcatctcactggaagatggggaagggtggccctgagtccacagccacccagctgaggtcctgggtctctgagcaaaggagcatgcttgggcgttgtggcctcttaggcagcctgtttcaagtgccatgtggacctggtgcagctgggaagcttgggactctcgtctgcactgcgtgtcctctgaagcagtgaagtctgtgcctatgccgagcgcgctaagaagtctcccttccagctgttccattctctccaccaccagcgtaactggcaagttaccaaggttgttcctgaaacagcagtgatcatgacttctcctttccagagttttgggtccttctgaattaatggtccttttcgaacaccggcttgcctttacagtgaactgtgattctctcgaagccaatgctttcctgtctgtatttgatgcaggattaaacacttcccagagaggattctagtctggtaaataaccacagtgtaggaactatctaactggcatttgtgtttcttgcgagtattttgaagaaacaggccgttgaccccatctttggaagtagccctttaccatgcatggtcagtttcttagggatttactatttgtgtgaggtggcatctaagggaagaatgggttttcttccccaaaacatcagcatttctaaaatagtcctaaagcttgaaagtaagttgcttccatgagcatggattacccagtagctactttttaatagagactgactaggtttacaacttctgggagctactctgtgggctgaattcttccaaaaccgagaaaagccagtgcagtctgatttcttttgcttttgtcagtaatggaatcttttgtttttaaaatgtacaaacctataagtttaaacaggtttgtactgacaacctccttggcttatttgggggtggagcaattgttttattccccagtttcagtgcgttgcccacttcaaacatggtgtgtcctttggagctgtgacagaggtgcctgttctgacttagaacctctggaggaggaggggggtgccttggtctcgtgttactttgctgtgcctgtgctgagagaccatgtgcccgagcatctggttgaccggcatgaagtacatcagcctgtcttagcctgagctgctttgaagaccatggggtcttgtgtttccaacttcgaagtgctgatgtggacagtttgccaatgttctcttctattgcaagttcagccagactccatgactcatctgatcccttttatggccaaatcatccttcagagtagggaacactcagacattctgtgcatgttgttcccccaaagcatggtcatcacaaagtcctgagttctggtgtgtgctcccgcctcctgggtatacagagagaaggcaggaatcaggagttccagaagcatatacatgtggctaccccagcaacaagcgcatcctgtgctcagataagctgcatggttgggagtgttttttctcgcacgttgaggcttagtggagatgggcaccactgccatttgctcagaagaaggctggtctggtcctaactgcatcccacactgcccagatcattctagaataggttatttctgaatgttttatagaatttcttaataccatcctggtttggtcagccattcctttgattggaaaggtcagctggggccagtggtgcctcaggcaggcccacacaactggccacctcttcccgttaatgaccacagcagacagaatttgagcccagcacctaaaagtacaggaatttcacttcccaccaggacttgagcacataactctatgtctgatctaggaggctgggggaagagcctcccataaaatcacacctactctgtggtaagaataaaatcccacccacctgggacttggtaatttctccaaacaggaaagctttagaaaacttgagtgaaatggagcaagcttgaaggagttagaatcttctgtgcttagggtttgctgctgctggtgagcttagaattttggggttgggaaaaagtggaaggcataagcatagaaatattttaggatattttaggatatgtgaataaagctagactcaaaccaaaaaaaaaaaaaaaa

SEQ ID NO: 31303 - DNA, 2563 bp, Homo Sapiens
agacctggaagagggcaggcgtgagcaaccatggccgggcagcacctcccggtaccccggctggagggcgtttctcgggagcagttcatgcagcacctctacccacagaactttaccttttgaccagttggtccagagggcagctgaagagaaacataaagaattctttgtttcagaggatgagaaatactacttacggtcacttggagaagaccctagaaaggatgttgcagatatcagaaagcagtttcctttgttgaaaggagatattaagtttccagaattcttcaaagaggaacagttcttttccagtgtttttcgaattagttcaccaggattacaactatggactcattatgatgtaatggataatttgttaatacaagtgacaggaaaaaagcgtgttgtactcttcagtcctcgagatgcccagtatttatatttaaaaggtactaaatcagaagtactgaatatagataacccagacttggctaaatatccacttttttccaaggctagaagatatgaatgttcccttgaagctggtgatgtattattcattcctgctttatggttccataatgtaatttctgaagagtttggagtgggagtgaatatcttttggaagcaccttccatctgaatgctatgataaaacagatacctatggaaacaaagatcctacagcagcatcaagagctgcacaaattctggacagagccttgaaaacactggccgagttaccagaggaatatagggacttctatgcacgacgaatggtcctacacattcaagacaaagcctacagcaagaactctgagtaaataatgaagtgaatgcaatgcacattaacactttagtaaggtataacgatataaattaaagattttgttaaaataggaaagatacatcagatttacagattatgtaagtacgaaggggtgtttgtgtggattctacttgatacagattgttataattaaagaatgctgtgctgggaccactctttaacattcagatgctgaccactaaaagtccaacttaaaatgacttaaaaacagtaagaaaatatattgattcacaatacatgaaatctattgacagaatgtgctgcagtgtttctgatccaatgattcagtaatgtcatcaagaaccttgggaacccgcctccacaccccacccccttttcaaccacaacattggcatcatcctaaggctggctaccctcgtggtcatgggatgattgccagtagcagttggagccttgtgcatcttcatttacatgcagcggaagagtcaggctggattctaggggccctgtcctagtatgagaaagctttcccagaattcactttccatatccttaggtctcattgctctaaagtaacttagacctgtccatccctgagccagtcactggcaaagggtctagaataacctttagggcagtcaggtccactggagctgagagtagaagtggaggccacatgagggatatatggggacagaaaggatagtttttttaaaatcatggttctgataggaaaaacatgagcaacgcacaatatctattacatttgcctagaagcagaattttttgaggaactttaaaaaatgtacagatacctaggtcccaactttgtagactgattcaagagtgtttgggatttggtataggaacttaatagacctcacagggtgttctgatgcataatcagagctgagatcaactggagttgatgatagtgacttggattattagttttgtgattagtgcaaaacaaatgtttaatctgatcttgacttttcttgccacccagtatgtcagggtggtttttggtttttgaatgttacaaaataaatattttaatttatacctatgtctaaaccttagcctagttaaagatttcccaactattttttccacctatccctttttttaaaagaaaaattacttaaagaatgaataaatgagatcctaaaagtgttgtcatcgaagacagtgagccattgtgtgtggatctctgcttttgttttgtacctagtaattatattgcagtgtcattgaagaccacataatcttcactgaacataaatgtgttcatctaaagcaatctcttagtacatcaatttggtgcattttaattagagaaaatcattttctctattgaagagaatccatccactcatgtcctataaattatagtaaataaggaaaagcatatataacattctgaatttcctaggtgtctttggaaacaggtaagttactcaggtgaataaaggtgaaaaaagtcttgtcagaaaaggaatgattatattagccaaatttaattaccaggttttgatcttcattaagcaaagcaaagaacttctttactgattccttgtccttcagtaaggaaaaagacaaaactctccttagtttacacattatttatggtcagtttttaataaatcttgttttttttcttaaccagcaagagaattgatacaaagtataaatccagagtcatgtagaaaacttggaagtattaataaaacagattacagtttgtgcactg

SEQ ID NO: 31304 - DNA, 3122 bp, Homo Sapiens
agaacgccgcgcccgtgacccggaagagcattctccttagcaactgcgggactgcggcggcgccggcctccggggagaaacgcgaatgacaacagagctgctcaaggcgggaactctgagctaagcagtggaggtttctctggatctggagagaagagtgaccttggagccaataatgagccatcctgactacagaatgaacctccggtccctggggacccacagaggtgtgtctgctgtggctggtccacatgacattggtgcttcgccaggtgacaaaaagtcaaagaacaggtccacacgagggaagaaaaagagcatatttgaaacttacatgtccaaggaggatgtttcagaaggcttgaagagaggaacactcatccagggtgtattgagaattaatccaaagaagtttcatgaagccttcattccttccccggatggtgatcgagacatttttattgatggggttgttgctcgtaatagagccttaaatggggatctggtggtcgtgaaactgcttcccgaggagcattggaaggtagttaaaccagagagcaatgacaaagaaacagaagctgcgtatgaatcagatatccccgaggagctctgtggacaccatctcccgcaacagtccctgaaaagctataatgacagtcctgatgtcattgtagaggctcagtttgatggcagcgactcagaagatggacatggcatcacacaaaatgtgctggttgatggtgttaagaaactctcagtttgtgtttctgagaaaggaagagaggatggtgatgcaccggttacaaaagatgagaccacctgcatttcacaagacacaagagctttatcggagaaatccctgcaaagatcagcaaaggtggtttacatcttggagaaaaaacattctcgagcagcaaccggcttcctcaaactcttggctgataagaacagcgaactgtttaggaaatacgccctgttttctccctcagaccaccgagtgcctagaatttatgtgcctctcaaggactgtccccaggactttgtggcacggcctaaagattatgccaacacactgttcatctgccgcattgtggactggaaggaggactgcaattttgccctggggcagctggctaagagtcttgggcaggctggtgaaattgagcctgaaacagaaggaatactaacagagtatggcgtggatttctctgatttctcttcagaagttctagaatgtcttcctcaaggcctgccatggacaattccaccagaggagttcagcaagagaagggatttaagaaaagactgtatcttcaccattgacccatcaaccgcccgagacctcgatgatgccctctcctgcaagccactcgctgacggcaacttcaaagtgggagttcacattgctgacgtgagttactttgttccggagggatctgatctggataaagtggctgccgagagggctacaagcgtctacttggttcaaaaggtggtccccatgcttcccaggctgctgtgtgaggagctgtgcagcctcaaccccatgtccgacaagctgaccttctctgtgatctggacactgactccagagggcaagatccttgatgaatggtttggccggaccatcatccgctcctgcaccaaacttagctacgagcatgcacagagcatgattgaaagcccaactgagaaaatccctgcgaaagagctgccccccatttccccagagcatagcagcgaggaggtacaccaggccgtcttgaatctccacggaattgccaagcagttacgccagcagcgctttgtggacggcgcacttcgtttggatcagctaaagcttgctttcactctggaccacgagaccggattgcctcaaggatgtcatatctatgagtaccgcgagagcaacaagccctgctgcgccggcaccccccgccccaaacaaggatgctcagtgacctggtggaattctgcgaccagatggggctgcccgtggacttcagctccgcaggagccctcaataaaagcctgacccaaacatttggagatgacaagtactcactggcccgcaaggaggtgctcaccaacatgtgctcccggcccatgcagatggcactgtacttctgctcggggctgctgcaggacccagcgcagttccggcactacgcgctcaatgtgcccctgtacacacacttcacctcgcccatccgccgctttgccgacgtcctggtgcacagcctcctggctgccgcgttaggctatagggagcgactagacatggcgcctgataccctgcagaaacaggcggaccactgtaacgaccgccgcatggcgtccaagcgcgtgcaggagctcagtaccagtctcttctttgctgttctggtcaaggagagtggccccctggagtcagaagccatggtgatgggcatcctgaagcaagccttcgacgtgctggtgctgcgctacggcgtgcagaagcgcatctactgcaacgcactggccctgcggtcccaccacttccagaaggtgggcaagaagccggaactcacgctggtctgggagcctgaggacatggagcaggagccagcacagcaggtcatcaccatcttcagcctggtggaggtggtcctgcaggcagagtccacagccctcaagtacagcgccatcctgaagcggccaggcacccagggccacctgggccctgagaaggaggaggaggagtctgacggtgagcccgaggactcaagcaccagctgagctccaccagccgcctgccccgcctgccccgcctgcctgtcccgccacactggctttaggacctgttgacacggaggggggtttttaatttggtttttaacagctcaggggtttgtttttatttttatttaatttttgcagctcaacttttaaacaaactgcaggggagagggtggggctggaaggaaggctgaggcctggtcagcagtgaccccagcagagcaggccccagtcctcctgggaggctggccccccttttttctgggccctactgccctcctctgcccaggaaatgggggggtttcagcaactcagtgtcacagaataaaatcaagtgtggagtgccaaaaaaaaaaaaaaaa

SEQ ID NO: 31305 - DNA, 3274 bp, Homo Sapiens
gtcatgcgtgccacgctctcctctacgcgccggaccctgggatgctcttcggccgcatcccgctgcgctacgccatactgatgcagatgcgcttcgatggacgcctgggcttccccggcggattcgtggacacgcaggacagaagcctagaggacgggctgaaccgcgagctgcgcgaggaactgggcgaagcggctgccgctttccgcgtggagcgcactgactaccgcagctcccacgtcgggtcagggccacgcgttgtggcccacttctatgccaagcgtctgacgctcgaggagctgttggctgtggaggccggcgcaacacgcgccaaggaccacgggctggaggtgctgggcctggtgcgagtgcccctgtataccctgcgggatggtgtaggaggcctgcctaccttcctggagaattcctttattggctctgcgcgggagcagttacttgaagctctccaggacttgggactgctgcagtctggctctatttcaggccttaagattccagctcatcactagaggcagccctccatggacccatgaaaactgagatgaggaccttggtactagggagggagggaaggacgtgggaatgttttcttattggatctgagagatgatacatgataccagatgaaaagaaggagaagtgtgtaccatatgttttgagcagaggaccctccaacttatggcatcaggggcaaaaagtcacagcttatcccaggcaccctggcaggttctcagagcctgcctcctccctgtttatatgcgtacagcctggtaacccccaggcatgcaaatatacaatctgtaacaacacacagcctgacaccttcccctggtcatgtccagtttaaccttgaagtggcatttgtcacactaccctggtccctgattgcaaggagcttctgaagcaagggtgaatccttcccacactcctccatggttgccctccaaggtctagcccagcctatttgttagggaggatagagaaacagagcaccccctgtgctttctgaaaatagacttgctcttgtcttgagtggtgaccaaagcagttggctcttaaaaggtgggagagcagcccaaccaatccccaatccttttcttctgaaactgagcaggaagggtaaggaagtggctaggtctccttggactgagcatggacatgagtcctgtgaggactggtgtctctcctctagagctttcatctttgggatgcctgagactccgagactatcagaagggaattgacccaccccagtctagcaccaccctgccttcacttcatctacataaaggtggtataaaaacatagactggaggaggtaatccatggagagagaaaaagaagagggctcaggacaaggccctgaggaggcccaatcctaaaagtttgggcagagggaaccaggcacgttaaagaagacagaaagcggactatgcagagtgcttgtgagggtttcactaaaacagaggcaaaactgtccattgaattcagtaacatgaagtgtttgatgactatgatggcagcagtttcaggaagggcggtatggaaggcaggctgtactggttgagtgaatggaaagttggggagtagaacgtgtgagaagttggccttcaaggggctcaggttaataatagagagctatggagtcaaggcatgtttaagatgggaggtagagcacgccaatattgatggcaacagtcaagatggtgtgatgagagagatgggaggggcacaaagaggaggacccctgaaggagcagagtccatgagaaagaaggagggatgggacctttgtaggaagagacacagtcctgcagcctcatatggctcaataaaacagaaaggggcaagtatagaagattaggatgtctaaattaatggggaaatgatgaaggagtttgaatctcttctttgtgaaatgaagtgagactatcagctagttgtgggtggagtgtgttctcagaaggtatgaagtagatgttttcctaggtgttggaaaacaggttgattaaggcaacagcagaagggcagggcaaggctgagctctgagatggtcagtttagagtaggatgctgggcactcaggtgtgtgtgtgttgagtggggctctgcacacacctgtcttcccctcatcaggattcaggagctgggatgggtacacttactgcagtgttggggttttgccagggaagtaaaaggagctgagagaaagatgggtcagttcagaagacatacacaggagaaattgtagtgatgaaatgtgcagtctaaggtttaatctgaccaagaaattggaattgaaaacaggaggtgactagggagggattaggaaattagaggtcttgacaagatagaaactccagcatggtgaggggttgggcagggaggtatatttgagccagacaggagtgctttggaaattgagaggtggagcaatctcaggtaaaggcaaaatagagggtatgacctggggttgctggccagagccagggaggagccttaagaagtgaaatctagggttggcgaggctggagggcagggtgagcctccacatgggtgctgaagcaagaaaccgacagatgttgaggagaatggtgtgacctaggagtcagcatccttggtgaacaagaggagtggccacaaggccagtggcacctgccagaggggaaagcaggcatgacaggatagcatctcccaggtgagagccttttgaggaagggagggtgggcagtggtctggaagcttgatgcagagcagtgtgggtcccactggcagcccttggtcttagaagaatgggagtacccagtgggggagcagctgtacaatgaggtagactcctagaggttaattatcatctcctaatcttaccctgacccttttgtcaaacgttatctagattaaacctcagtataggcaggctgcaggaaatggacattccagtggcccctggggttccagcctgtagcagcttcatctgtgctttgtgcacttggttctcagtcatctctgcaagggaccctgacgcctgggagatcagagccactgaccctttatggcactgctaacagaccccttccctcaggtaattctggatccagaactcattatgggatgtaatccaggtcaacactaataccacttggaaggttccgctctgtctcactctgcttgagtatcccactgatcagtctctcagcgcctgcctactgggcagctcatctgtccacttattcgtattaaatttgctttttattt

SEQ ID NO: 31306 - DNA, 2594 bp, Homo Sapiens
tggtgcgtcgcggcgtggtcctccggcggctgtccggggcggtaggagttggctgcgggatgtgctcagccggggagctgctgcggggcggcgacggcggggaacgcgacgaggacggggacgcgctggcggagcgggaggcggcagggaccgagtgggatcccggggcgagcccgcggcggcgcggacagcggccgaaggagagcgagcaggatgttgaagactcacagaaccacactggtgagccggttggagatgactacaagaaaatgggaacactttttggtgaactgaacaaaaaccttatcaacatgggcttcacaaggatgtattttggagaacgaatagtggaaccagtaatagtcattttcttttgggttatgctgtggttccttggcctgcaagcccttggactagttgctgttctttgccttgttattatttatgtgcaacagtaaaacatggccgaattgaattgtttgacatttggtagccatatatgtaattgaagaagttatatatttcactttttgacaaccgaaaaagtttgccttgtttcaaatcatgtgctggctgttttgtaagtaaatttatacatggatgtcacttaaaactaaactcttgatcataacagggttgaatatatattttgaatatacattagcttattcaaaactcttgtttcactactgtgatctctgtctcctttatacacctctatccccatgccaaatcttaagtaacaccaccagaaagtgaacagggaaaataacaggacatggaattcaaatcaagcaatatagttcttataaagagttccaataaaacatttcagaagaaaaagtatgaaacaagctaaaagtaagtttcacttagaaaacttctccccactcacactccccaccaaataatctcatattatttgggaaatatttggatttcaattgtccctacccagcctaaactaaggtaaatgataattagcatacactaccttaatattgtgatgaaaatcagtaaagatagaacgttttctaaaggtcgaaaataatatatttattattactggggaaagctcccaggttaaatataacttttttaaaatgtaacatttggacctagacctactttaatatatcatttgaagtttcagacaattttggtgctaattactttttgtgagtttttaaagtctcatagcctagttgactgcaccctatggtaatgccatattttcttgtatctaacaagttgcatattttttcctagagagacattttcagtgtattttttttttagaaatttataattttatagttctttcataacacttattctgagttttgaaacaatgtatttcctatcttgacatggattttttcacaaaaaatttgtattttactgttgttttcaggaaaaaaatcagatcatttttctttgatatctatatcagaaaggtacaatattaacagtataaaaccaaatgcttaaatttggaacttagccaattttgataatctttttctaaggctaaagtcacatcagtaattggctagccatgttattaaggtgtcttaattcagcattttcaggttttatattgaaatacgcatttctttaaatattctttgaaaatggagaatggctttagtgatattttgggttttgttagagaacctaaaatctttacactttcatctcaaagattataaaggaaaggggggtagttaagatttagaattcaagttaaatttcagaaattggggcagtcaggcatttgtatctttggtagggcaacaagtaaaacatgtagagtgcttgctatcccacttcataaagcttttacccaatcttatttctaaacctctgtgcattcttagtgtcttctcattctgaaacagaaaataaggaaaaacatttaacttagttttctaaaatcagataatcctaaacaaaaatgttagtcagggtcactaaaaagtattgcacatttatataaatacagtccttttaaaatttgacttttaaaaaacaaaagactttgtacgatattgtgtttttattgcgtttgcaatatttttatagtagcctttatgaactcagtataagtgcaagttgtttgaaaaggtgtttttattagtgcacaatagaattgtgaggttttcaatagatgtcatgagattttgtatatctacataaaatatcagtacatttttttctaatgctactggaaattttacttttcctttgcaacacataaatgatatgatgtacaaaataacagctctggttccaccagtacctaatgttgaaaacatttttaaagtaatttttaatactaactatttagtatactgtcagtactgtacatctgcacactggtgttaatagggtatatattaaattatataaagaaataagatattttgctgttattctttctacatatattattggtcagtacatcaaataatatttggctttgatatgggaaaaaacaaactttgcctatgtaatggaaataaaatattttcttttatgaaatatattagaatgcagattatactaatatcctgaaataaaactggtaattt

SEQ ID NO: 31307 - DNA, 1438 bp, Homo Sapiens
cgcagtgccggcgtcatggcggcctccgcgcacggctctgtctgggggccgttgcggcttggcatccccggcctgtgctgccgccggccgcctctgggtctgtacgcgcgcatgcggcggctgcccgggccggaggtgtctgggcggagcgtggctgcggccagcggaccgggcgcctggggcactgaccactactgcctggagctgctgcggaaacgggattatgaaggttatttatgctccctgctgctccctgcagaatcccgaagctctgtttttgcactgagggcctttaatgtggaactggctcaggctggattactcttgctgctgtcttgctgtactgtatgccactgggatctgaacactaaacattgctaagaaacccacccaccaccaggatatttggaagtaacttcacatatggaaaagttaaagactcagtctctgagaaaacaattggactgatgcgaatgcagttttggaaaaaaactgtggaagatatatactgtgacaatccaccacatcagcctgtggccattgaactatggaaggttgtcccagctttggacagcggaaactccttcacagcggctgctatgtccttgtgacacgcttccgtcattttttggagcactttcttattttctgacacaataagatattctaggatccttttgaatctctcccctgcctcacctttggaatcgcccatttctcgagagccctgattcctttaaggagaatggtagtagagacaagtgtctgggcactaggctgttaaaagacataatctgactaaaagatggcttatgaaaatcgtcgatgaaagagaaaaaaatctggatgacaaagcatatcgtaatatcaaggaactggaaaattatgctgaaaacacacagagctctcttctttacttaacactagaaatattgggtataaaggatcttcatgcagatcatgctgcaagtcatattggaaaagcacaaggcattgtcacttgcttgagagcaacaccatatcatgggagcagaagaaaggtgttccttcccatggatatttgtatgctgcatggtgtttcacaagaggactttctacggaggaaccaagataaaaatgtgagagatgtaatatatgacattgccagtcaagcacacttgcacctaaagcatgctaggtcctttcacaaaactgttcctgtgaaagcatttcctgcttttcttcagacggtttctctagaggactttctaaagaaaattcagcgagtggattttgatatattccacccatctttacagcagaagaatacattacttccattatatttgtatattcagtcatggagaaaaacatattaaaataatttcatggcaaaaaaaaaaaaaaaaaaaaaaaaaaaaaaaaaaaaaaaaaaaaaaaaaaaaaaaaaaaaaaaaaa

SEQ ID NO: 31308 - DNA, 2317 bp, Homo Sapiens
aaatctgtccgcccccttggccactgatcccccgaagagcttctgtcgccgctctaggaatagagacattgaagtttgggacaagatatttatctaacttctgtgtcaaaattagcgacctgctatggcaatgaagaaagaaactgaatttgtcattttcacctgaagaaaaatgatagacaaaaatcaaacctgtggtgtaggacaggattctgtgccctatatgatttgtctgattcacatactcgaagaatggtttggtgtggagcagttggaggactatttgaattttgcaaactatctcttgtgggtttttacaccactaatacttttaatacttccttactttactatctttcttctctaccttactattattttcttacacatttataagagaaagaatgtattgaaagaagcctactctcataatttatgggatggtgcaaggaaaacagtggcaactctgtgggatggacatgcagccgtttggcatggttatgaagttcatggaatggaaaaaataccagaagatggaccagcacttataattttttatcatggagctattcctatagatttttactatttcatggctaaaatatttatacacaaaggcagaacttgccgagtagtagctgatcactttgtctttaaaattccagggtttagtttattactggatgtgttttgtgctctacatggaccaagagaaaaatgtgttgaaattctgaggagtggccacttgttagctatctcaccaggtggagttcgagaagccctaattagtgatgaaacttataacatcgtatggggtcatcgcagaggctttgctcaggttgcaattgatgcaaaagtgacgaagaatgctgttcaagctttgattgataagcaccaaagaataccaggaaacattatgagtgctttgttagaacgttttcattgataacaaagggtcaactagaagatgatttagtacatttatattaaatgtttgtatctaaggtactgtcttctgaattttgtaggtcctataattagtattttttaaaaaaatcatgttaataagcatctttcacagaattcgtttctttaaaatagtcaattttgtttttgcaattgtgtcaaatactaacaaattacacacctagtaattcagaaaaagatgtcttatttgtaaattcctaacaatttatgctaaacatatagattcttaagtttattaataacagcagtttaggttaaacaaacattcctggataatgcgttaaatttctgtatctgtcgccctgagctgattttgaaagatggtataagctaggggttagtatagttgtttaagttagaaaaaacatgctgttgtctgcccctcattcccttcatgaccttgggcaagtcacgtaatgtttttgtgcctcaacaattcactttttaaaaacatgatcgtatgatgaatgatattattttgttatttatatttactgtgattgataactgttgaaccaaaataataaaataattaatttaaacaatgtcaaaatcctttagcagttatgtatatattttctccattgtgtgtttaaattatgtcatgtccagttgccaagcacaatgaaaaagatgtattattttttaaattgaataaaaaattaggaaaaataaaatttctaattattatttttagtatgatatttttaacaagagtctataggcaaacaatatagggtgtgctgtgcattgtcagccctatactgtggtcttaataatgccagcttaaaaatcactgttgtgctctgcatttcgtgtgttagaagctgattctaggctgaggaaagcaagagttctctacttttgctcaatattgaggcttacccagtttgactctacagccagtgaagtggtttattgcttcaataaaaatatacttgaatgatgaatttatttatgttttgttttgtttttatttagagatggggttttgccatgttggccaggctggtcttgaactcctgacctcaggtgatccacctgcctcagcctcccaacttgctgggattacaggtgtgagccaccatgcccagcctgaatgatgaatttatgtgaacacaaagccctctgaaaaattaatgattttcaatttgttgtcttcttgaaaactgaatttaagtattatttaaacagaaaagtgtcagaaatcaaatgcagtatctccctctcccttttttaaatgttgaattagtagggtttttgtatagctttttgtattgtgtgtatttatgatatgtgaaatgtacataaaattaaacaatgtgaaaat

SEQ ID NO: 31309 - DNA, 3685 bp, Homo Sapiens
atgggggagctacccaaagcctggggaaggggagtcagtgctggaggtgactggagccgcggcgacggcggcagcagctgcggtggcggcgctctcagccgtggcagccgaggctgcagcccggcccagggcggctcagcggacaataaccgggctaggaacctgaccgggctggaccccactgtgatgcttcctgactgataatgttataacagtgcctggaagcctgaggctgcatttccagctggacgtacctcagttgtccccatcatcatggagacccaaaaggatgaagctgctcaggccaagggagctgcagcctctgggagtacccgtgaacaaacagcagaaaaaggagccaagaacaaggcagctgaggcgacagaaggaccaacctcagagccatcctcatccggcccaggtaggctgaagaaaactgccatgaaactctttggtggcaagaagggtatctgtactctgcctagtttctttggagggggacggagcaaaggttctgggaaaggcagctccaagaaaggtctcagcaagagcaagacccacgatggcctgagtgaagcagcccatggccctgaagatgttgtcagtgaaggaactggcttctccctgcctttgcctgagttaccctgccaatttcccagctctcagagtgcccatggggctttggagacaggctccagatgtaagacatctgtggctggagccacagagaaagctgtggctgagaagtttccctctatgcccaagccaaagaaaggcctaaaaggcttttttagcagtatccgccgtcaccggaagagcaaggtcactggggctgagcaaagtgagccaggggccaaggggcctgagagggtcagagccaggcctcatgagcacgtgagctcagcccctcaggtgccctgctttgaggagaccttccaagcccctagaaaggaaaatgctaacccccaagatgcccctgggccaaaagtttctccaacaccagaaccttctccaccagctactgagaaaatggcctgtaaagatccagaaaaacccatggaggcctgtgcctcagcacatgtgcaacccaagcctgcccctgaagccagtagcctagaggagccccatagcccagaaacaggggagaaggtagtagcaggagaggtaaacccacccaatggccctgtgggggacccactgagcctcttgtttggggatgtgacatccctgaaaagctttgattcattgacaggttgtggtgacataatagcagaacaggacatggacagtatgacagacagcatggcctctgggggccagagagcaaaccgagatgggaccaagcgaagttcctgcctggtgacctaccaaggaggtggggaggagatggccttgccagatgatgatgacgaggaggaagaagaggaagaagaggtggaattagaggaggaagaagaggaggttaaggaggaggaagaagatgatgacttagaatatctgtgggaaactgcccaaatgtatccacggcccaatatgaacctgggctaccatcccaccacatccccaggccaccacggctacatgctccttgacccagttaggtcttatcctggcctagcccctggggaacttttgactcctcagagtgaccagcaagaatccgcccccaatagtgatgaaggttattatgactccaccacacctggatttgaggatgattcaggtgaggccctggggcttgtccgcagggattgtctaccccgagacagctacagtggagatgccctatatgagttctatgagccagatgacagccttgagaactctccacctggagatgactgcctttatgacctccatggtcgaagctctgagatgtttgaccccttcttaaactttgagccctttttgtcctcccggccacctggggcaatggagacagaggaagaacggctagtgaccatccagaaacagttgttgtattgggagcttcggcgggagcagcttgaggcccaggaggcacgtgcccgagaagctcatgccagggaggcccacgccagggaggcctatactcgagaggcttatggcagggaagcctatgccagggaggcccacacttgggaagctcatggcagggaggccagaacccgagaagcccaggcccgagaggttcgttgtagagagactcaagtccgagagacccaggcccggcaggagaagcccgtcttagagtatcagatgaggcccttaggcccatcagtgatgggcctggcagcaggggtatcagggacctctcagatttcccaccggggaattacctcagctttccccaccactgcaagcagcgagccagactggagggacttccgtcctctggagaagcgttatgaaggaacctgctccaagaaagatcaaagtacctgcctgatgcagctcttccagagtgatgccatgtttgagccagacatgcaagaagcaaattttggaggatctcccaggagggcctaccctacttattcaccccctgaagatccagaggaagaggaggttgagaaggaagggaatgccactgtgagtttctcacaggccctggtagagttcaccagcaatgggaacctcttttccagcagaagatgcccaggtactgaagacaaacgccaagtgactcaggcgtgtgggacctggtagacagcttgtcattttctggctttattttatgtttttctttcttttgaacccttcttccccatgtctagaccctctgagagtactcatgtgtcttattttttttcctcgttatgttttgtgctttagttttgaaatcagagtgcccatgttgtgctttgtcttgttgagtttctccaaaggagcattttgggaacattctccacccaatggggaaggaagggggtttcaaccatgtcccctttccccaagaagctgtgggagacagatgacaatgatgcttgcactatcaggaatttaccatctcgttgaggaaacccttgcataggacttcctaggagctcagttgattgtgacattttcccagaagagaggctttggggaactccttcacccctcttgctgctttgggggaatctcctcccctaccaccattccccctcccctgccctgctccagctcacacgtggatggtactttggggaacagtgactttcagggtgatggcttgctggcctgatccctgactttccaatcctatagtcactccaaagaagaaaatccacatggtatgtatatgtgtgagggttgggtctattgagaggtgggactttaattattgttattattattggtgcttatttttcctgctgtatatgggggtgggggtgggggggaataaaacaggaatgtatatttaggtcatgttaaataaaatggctggaggaaggagggaagaaattaggaactgcagtacatcatcaccccaggtgtaagagttatttctctcccagtgcagaaaggggagtgtggcccctggctgtacctgagcttcctcttctccatccctgagacatcacagaatcacccgggttctgacctctccacttctagctctcactgacatctggatatcttgatgcactgcctgtttgtaacaacatatacttctttgctgaatgctaataaacttctgggttcaagagggaactcctcagtc

SEQ ID NO: 31310 - DNA, 2547 bp, Homo Sapiens
gcacagggagccggctaaaacagactactcccccgtgcagtcgttccctctaccctaataaggctttggcgcctctcccagaactcggtcctggggaatgctctttgcctggtccagccccgacaaacgtggtctgagaacagcggagcgcggaaaccgcggagcatgactcctccgaagctgcgagcgtcgctgtcgccgtcgctgctgctgctgctgagtggttgcctcctcgcggctgctcggagggagaaaggggcggctagcaacgtggcggagccggtccccgggcccactggcggctcctcgggtcgcttcctcagccccgagcagcacgcgtgcagctggcagctcctgctgcccgccccggaggccgcagcgggcagcgagctggcgctgcgctgccagagcccggacggggcgcgccaccagtgcgcctaccgcgggcatccggagcgctgcgcagcctacgccgctcgccgcgcgcacttctggaagcaggtgctgggagggctgcgcaagaagcggaggccctgtcacgaccccgcgccgctccaggcccgcttgtgcgcgggcaagaagggccacggcgccgagctgcggctagtgccccgcgcgtccccgcccgcacgccccaccgtcgcgggattcgcgggggagtccaagccccgggcccggaaccgggggcggacccgggagcgtgcgtccggcccagccgctgggaccccgcctccccaaagcgcaccgcccaaagaaaacccctcagagaggaagaccaacgtgggcaagaggaaggcggccttggtccccaacgaggagcgacccatggggaccgggcccgaccccgacgggctggacgggaacgcggagctcacggagacctactgcgctgagaagtggcactccctctgcaacttctttgtcaatttctggaacggctgagactgcctgccggcttagggagggttgatgggggaggcgtggggaagggaaagctaagggcgtcttagaccggggggtactgtgatagagattggggagaagtccaggttctcgaatgggggtgggggcaagggtaagggtgagatgcttgggatgagagtgtaaggggtatggagaatctctgggatagcagagaagttaaaaattttgaaaagtctcagtcctgattaagagcaggaaaaataatggaaacagaaataggcgtactttaaatgtgcaaaaactggagactggggagagaaatcgatgcagagagaggctgagaataagggggagatagagtgactaaagtgatgtgagtcccatgtggggagggggatgcaatgtttattgtttaacatttctattaaatgcagccatgagcaattgccaacctgagccaggttgaatcaatgtcttctcacttaatcagctaacaagactgcagactttttttccgtttctgaattggtataaacttggatgcggcgtggtgggtgtcatagataacctctatagggacagaagcctcacaggtcaagactggctccaaggaaagttttgcagaatgatttcctttccattcttttagaagagctacctttttttttttttttccctgacagggtctggcttgcccaggctggagtgcggtggctagtcacaggtgtaataataggcactgcagtctccaactcctggcctcaagggatcctcacatcttagcctccagaatagctaggagtaggagtagctgggactacaagcatgcacagctgcacttggcttagaagtgctactttatttttatttttgagacagggtcttgtgtcatccagactggagcagtggtgcaattatggctcactgcggcctcgactttccagtctcaagtgatcctctgcctcagcctccggagtagccaggactacaggggtgtgccactagaagtgctactttttaacgaaatggtgactaatgttctggaactttcccattaaccttctgcatttagaaggaattatagatgttgagtgctccagtaaacagtgattctctttatatctgattttttttttttaaacagctaaaatgtaagtatgtatctcagagtcattttgaccattatggaagttatatctctctgtttcatgtaactaattattaatatatttcatttttagtgtgatgtaatgagagactgtgtgtgtatgttaggtgctcaataaaaactgtatggttagatttaaagaagtggcaaggcaatggaaattctacctgcatttgatctacttccaagtacaccttgaattaagttcttaaacacatcttgaattgctgggaaaagacagaaactaagaagttgacataaagcaagagtcacaaactggcagccacctggccttatcattgttctatttgatttgcaccctggttctctttctttttcccttcctccccaccttcctcccatccattgttgaatctgtggatgcagagcccacggatgtggaggggcaactatatatatgtttttccattatatatataaatgtgtgtgtatgt

SEQ ID NO: 31311 - DNA, 3774 bp, Homo Sapiens
agcgaagggcgggaccaaggccaagagcccgacagttacgccactcacacttgcggaagagttaacgggacagcggtgcaggccaatcgcaaccagtcctctggaggcagggagactggggtggagacttcggagactgcagttgcagttctaaggacatatggaattggctatggataattcatatgctttcaatcaacgaagcacatgtaatggaattccatctgagaagaaaaacaacttccttgtatcagaagatcatggacaaaaaatcttaagtgtactacagaattttagagaacaaaatgtcttttatgatttcaaaataattatgaaagatgaaataatcccgtgtcatcgttgtgtgttagcagcatgcagtgactttttcagggctatgtttgaagtaaacatgaaagaaagagatgatggaagtgttaccattactaatttgtcctccaaggcagtaaaagcatttctcgattatgcctatactggaaaaacaaaaataacagatgataatgtggaaatgttcttccagttgtcatcatttcttcaagtttccttcctatccaaagcttgcagtgactttttaataaaaagtattaatcttgtcaattgtttacagttattatctatatcagatagctatggctccaccagtttgtttgatcatgcattacactttgtacaacatcacttttctttattatttaaatccagtgatttcttagagatgaattttggagtactacagaaatgtctggaatcagatgaattaaatgttcctgaagaagaaatggtactgaaagttgtccttagttggactaaacataacttagaatcaaggcaaaagtatctgcctcatttgattgaaaaagtgagattacatcagttatctgaggagacacttcaggactgtctgttcaatgaagagagtttactcaaaagcacaaactgttttgacataatcatggatgcaattaagtgtgtgcaaggttctggtggactcttccctgatgctcgaccatccacaactgagaaatacatattcattcacaaaactgaggaaaatggagaaaatcaatatacattttgctataacattaaatctgattcatggaaaatactgccgcaatcacacctgattgatttgccaggatctagtctttcgagttacggagagaaaatattcttgacaggtggttgcaaagggaaatgttgtcgaacggttcgactgcatattgccgagtcatatcatgatgccactgatcaaacctggtgctactgtccagtgaaaaatgatttcttcttggtatcaactatgaaaacaccaagaaccatgcatacatcagttatggctctcgatagattatttgtcataggtggaaaaactagaggatcccgggacattaaaagtctcttagatgttgaatcttacaatcctctttccaaagaatggatatctgttagcccattacccagaggcatatactatccagaagcaagcacatgccaaaatgtaatttatgttcttggatcagaggtagagattacagatgcttttaacccatcacttgattgcttttttaaatacaatgctacaactgatcagtggtctgaactagtagcagagtttgggcaattttttcatgcaacattaattaaagctgtaccagtaaactgtacactgtatatatgtgacctttccacctataaggtttatagtttttgtccagacacttgtgtttggaaaggcgaaggatcttttgagtgtgcaggctttaatgcaggtgcaattggaattgaagataaaatttatatattaggtggtgattatgcaccagatgaaatcacagatgaagtgcaggtctaccacagcaacaggtctgaatgggaagaagtttcaccaatgcctagagccttaacagaattttactgccaggtgattcagtttaataaatacagagacccatggttttctaatctatgtgcttgaacattctaaaacgagtccagttctagtaacctaaagtaaatttgttaaccaaaatgataggtaaaaagatctatacatcttaatgaaataaaacattcctgcttttagttattatgtatgtacaccatatatgaataaacagtttccaaaaacttaaaatacaaaatatattttaccaaaaattatactgaatataatttaaccttggggaatccagaatacttagtattttcacatgaaactacaaatcatagactctgacactttgatttttaaagtactctgtccataaaagatttgtactgtttagatgggagaaacctctagagagagtaaaaatgaattacactgtatcttatatgaagtaaaaaataaatcagaggtgagaatattgttactgcgggtatgagttgttgaattcctatcatttgtgatgattggttaacttcttttaggtaccctttttacccttttttagttcagaaataattctcccagctttataaatagtacactaaacatagtttaactttttttaatgactcattttttcattaaaagcataatgtaccatgttataatgccattagcagttacttaaatgctttaaaaattgctgattagttttcaatgtcagttggtttcaatttctagctctctctctctctctcctccccccctctcattttctggttcaatcttagtaaattaacattctggatttaattagtagttctaagttacacctggcctgagtttatgttaacatgtaaccctcaattggaaatttttggattctgggatggcagtactaaaatactttttatgtatcattgctaggttccagcctaattaagaacatagaaaattgacctctaattaagtggatcattattatggcatttcttaagctttatccaaatttcagctacataaaacatttcaggatttaaattagtaccatatcaattttctgtgatgatgtttaccaactataaagcactatgttggtttactacttcagtaaattattcttagtgaattattttctaaattaaaaaaaatgacttggctttggtattgataatagtattcacaacctgcatctgttaagatgtttgatctttaacccacacaatgtaagggtactgttgtcattgttctcaggtaggtgattctgccttccaagagtatatgtttctttaatcagtttaaaagataaaggcattttgggttttaagacccctgctttacatctcaggtaatgtgtagattgtacttctctggaaccaaatgtagttttctacactcagttgtaaatgttaatctttctcaaatgtgcacattctttaaaagtgtgttcctaagtagaaatatacctaaatgaagattctcttattttatcatataaatttatgcaacgataagttccaaatgtatttttcaaaacagaatggaatatcagagtacattttcatgaagtttaaaaatcaaggactgttcctgattagatgacgtatttattggtggccttcttatctaagcacatgagtagttggctctgaactttgtgtatttgaaaaaggaaaattcagtggaggcttttgtttgtgtgtgtgtggctttgaaaacaaattatttgagaaagaccataacacagtgagtagcctatatgtgcatttactgaattgttaatttaaggatatatattaatagagtatgtttaaaataaatattgttttcatcactgaaaaaaaaaaaaaaaaaaaaaaaaa

SEQ ID NO: 31312 - DNA, 2920 bp, Homo Sapiens
gagtcatctgatagctcatcaagctctgaagatgagtgggttgaggctgttccatcccagactcctgacaaggaaaaagcctggaaagtgaaagatgaaaagtcaggaaaagatgacacccaaattatcaagagggatgagtggatgactgttgattttatgtctgttaaaactgtgtcatcatcatcactcaaagctgaaaaggaaactatgaggaaaatagagcaagagaaaaaccaagcgcttgaacagtccaaactgatggaaagagaattgaatccgtactggaaggatggtgggacaggtcttccacctgaagactgtagtgtgtcatcgattactaaagtttcagtggtagaagatggtggattaagctggctaaggaaatcttatctaagaatgaaggaacaagctgagaaacaaagtagaaactttgaggacattgtagccgaaagatatgggtcaatggaaatatttcagtcaaaattagaagatgctgaaaaagctgcatccacgaaagaagattatagacgggaacggtggaggaaacccacatattcagataaagcacaaaattgtcaagaaagtagagaatcagacttagtaaaatatggtaacagttcaagggatagatatgctacaacagatactgcaaaaaatagcaataatgaaaaatttattggtgatgaaaaagataagagacctgggtctttagaaacgtgtagaagagaatctaacccaaggcaaaatcaagagttttcttttggcaatttgagagctaaattcttgagaccctctgatgatgaagaactgtcatttcacagcaagggcagaaaatttgaaccacttagttcatcttcagcattggtagctcagggctctttgtgtagtggttttagaaaacccaccaagaacagtgaagaaagattaacatcatggagtcgctctgatgggagaggagacaagaaacattcaaatcaaaagccatcggaaaccagtactgatgaacaccaacatgttccagaagacccaagagaaaaatcacaagatgaagtcttgagagatgaccctccaaaaaaagaacatctacgggatacaaagtctacatttgctggcagtccagagcgtgagtccattcacatcctgagtgttgatgagaagaacaagttgggagccaagattatcaaagcagagatgatggggaatatggaattagctgaacaacttaaagttcaacttgaaaaggcaaataaattcaaagaaactataacacagataccaaaaaaatctggggtagagaatgaagaccagcaagaagtaatccttgtcagaacagatcagtctggaagagtatggcctgtgaacacacccggaaagtctctggaatcacaaggaggaagaagaaagagacagatggtttcaacccatgaggaaagagaaagggtcagatactttcatgatgatgataatctaagcctaaatgatttagtcaaaaatgaaaagatgggaacagcagaaaatcaaaacaagctctttatgagaatggcatctaagtttatgggaaaaacagatggagactattacaccctggatgacatgtttgtctccaaagcagctgagagagaacgtcttggtgaagaggaagagaaccaaaggaaaaaagctattgctgagcatcggagtcttgctgcacaaatggaaaaatgtctgtattgttttgacagctctcaatttcccaagcatcttattgttgcaataggtgttaaggtttatttatgtttacccaacgtacggtctcttactgaggggcactgcctgatagtccctttgcagcaccatagagcagctactttgttggatgaagacatctgggaggagatccagatgttcagaaaatcattggtaaagatgtttgaagataaaggattagactgcatttttttggaaactaatatgagcatgaagaaacagtatcacatggtttatgaatgtattcctcttcccaaggaagtgggtgacatggctcccatctattttaagaaagccataatggaatctgatgaagagtggtccatgaacaagaagttgatagatctctcttcaaaagatatcagaaagtctgtacccagagggttaccttacttctctgtggattttggccttcacggagggtttgcccatgtcattgaagatcagcacaaattccctcattactttggaaaggaaatcataggtgggatgctggatatagaaccaagactttggaggaaaggcatccgagaaagctttgaggatcagaggaaaaaagcactgcagtttgctcagtggtggaaaccatatgacttcaccaaaagtaaaaactattgaggtgtaccttccattttaaaatttttcttcagatcccgttcagttttatttccattgcatctaatgaagcaactgaccctcaggtcacaggcagagagaatcacagcagcagactgctctgggtcagtgacaactgtacatcaggagattgtgttgttttcttcttcacctgctcctatctatggacttcattttagtcaccatggagtaaaaacatatattcgatgatctgctcacattcctgctctctacctacttcttggtattccgaattgttcagttaatttagagaaggccttttctgaagggatatctagaaagcataggaaatccttggttcagagggaagtgggtctgcttcatggttgttaagtctactgtctggcttcttttgcatttttaaaaataagacgatttaattttaatttcataggattttatagaaaagctcttaattttctactagcagtatatagtatcacttctattctttttgttaaaggaaaaggaaatgtccccaaagtattaaagaattaaatgatactgaaaattt

SEQ ID NO: 31313 - DNA, 2929 bp, Homo Sapiens
cgcggtggcagctgcgggtcgcgggtcgcgggtcgcgagtcgccggtcgccggtcgcggcggagcctgggcgctgagaagggacttggagggaagcgggcctggagctgctgccgccgcccctgagctcggacgcgaaggctggccccgtccccgggctgccgccgtggtcctgcagtgaagaaaatgaggcacgaggaattgttaaccaagaccttccaaggcccagctgttgtgtgtgggactccgaccagccacgtatacatgtttaagaatggcagtggggactcgggggactcttctgaagaagagtctcaccgtgtggttttgcggccccggggcaaggagcgccacaagagcggtgtccaccagcctccccaggcgggagcaggtgacgtggtgctgctgcagcgggagctggcccaggaggacagcctcaacaagctggcgctgcagtatggctgcaaacacattttattttagacctaatggggctggagataccaggcagaatttaattccggatttctatgcattcagagtgattaacaatggcaaagttgcagatatcaagaaagtcaacaacttcatcagagaacaagacttatatgctttgaaatctgttaagattccagtgagaaaccatgggatcctgatggagacccacaaagaactgaaaccccttctgagcccgtcttccgagaccacagtgaccgtggaactgccagaggcagacagagcaggcgcgggcaccggtgcccaggccggccaactgatgggcttctttaaggggattgaccaggatattgagcgtgcagtgcagtcagaaatctttctacatgaaagttactgcatggacacctcccatcagccactgctcccggcacctccgaagacgcctatggatggtgcagattgtggcattcagtggtggaatgctgttttcatcatgctgctgattggtattgtcttgcctgtcttttatttggtctactttaaaatacaagctagtggtgagacccctaatagcttgaacacaactgtcatccccaatggctcgatggcaatgggtacagttccagggcaagcccccagactagcagttgcagtgccagccgtcacttctgcagacagccagttcagtcagaccacccaagcggggagctaagctttgtttttaaagactcggcccagctttagcaattggctgttgatgtgcctcagctgtcactggcgatgtcctaggggtgctgcattttgcttccggggaaggatggacacttttcagaagtcactgcagtattcccaattgcactggccctgggcatggccttacccagtctaagctggcaggatctaaaacagcagcgacctcggcccctatccagagaggtgcagcaagagagccatttccctgtgacatttagtggactggccagttcatagcagcactgtgaggacccccaagttggacgtgctcggagggaaagatttatggcctctgtcgagggacctgcagcgtgagagccagtggcatctgcgcggcttgcctggctcttgctgtatcctcacttcctgtggagcggggattggctctgagaaggagtgttctctgtctgcctggcaaaggtgctgtggaataggcttggcatgccaccctgttttagagagtgacagttacagttgtaacaagcctacttcatattggccccctcagttagcctttttgaggcaatgccatttctagagttgaaaaagccctggacccaaactgcggcactgttgaataaagggcagtcctactcctgtccttttagagtggcttagtgtgacacacaggcatctcccaggccaagcacacacaggctgcgcccagttccgcaggagccgtcccacagcgtggctctctggattctcccacttgtcctccttggaaggagctcttgctggccagtgtttggaggggaggatgagtgcctgtcactgaggcctcactatggttggcgtctgaagctgggcggtcgtcaggcctgtgctgagagccgcagcccctgtgcacacctaacacagggcgctccccctgctgcttccctggctcagttcttcggagctccagagtgagaaggccgcttcgtcctttttctctgggtgatgcccttagaataacactatatgcaatgtaactcacaatgttccaggaccaaagacttgatggaggggctagaggcgacccttgttgtaaaaggcgatcagaacacctgagggaggaaggggcttgcagttttcccagcccttctcgctgccaaggcagcagtggtgctgtggatgggctggggactgcgggacagagcctgctactacttgggagttggtgctgccctgtggcatggaggggtgggaggggctgagatggctgctggcccggcctccaagagttctggacaggaggcagacactgcccagatgctcggtggagggacagtgatggcctttgactcatgaggcctggagaaaagtatcaaaggtctcaccatgtaagagtgatttccgatttctctcctttcagttgtgtgaaaaaacagctggcctgggttccattagcaaattaaatcatcttcaatcttaaattagagaccagaatgatcttcaggataaaaagaacttctgaatctctgcaataggaaatgtttcgatcatgcaagtgctttcccagccaaatgtctgtgctctctgtgtcactgagggccacaggttcctctaacatctgtcactgtcacttcaccaggcaggccttggagttccatgacaaaatcacttttgtcagacaaagaatgtatcctttacttttctcaaatggaataaaattatttcttctgtggaggaaaaaaaaaaaaaaaaaaaaaaaaaaaaaaaaaaaaaaaaaaaaaaaa

SEQ ID NO: 31314 - DNA, 2601 bp, Homo Sapiens
ggatgctgcgctccacgtccacggtcaccctgctctcgggcggcgccgccaggacgcccggggcgcccagcaggagggcaaatgtttgcagactacggctgaccgtacctcctgagagtccagttcctgagcaatgtgaaaagaagattgagagaaaagagcagcttcttgacctgagcaatggagaacctaccaggaaacttcctcagggtgttgtttatggtgtggtgcgaagatcagatcaaaatcagcagaaagaaatggtggtgtatgggtggtccaccagtcagctgaaagaagagatgaactacatcaaagatgtgagagccactttggaaaaggtgagaaagcgaatgtatggagactatgatgagatgagacagaagattcgacagctcacccaggaactatcagtttcccatgctcagcaggagtatctggagaatcacatccaaacccagtcgtctgccctggatcgttttaatgccatgaactcagccttggcgtcagattccattggcctgcagaaaaccctcgtggatgtgactttggaaaacagcaacattaaggatcaaatcagaaatctgcagcagacgtatgaagcatccatggacaagctgagggaaaagcagaggcagttggaggtagcgcaagttgaaaaccagctgctaaaaatgaaggtggaatcgtcccaagaagccaatgctgaggtgatgcgagagatgaccaagaagctgtacagccagtatgaggagaagctgcaggaagaacagaggaagcacagtgctgagaaggaggctcttttggaagaaaccaatagttttctgaaagcgattgaagaagccaataaaaagatgcaagcagcagagatcagcctagaggagaaagaccagaggatcggggagctggacaggctgattgagcgcatggaaaaggaacgtcatcaactgcaacttcaactcctagaacatgaaacagaaatgtctggggagttaactgattctgacaaggaaaggtatcagcagttggaggaggcatcagccagcctccgtgagcggatcagacacctagatgacatggtgcattgccagcagaagaaagtcaagcagatggtcgaggagattgaatcattaaagaaaaagttgcaacagaaacagctcttaatactgcagcttttagaaaagatatctttcttagaaggagagaataatgaactacaaagcaggttggactatttaacagaaacccaggccaagactgaagtggaaaccagagagataggagtgggctgtgatcttctacccagccaaacaggcaggactcgtgaaattgtgatgccttctaggaactacaccccatacacaagagtcctggagttaaccatgaagaaaactctgacttaggcactcagaggcatacactttttacagatggacaaaagctctggaaccctgtggcttcaaatcctttgggaagggtgactgttgtttcccctacacacagtgtaagccggaatgggaatcgctgaggctctgatccacttctaagacaggaaggaaagtgaaggcagagtgagcaggcaaagtagaaaattcgaaaaggtcctcaacgagtttgtacagctgctcccactccctcatcacctcttgtgggcctttggaaatgtatgttggaggagacattttggattgttgcaatgacttgggagtgccatagcacctagcaggcagaagccagaaacaccaaatgtcttaacaatgcttgaggcggtgctacaaatgaagtccttctccaaatgcattgagccccaagaaaaatcgctgattctgaggaaccttccaactttaacaatttcaggacgtccctaagctgagctaggaggcaccacgcacaggccggaggcaccacgcacaggccagagtctcccaaatcctgtcccgcactctctcccaccttattaatggccagctcatctttcaagtttcgacttgaaccacttctcagagatatcttcccaggtgcccatcccaacgttactattatatcataatttgattctccctccccccatccccccgccaactctgtaaaccccaagtataacacaggacgttgctatttgttgactgacacatagtgcttggtgaggtcacgctggcgctgaatactttttgtataaaccgacgaacagctgatgaccgcatgaatgctcacacaaggggaaagggcgccaagccaaggagccggcgtcatccgacgtaacttccgccctttaacgctcctgcggacgcccccttctcccagtccgtgtttgtttccggaatttcaataaagctcgattcggctcgaagaagaccccgttcttccgggaaaatggcgactcccgctcgtgccccggagtcaccgccgtccgcggatccggcgctagtagcggggcctgccgaggaagccgagtgcccgccgccgcgccagcctcagcccgcgcagaatgtgctcgctgccccgcggcttcgagccccaagctcccgaggacttggcgcagcggagtttggtggagctgcgggaaatgttgaagcgccaggagagacttttgcgcaacga

SEQ ID NO: 31315 - DNA, 1785 bp, Homo Sapiens
actcagctctctcaccatgcgattgccctgcaacaccttggaactctgcagagagtccccagcaggaaggtctcacctgaggtgaaccttcgaccttggacttctcagcctccagaatgaagaatggcaaccatcaaatcaagaaattggcccaaagccctacagtctgcaaacatcataacaattcatcctgaagtttctccatgaattgtgatgctttgctacatcattctgcaatcccagaagattttttgcatatttttttgctattacagaaaatctcagtctccctccctctctctctctctcaatctgtgtgtctcttttactccatatctctgtgtgtgtctcttttactccatatctctctgtgtgtgtctgtttatgtctctctctctctctcatccttcccatgtttctctctcacacacacacacactcattcacagctttcaaaagacacgtctgtccttaccttcactttttgttttaaacagcacactcactttactctgaactatacctcacatgcacacgagctttctgctccatctgttcatcccacatgtgtcttcacattcaaagcagcaccttccccaagaccagctacctaaccacctcccacctccaccccatccctagtcagaggaaggcctggttcccacctgaattcagctttgtcaaagagcctcctggaaagctgtcatcttcagttagtagggataatgggattattctatctgtgtaataataacatgttcaatttaaagaaaaaaatctgaagccacttaaaagctactgtttggcaccgatacattattccagtaatgaataatcattaaagatattattctggatgcagttaccatgcagtgatgtgaataaaatgcattagatggaaaattgtatttcaagtaaatatatgcactggtagaaatgtattaccacccactaatatgtattaattcaaaaccaaatgccaactggagttcgcctacacgggtttgaatggcaggcagtgatttggaagtgggaggaaataggtttggatttggtcaaatagactgagaagtgatagtgggggcgggggtttatgactcaaactttaacaggtgagaagactatgccatggacagaacaggcatgaggggctcccctcctacgcctctttaagagatttttatctctgactaaggattactggtagttgttgacatttctgaagcagtggatctttttcctttttcactatctgcatcttcaaatattcttttctgaagaaagttaaaaggaagcctgtacattttttgctaaggtaaatgccttgccatcttatttcattttctcatttttttcttcagtgcacaacataagcaactgtcctccttgtcatactcaagatgagcttggcatatctgaaatctgcagggattttctcattagcacagggttccaagcccaaaccgtgaagatggagttttcatttttaaatggcacatcttcaagttcttgccctgtcctcactttagtatgccccagaggaagtcaaagatatggacactctaagactcagaagaactttctcaggcattcattttcctatctattttgagccattttatttaaaaggttacaattttaaacctctctttaattaaaagataccagagttacaatgcaatactatttggcaatcaaaactaatgaagcacagatgcatgctacaacacgaatgaactttgaaacgttgtgttaagtgaaataaaccagttattatacaaggcc

SEQ ID NO: 31316 - DNA, 1263 bp, Homo Sapiens
ggggagactacgcagcctggagccgggctggggaggccggcgggggctgcgccagcatgaggcggggttaggggctaggcgggggcgaagccgagactggagttcacggctgggccgagggctcggccgggctgaggctcagggttggacttcacgcaagagtcctgtagagacgaagacctgggcggagagcgatgtgggtcaggacgacgctcacaattgaaagatggactaaggaaaagaccgagcccaaggcccgctcgtgggatgagagcagatgccgcggtgactgcaaggagcctgacaagtgctgctggagacacaagcagtgcactgggcacatcatctaccctttcgcctctgactgtgtccgccacagcctgcacctacactctgtcaaccactgcaactgtaattctaggctgaaggactcttcagaggatagcagcagctcccggggcgcgggcccaacctgctcccatgtcatcgagtccccttgctttgagctcacaccggaggaggagcatgtggagcgattccggtatggctggtgcaaaagctacagacctgtctctgtggcagtgatccaccatccactctaccatgagtgtggggcagatgatctaaatgaagaagaggaagaggaggaggaggaaagcaagccccccatcccgacacaggtggggcccgccaccgcctcccctgacctaggcaccagcatggccactggtacccctgactccacagcgcccatcaccatctggcgctctgagagccccacagggaagggtcagggcagcaaggtgatcaagaaggtaaagaagaaaaaggaaaaagagaaagacaaggaggagatggatgagaaggcaaagctgaagaaaaaagccaagaaaggccagttgactaagaagaaaagcccggttaaattggagccttccccgccagacgtgagccgatcattaagcgcaagacagctggccaggatgtccgagtccagcccagaaagccgggaagagctggagagcgaggacagttacaatggccgggggcagggagaactgtccagcgaggatattgtggaatcatcatcgcccaggaagagagagaacacagtccaggccaaaaagacaggggcaaagccctcacaagccaggaaggtaaacaagagaaaatctcccccaggatcaaaccccaacctcagttgaggccagggtggtcagggtgcagaataaatgccatcgagcctgaaaaaaaaaaaaaaaa

SEQ ID NO: 31317 - DNA, 853 bp, Homo Sapiens
gtttcccacaatgcagcgcggcgcgctgtccccggtgctgatgctcagcgctgccccggagcctccgccgcgcccgcctcccgccctctccccaccgggctcgggcccaggctcgggctcccgccatggctcggctcgtcccggtcctaccccagagccgtcggggagcctgggcgcggcgctcgacagcagcctgcgtgccgccgtggcgttcaaggcagagggccagcgctgctatcgagagaagaagttccgggaggccatcggcaagtaccaccgagcgctgctgcagctgaaggcggcgcagggggcccgccctagcggcctgcccgccccagcccccgggcccaccagcagccccgggccggcgcgcctcagcgaggagcagcggcgcctggtggagagcacggaggtggagtgttacgactccctcacggcttgcctgctgcagtcggagctggtaaactacgagcgcgtgcgcgagtactgtctcaaggtactggagaagcagcagggcaacttcaaggccacctaccgtgccggcattgccttctaccacctgggcgactacgcacgcgcgctgcgctacctgcaggaggcccgcagccgggaacccacagacaccaatgtgctccgctacatccagctgactcagctgaagatgaatcgttgcagcctccagcgggaagacagtggggctgggtcccagactcgggatgtaattggctgaggccaatccagggggacctctctatccctcgccctcccacctcaccatgtaacttcccccgactcatgtgtttgttggtaaaacacttgtcactggtgatcataaagaaaaaaaaaaaaaaaa

SEQ ID NO: 31318 - DNA, 3158 bp, Homo Sapiens
gccggagccccagcccggccctgctcgggccgccgggcgcggggctgcggccgcgtcccggaggcgccgccagcacagccaggtgctgttgggaacacagaggaagtgactggctgggggttcagggaaagctccgtagaagagggaacacttgagctgggtcttgaaggatgagtagaagttcaccaagtgggaaaggacactctaggatggccgagcctcgatttaacaacccctacttctggccccctcctcccaccatgcccagccagctggacaacctggttctgattaacaagatcaaggagcagctgatggccgagaagatcaggccgcctcacctgccgcccacgtcggcctcgtcgcagcagccgttgctagtgccgccggcacccgccgagagcagccaggccgtcatgtcgctgcccaagctgcagcaggtgccggggctgcatccacaggcggtgccgcagcccgacgtggcgctgcacgcacggccggccaccagcaccgtcacaggtctggggctgtccacccggaccccgtctgtgagcacttctgagtcaagcgcgggcgcgggcacgggcacgggtaccagcaccccgtccacacccaccaccaccagccagagccgcctcatcgcctcgtcccccaccctcatctcagggatcaccagcccccctctcctggactccatcaagacaatccagggccacggcctgcttggcccccccaagtccgaacgcggccgcaaaaagatcaaggcggagaacccggggggtccgcctgtccttgtagtcccctatcccatcctggcctcgggcgagactgccaaggagggcaagacgtacaggtgtaaggtatgcccactgacctttttcaccaagtcagagatgcagatccactccaagtcgcacacagaggccaagccccacaagtgcccgcactgctccaagtcctttgccaacgcctcctacctggcccagcacctgcgcatccacctgggcgtcaagccctaccactgctcctactgtgataagtccttccggcagctctcccacctccagcagcacaccagaatccacacaggcgacagaccctacaagtgcccacatcctggctgcgagaaggctttcactcagctctccaacctccagtctcaccagcgccagcacaacaaggacaagccctacaagtgtcccaactgctaccgggcctattcggactccgcttctttgcagatccacctctcggcccacgccatcaagcacgccaaggcctactgctgcagcatgtgtgggcgggcctacacctcggagacctacctgatgaagcacatgtccaaacacacggtggtggagcacctggtgagccatcactcgccccagaggacggagtcccccggcatcccggtgcgaatctctctcatctgagcccactggaggcgccgccccacccggcccactggcagacacagacccaggcagcaccaggccccagctccctccgggggccctccaggaaccaccaagctctctcacgaccttcccaatcttccagaaagcttggtccgcagaagccctgcctggtccagtccgggggcggccaggccaactgcaagattctggactgttttggtggcatccaaagacgatctcagagcactttgaacctctctgttgagttttctttttgttccccacccttcacttgcttcactgtttttttttttttcgttttttttttttaagtttgttttggaaataacagaaaagatatttattggccaggaagttggtgctgctaagaccgagaaatttaaagaatcggacagatggacgcagagaaccagagggcaatgtgggaccttctcttgccatggcctcaggtcttgagggaaggctcgggcctaggtttctggactgcaaaggggacccccaggtgggaggggcaggaagcagccggagtgagcccttcgcccctgagtgcctggctcgcacctctcgagctgtgccctgggcatcactgagcagaggggtgcggcagcttcaggaggcagaaacgagaggggtgggagatccacaggaccaaagggtgcagtgatgggctgggtggcgggcccagggaaatggggtggggatgggctgggtaagacctggccctcccctgctgccctgaagaccaccccagtctacctcggtgctggccaggaaacctttcggctacctctcccaccatcccagactgtgggcagggggatggggagggagtgggcctggatctgggacctccctccagaatttcctccagatgggggcagtgcccagggaggggttatttgtcttccctgccatggagtgggaatccccagccgaggccctaggcccctcagcagggaagggatccccggggaggcaggtcccaggagcagaccctgcccccagcccccacagacacaccccaatctgaaagccatgcgtgtcggtgtatataggaaccatgtacagagcccagagaagccccctacatccccccgggaaaaaaaagaaaactagacagaaactcatctatatattctgtatctggagttccgttttgaatattaactgtgttatttttatacactttttaagccttaactcgccattgatttaccagtttaacgtttcctggggtttctttgcccatggggttctctgcccccacccccggccctttgtttgacttgcgtcgtctgatactcagtattgtagctttttgtccgcatgttactccctgtaaatacgctgttatacatactgttaacacccctttgctttttctatgggacctccaggccaccatatttagaactagttaccttattaaaaaagaaaaaacagtctgttggcttctcagtctgcatcttggaggcagggaggtgagggcaggtgcccctcagacacttcaggaaggtagtttgcattctatttaaaaaagggagtggggagcaaatgaaaatcaaatgtggggggaaaacactaaagggggcaagaaacaaaggaattacaaaccctctgctctttgtatttctctgttgtgaagaataaactgtacctgcacccggaaaaaaaaaaaaaaaaaaaaaaaaaaaaaaaaaaaaaaaaaaaaaaaaaaaa

SEQ ID NO: 31319 - DNA, 2372 bp, Homo Sapiens
acttgggttgcggaggccggctggccggagtcacggttggggacgggcgcgcctcggagcgcacggctgcgctggaagccgcgtctggggcgcaggaccaacgggacctacctcctcccggctacctaaagactccttctctcgggaaagagcgctgcccggctctgggatttgggaggagctcggaggccgctcgggcacctcgctggacactatccgtttgcgccccggtggcgcgggagggtccggagcggagcgctcgtctctcctcagcggtttagtggagaaaagcagagagctcttcctggggcgaatgggacctcctccctcggtcctccgtggagtcgtcgcatcgcttgtcgtgttggtctcgaggggctcacagcttggcactaatttgcaggtgttcgctgctgatttggtttcttcttcgatttgcggacggttccctccagcgactctcgacacacgttttcctgtcttcgccggagggccgggtctggggtcgccggagcctgcgggaatccagcgcttattcgctgaccctcgagtcgcttcgctagctgtgcgccctcctgggcactagcctggagaggagcgtgcagacgcggctccttggagggagtgcggtcctctagggaggcatcgggctcctaggggcttcttggcgtgtgtggtgggattggggtccgccggccatggccttcactttcgctgcgttctgctacatgctgtctctggtgctgtgcgctgcgctcatcttcttcgccatctggcacataattgcctttgatgagttaaggacagattttaagagccccatagaccagtgcaatcctgttcatgcgagggaacggttgaggaacatcgagcgcatctgcttccttctgcgaaagctggtgctgccagaatactccatccatagcctcttctgcattatgttcctgtgtgcgcaagagtggctcacgctggggctgaatgtccctctacttttctatcacttctggaggtatttccactgtccagcagatagctcagaactagcctacgacccaccggtggtcatgaatgccgacactttgagttactgtcagaaggaggcctggtgtaagctggccttctatctcctctccttcttctactacctttactgcatgatctacactttagtgagctcttaacgcaaagaccatgcacatcatcagagactgagatgggagaggcctgagacggagaggtgcatttctgctggtgactggaggagggaccagaatgaggatacgtgagaaatagacccggcaggcagtcagactgaatgggagctggaatcacgcagcagctgggagccgagttaaccctgcgtgtctgtgtcaccctgtttgtcaatctttggcattcgaattccacacacggggtcctagagcccttctgagcatcagtggtgtgggggagtaggtgacgaaacactagacctctcctgagagagaattgctgcttcctgaatccacttcattgaacagcaccttgcaagttcaaatgagttcctgggagcggaggctggaaggccacaaggtgcttgctaaggaacagaatgacccagagtcaaggccaagtctgcagggacctgttgaaagcctcgagaatgtcttggctgcccaagactcttgttgcctttcttccaagccatggccatgccctttttctcaaatgggaggggctggagggtgtgtgggatttgtcttcagctgcaaccagccttgagcctgctgggctattttcagctgaggaggggtgaatataggaaaaatgcatttttgaaacgtttgcaacatgatcaaggtgttagttctccaccacacaagttgtattcttcttttgccacctcaaaccatcacagagtctttaaatgcaaatcaattggtcaatgctagtcaaagctatgttcttacaaaaaccccagacagctcagagctcagaaaatcctgtggagtggctgctctgtaccgtgggcatccggcagccaggaagtgagacaacataattataactttgttttatgatgctgcatcatttgtactgtttaggtcgacgtgaggacatcatcttatttagaattttccgtttggcattctcttttgggtgggagttatgctgggggttgtaaataatgacaaggctgagatttttatgatgtttaaattgggcacaatgattttgaccttattccccaaacttcttttcttttctactgtttaacatacacaggctatttatacacgtccccagctcccatctgaaacctgtgactcaggtttatgaatggtgtttgtgtagcaacacattgtgtgctatgtttattaaaatgcagcgac

SEQ ID NO: 31320 - DNA, 1505 bp, Homo Sapiens; identical to SEQ ID NO: 26928

SEQ ID NO: 31321 - DNA, 2136 bp, Homo Sapiens
aagacattcatcctcccggaggcccgcgccgccctcgccctgcacgcctagcgttgtcccgcggccaggcccggccggagcggcggcgcctggatgtggacctggctgcggggagacgggcgccggccccaaagcgactttcggtcctcgacgcgccccgccccacccctgcgatgaagagggcgtctgctggaggttccaggccccgattcccttatcctgggggacgacagcatccatagcctggactttgtgtcgagccgagcctggacttccctgactatgggcccgggggcctgcacgcagcctacctgccatccccaccgctcagcgcctctgatgccttctcattgctttgtgctccctgagcctcaaggcctcaagccggcagggcggggactacgtggccctgcagcccctgtgctccgagggtgggcctcccatgccccaccgtagcatctttgcccccccatgcactgcccaaccacaatcgcagcctgtcctacaataatgtgctcaaccctggctcgcctggtggccacgcctgcctcgcccatccagcagttggcgtggccggataccactcaccctacctgcaccctggggcaacgggcgacccaccatggcccctgccccacagcttcagtcccgtgctgggcccccggccccaggagccctcgcctgtgctctacgacatcctgtccaggaccatcatggcatccatccaggagcgcaaggacagggaggagcgtgagtgcctgctgcgctcccaggccgactcactcttcggcgactcaggcgtctatgatgctcccagctcctacagcctgcagcaggccagtgtgctgtctgagggcttctgaggtcctacgctgtgctacagctctacagatgaccttgtggccaggcccggcttcggcggcgcctgcaaccctgtcctgcagacatcattgtcctcgctttccagctccgtgagccgtgcactgcggacgtcgtcctcctccctgcaggctgatcaggtggggaagctgaggcaggaagccctttagtcacttgccgaaggccacgctgttacccatgggaccggttttgggcggccgaagagcactcatggggccggattcacgccccgggcccgttccctcctgctctctggtgctcctcacgccattggccccactgcctctcactgcccgtgagtccctgtgcccgtgtcctccttcttgaacccctcagccctcagttaaccctcagaaagctggctcggagaagtccttgtgtggtatctgggaggcagagtttgccgtgagctgagattgtgccactgcacgcactccagcctgggcgacagagcgagaccccatctcaaaaaaaaaaaaaaaggcctcacgggactagaagcgtcttaccctgacctcacacctgctggacatcaggctggggagagaatcggggaagagggcattttccaacaggactggaaggccagtcgtggtccttggtggtgagagctagccaggccgccggccttctccccggaagcctgcagggtcccctctgatccctgcacctctggggggtcacaccaactgcgggtgtttcctcaccacgctgggcgcttggtgagcacgttctgccttgagacctggcatttctttgataacatttcttctcgtttcctgctcattctggaactcctgtcagtcagatgttgggccttttggatagattctgtgagtccttctttctacctttgcttgtagataagattttccttgaatccaaacacacacactctctctgctttttaaaaaattagttttggggctggatgtagtggcttacacctgtagtcccaggcactttgggaggccgaggcaggcagatcacttgaggtcaggagttccagaccagcctggccaacatggtgaaaccccgtctctactaaaaatacaaaaagtagctgaatgtggtggtgtgcacctgtaatcccagctactcaggaggctgaggcaggagactggcttgaacccgggtggcagaggttgcagtgagccgaaatcacaccactgtactccagcctggtgacagagccagactgttttaaaataaataaaaataaaaaattggttttgg

SEQ ID NO: 31322 - DNA, 2725 bp, Homo Sapiens
ggggaccggcctgggcccttgagcctggctggagtaggtggaatatcctggggagaggaagtttggtcgttgggcagcggccgactttcctctcaggaaattgatactttatcaacatagagattaattatttgtatttgggagcagcagaactggggaccaattacctgtcaagagttttataaacccgtgacataaactgttattccattgctttcatcctccatctcaccttggaacttgtattacttatggcgttcaggagacaagtgaaaaactttgtgaaaaattactcagatgctgaaataaaagtcagggaagcaacttctaacgacccttggggtccctctagttctctgatgttagatatcagtgacttgactttcaacacaatttctctctcagagattatgaatatgctgtggcacagactcaatgaccatgggaagaactggcgccacgtgtataaatcccttaccctaatggattatctcatcaagaatggatcaaagaaagttattcagcattgcagagaggggttctgtaaccttcaaacactaaaagattttcagcacatagatgaagctggaaaagaccaaggttattatatccgggaaaaatctaagcaagtcatcacattgctgatggatgaaccattgctgtgtaaagagagggaagtggcatgtcggactagacagcgtacctcccactctatattgttttctaaaagacaacttggttcaagtaactcactgacagcgtgcacttctgcccccacaccggatatttctgcttcagagaagaagtataagcttcctaagtttggaaggttacataataaaagaaatgtgtgcaaggcaggattgaaacaagagcattgccaagatgttcatttgcctacagaaactatgttgtcccaggaaacacttccactcaagattcatggttggaaatcaacagaggacctgatgacatttttggatgatgatccagagctgcctttactagcaacacctccttccattgtctctccaatcacttgcttgtcagaagcagaagaagtttgtaatctttcgggtgcagatgctgtgcctactctctcagaaaatagtccttctgggcagagagatgtgagtttggacaagagatcagatggtatctttacaaatactgtcacagaaaacctcttggaaacacctttagaaaagcaatcagctgcagaaggtcttaaaacattgacaattttaccagcatgttggtcaagtaaagaggagtttatcagccccgacttaagggtatcaaagtcagattctactttccataaccaggcctctgtagaaacactctgtctctctccctcattcaaaatatttgaccgagtgaaggagattgtaatcaacaaggcctaccagaaaccagcacaatccagcattcagatggatgataaaatcctcaagacaaccacacgggtttcaactgcttctgagggagcatcttccttttctcctttatccatgtcatctcctgatttagcctctccagagaagtcagctcatctcttatcaccaattctggccggaccttccttctggactctgtcccatcaacagttgtcttctacctcctttaaagatgaagataagacagccaagctgcatcactcctttgcttctaggggcccagtgtcttctgatgtagaggaaaatgatagcctcaatctactgggaattcttccaaataactctgattctgctaaaaagaatataagtcacatttctagtagtcactggggggagttttccacccaaaatgtagaccagttcatccctctgtcctgttctggttttcagtcaaccaaagacttcccccaggaacctgaagcaaagaattccattagtgttcttttaagggaggtaaaacgtgcgatcgctagattacatgaagatctgagcacagtgatccaagaacttaatgtcatcaataacatcttgatgagcatgagtctgaatagttcacaaataagccagtcttcccaggtcccccagtcttctgaggggagctcagatcagatctaatcatcacaatatctatttttgatagaactcgtgtggttccacttccccaagacttacgttagcattgtataaattcatattattatggcaaaaaaggggatggtttaatttttccttgtcaggtttattagcaagtatctttcaaactaatactttcatttgggtggtttattttttaaaagggaaagatgtcacctttgataatttcagatttagatattagttcatttgaaacagaagagaatttcattctttcatgctctgtacctcaaatgggttaagcattagtgaaaattgtggtaagacctcaaactgcaaatgactattcaagagcttttggataaggaggcaggaagaagctctttatctttcaactgtatggagcttgttaacaagcctctgaggtgacctaggaggattgagtttgggggtatacatttcacacattcttttgcaagttttaggttctgcaaccaagggccagaaatcttttctttcttccagatgctagtgttaggagttaaatggaaacaagaaggacatggggcaaatgtttttactgtcaatgtatattgcaaggtgaattcaaatgcatccttttattctacttcagaaaataaatttgatatttttcaaaaaaaaaaaaaaaa

SEQ ID NO: 31323 - DNA, 5410 bp, Homo Sapiens
gcggcggcggcggcggcggcggcggcggcggccggggcgggagcggggcgcgctctggagacgagtcagcggcgccccgggtgggggaggcgggcgggcagctagagatcacctcagcagcccccaccacggccggaccgaaggtgcggcggcggaggggagccagggcgccccagcaggtttccaatacttatctacaggaatcgccatgaccccagctctgagggaggcaacagcaaagggtatcagcttttcatctttgccaagtaccatggagtctgacaagatgctctacatggaaagtcccagaactgtagatgaaaagctaaagggagacaccttttctcagatgcttggatttccaactcctgaacctactcttaatactaattttgtgaatttaaaacattttggctcccctcagtcttcaaaacattaccagactgtttttttaatgagatctaattctacattaaataaacacaatgagaattataaacaaaagaaattaggggagcccagttgcaataagctgaaaaacatactgtataatggcagcaacattcagctcagtaaaatctgtctttctcattctgaagagttcatcaaaaaggagcctctatcagataccacgagccagtgcatgaaagatgtacaaattattctggattcaaatataaccaaagacactaatgtagataaagtacaactacaaaactgtaaatggtatcaagagaatgcacttttggataaagttactgatgctgagattaaaaagggtttattgcactgtactcaaaagaaaattgtacctggccactcaaatgtgcctgttagttcttcagctgctgaaaaagaggaggaagtacatgctcgtttacttcattgtgtaagcaaacagaaaattttacttagccaggctagaagaactcagaaacatttgcagatgctcctggcaaagcatgttgttaagcactatggtcagcagatgaaattgtctatgaaacatcaactccccaaaatgaagacatttcatgaacctaccacaattttgggtaatagtttacctaaatgcactgaaattaagccagaagttaacacattgactgcagagaataaattgtgggatgatgcaaaaaatggctttgcacggtgtacagctgcggaaatccaaagatttgcattttctgctacagggctgttgtctcatgttgaagagggtttggattccgatgcaactgatagcagctctgatgacgatttggatgaatatacccttagaaaaaatgtggcagttaactgtagtactgaatggaagtggcttgtagacagagcacgagttggcagccgatggacttggcttcaagctcagatttcagacctagaatgcaaaatccaacaactaacagacattcacaggcaaattcgtgcctccaaggggatagtggtcctagaagaatgtcagcttccaaaagatattttgaaaaaacaaatgcaatttgcagaccaagcagcttcactaaacattctagggaatcctcaggttccccaggagtgtcaagatcctgtaccggaacaagattttgaaatgtcaccaagcagccctactttacttcttcgaaacatcgaaaaacagagtgcacagttgactgagatcatcaacagtttgattgcccctctcaacttgtccccaacttcatcacccctctcttccaaatcctgtagccataaatgtctggctaatggcatttacaggagtgcatcagagaatttagatgagctgtcttcctccagtagctggttacttaaccagaagcacagtaagaaaaagagaaaagacaggacaagactgaaatcttcatccttgactttcatgagtacatcagcccgaacaaggccacttcagagtttccacaaacgaaaactgtacagattgagccctactttttattggactccacagactttgccttcaaaagaaacagcatttttaaacactacacaaatgccttgcctgcaatcagcttcaacttggagtagctatgaacacaattcggagtcttacctattaagagaacatgtatcagagttagattcctctttccattctgttctatcattgccatcagatgtgcctcttcattttcactttgaaacactgttaaaaaagactgaaataaaaggcaatcttgctgaaaataaatttgtagatgaatatatcatatctccatcacctgtacatagtactctgaatcaatggagaaatggatattcacctatatgtaagcctcaaataaggtcagaatcttctgcacaactgttacagggaagaaagaaaagacatttgagtgaaacagcattaggagaaagaactaaacttgaagaatctgattttcaacacacagaatcaggatcccatagcaattttactgctgtttccaatgtcaacgttttatcaagaatccagaattcatcacgaaatactgcacgacggagattgagaagtgagagctcttatgacatagataacattgtgattcccatgtcattagtagccccagctaaattagagaaactccaatataaggaaatacttactccaagctggaggatggttgttcttcagcctttggatgaatataatttaggcaaagaagagatagaagatctttctgatgaagtcttctccctaaggcacaaaaaatatgaagagagagagcaagccaggtggtcactatgggagcaaagcaagtggcacagaagaaacagcagagcttacagtaaaaatgttgaaggacaggacttgcttttgaaagaataccctaataacttcagtagcagtcagcaatgtgctgctgcaagtcctcctgggcttccttcagagaaccaggatctgtgtgcatatggcttaccttctttaaatcaaagtcaagaaaccaagtctttgtggtgggaacgacgggcttttccactgaagggtgaagacatggcagccttattatgtcaagatgaaaaaaaggatcaggttgaaaggtcaagcacagctttccatggtgaaatcttcggtaccagtgtaccagagaatggccaccatccaaaaaagcagtcagatggaatggaagaatacaaaacctttggtctaggacttactaatgttaaaaaaaataggtgacagggaacaggttaagaaaactatgtaaatgtaggaaagatgggaggaaataaagccctgttctggatcccccatcccctccagaataagagcatgttctgcatgtattaatcttttatgctgtttatgaaacaggcaagataagtctgtttttccttctggaaccataagggtaaccagattttcatctacagacaagtggtagtcatttgtgtttatcatgcaacttacttacaaacaccaagatattaattgctgcaacttgatgtcaaatcacattactgggtaatttttaagactatgtacccacaccatacatacatacatatatatatacacatacatacaaacctgtgtgccaagtgacagctatttttttatatacatggtaattcattaaaattgccttagtaatatattagaatatacaaatatgtgtgtataaaataaacatacacacacacacacacccctatgtagtttttaaaacactggcaatgacccactccccttggaaatgcatgtatgaactaccctatgaaatgtaagctgcagaatagataaaacacaggtttccactaataaaagacatctgaacgtcctgaatatagagacagaagttttttgttgttgttgttgttgttttaacatgtttaaccaacagaagttatttacagaaattcatatatccaggcaacacaaaactcctttattcaaaatcactgctatctttgggactaaacacaggctactttctgtttactcctaacaaaataaagcaagcaaatttgagtcaaatattggtgcactttaatactatcacatctttgaaaactcaatttgagttttaccaattaatgtgtctcatgaagagaagacaccagttttaaaatgagccacaaacagtaaagccctatcagtataaaatttgaaaaaaaaaaaaaagatgattgtatttctagattagcaagaaattagttaattctggctgatttctatttctagctaatttggtcattctttgccatagcttactctattcaaataaacatatattcttgcttgcatcctagattggaaattaaaatttttcaaagaacaaagcttcaatattggatactgaagagtatacatgaaagaaaattccttttgaagctattaaaccatttttttcctatgtgaaagttgaggacaatttatataactcactttttgtcatgtaaaaaaggttactcaagttgtactacccacataactgaaaatattggccatttggccttatctgtgagatttgacactaagtttttgttagagattggaaattatactagtccttttaaggggtaaaaaattcaattcaatactgacaaacttttgcttgtagttttactgtacatttatttttaaagaaaaagaaaacaaaagccagacaaacccaagttgtccaggcaaataaactcaaatctttgtcacgtctgatattataatcttctatgtaagttttttaattaaagttatttctatatgccgtgtgttgcttgttattaaatgcgacgtattcatggcacaaagctttcccaagctgaataaaaacaaacattaacaaatttttaccttgtaatgcaggaagaaacccaagcaagctctagtctgtgcttaagtgttagcattcttattttttgaaccttatttctcaaaacttatagtagcctcaagaagtctattgatattggtcatgtttatttcttgccatatttataacacagcaagagtatttacaggaatgaagtagctgacacatatttttagactctgtataattcagaacagttataaatatttagtttatggattgactctgtatcctgtcatcttttcgcctacctgatctttcttggaataaaataatatatccttggggtcaagatccatagttccagaattttctcagccatctggttctgctacagcgtaaaattagactggaaataagacaacgttaagtaaaaagcttcttttacctaacccacctcccaagggctccatttgtaaaagtacagaccagaaattctaccacttcccagatcctttccagggtaccaccctattaagcattaatttcttcattttttaaatggggacaaaaatatctgctttattattaccacttacttatagaggtgatttacagatttaatgagaatatatcaaagtactttataactcacaaaaatataa

SEQ ID NO: 31324 - DNA, 2749 bp, Homo Sapiens
agtgcttctggtttcagcacacatggagatatagaattgaaattgctctgctttctttacaaatgactcagagtgtgcttgtccttccctaaaatgttgccagcatgtaaaggattttcaatgagcagtgcaataagccagcaactgggaaggcttggagcggcactgatataacgtggtgctgtcacacagataatcagggctggagccaagtctcggtagcgctgtgcattatcctggtcacatactggaagttttgtttatccaacttggttgctcttgaagctggtgagagccctgccaggatgtggagtggacttcctagcagaggcagtacatgccacactactacccttcctgctcttgtgcgcacacctaccctgatgatgcagccttcactggatatcaaaccatttatgtcttttccagtggacagtagttctgctgttgggctctttccaaattttaacacaatggatcctgtgcaaaaagcggttattaaccatacatttggagtatccattcccccaaagaagaaacaagttatttcttgtaatgtctgtcagcttcgctttaactcagatagccaggccgaggcccactacaaaggaagtaaacatgccaagaaggtcaaagcactagacgcaacgaaaaataaacccaaaatggttccttccaaggacagcgcaaaggctaatcccagctgctccatcactccaatcacaggcaacaactctgacaaatcagaagataaagggaagttaaaagccagcagttccagtcagccatcaagctctgaaagtggctcatttctcctcaaatctggcacaacacccctgccacctggagcagccacttctccctccaagagcacaaatggagctcccggtactgttgttgaatcagaagaagaaaaagccaaaaaattactttattgttcactatgcaaagtggctgtgaactccctgtcacagctagaggcacacaacacaggatctaaacacaagaccatggttgaagctcgtaatggggctggtccaattaaatcctatcctagacctggatcaagattaaagatgcagaatggcagtaaggggtcaggactacagaacaagacatttcattgtgaaatctgtgatgttcatgttaattcagaaattcaactcaaacagcacatttctagccgaaggcataaagatcgagttgcagggaaaccactgaagccaaaatacagcccttacaacaaactccagcggagcccgagtattctagcagcaaaacttgcattccagaaagatatgatgaagcctttggccccatccttcctgtcctcacctctcgcagcggcggcagccgtgtcctcagcgctgtcactcccaccccggccctctgcctcgctcttccaggctccagccattcctccagctcttctgaggcctgggcatgggcccatccgcgccactcctgcctccatcctctttgctccgtactaacgtctgcaaaccccaagacgtttgaggccagtaggaagttgagaaagaaagccacaaggattcagcaatttaagcagtttgtgttgcagtacccccattcacccacaaaatgcagcccaccacccagtcccccaattccagagagaaacacatcactagattgacgagggcttttagagactgctcctataattgaggaatcagcagcataggctttatctccctacttcctcccccaccctaccgcgttcaatttgtgtatctcagatatttgatttcttgagcatgtattggtcagaaagaaaaagaaagaaaaccattctctatttttccatgggtatgatctggcttaaaacaatatggaatattttcctgacagacttgaaaactaggatcttcctcagatgtctgtaaataactctggtatccaactgggtgtattctagtgtggaacaaaaaacagtgaacacaagtgcttacttgtggatactatcttaccaacggatcacaaagttctctttttggcgtactgttgttgacagggattgtgtactgtttcgacccaagtactgctgtatcctgtgtagtactagatctgtatctcttgtctgaattaaacatttttagttgctgtgtaaatgttaggaagcaaagtagctttgaattttctctgtaagagaataaaagataaaataatgtattttctttatttcacattttatttggagatatttaaatgaaatagaaagccatataacatagctataattactacctgtttgctatttttgtttaacttattttgtagcttcctcactggtttgtgttgctaagcaaacgtatacaaacagaaaaagagcttcctaaattgcacatttttgcacctcttgtgcattctgcaagaagacaatgaatccatgtatttctatataagtatcttcttcatttttaacctgttttcatttgtaatgatgctacataattttgtggctccctaatgcaataatgtacagaagataaaaaaatttataattgaacaatttgtctttctgttcgctgaatatattgcaggtcatgctcccatgcccccctttctaagccgatatcaacaagactggaatgtttgtgatatcaggggcaagagttatcatagagcaacaaaatagagtggactcttttagagcatctatatctgcaacctgtaaatggtaaaacgtctgtgtatttttttaaatgtaccttttcaataaaagtac

SEQ ID NO: 31325 - DNA, 1953 bp, Homo Sapiens
gaggagctccagccgcgctctctcccggcagtggctgtgcttcacagcgcttgttgggttccccaccccttttaaataagccgggctggtcaccgccctcgcagacgagtcagcttaagggaggcggcggcagcgcggcggtggggccccaagctgggccggcgcgcggggtcggcggagctgtactgcgcgtccgacatctacgaggcggtgtccggggacgcggtggcggtagcgcccgctgtggtggagcctgccgagttggatttcggagagggcgagggccaccacctgcagcacatcagcgaccgcgagatgcccgaagatttagctttggagtcaaacccttctgaccatccaagggcaagcacaattttcctgagcaaatctcaaacggatgtgcgagaaaagaggaagagcaaccatttgaaccatgtatctccagggcagcttactaaaaagtatagctcatgctcaacaatatttctagatgacagcacagtcagccagcctaatcttagaaccacagtaaaatgtgtgaccttagcaatatattaccacataaagaacagagatgcaaatagatccctggatatttttgatgagagatcacatccacttacacgagaaaaagttccagaggaatactttaagcatgatcctgagcacaaatttatttacagatttgttcgtactctttttagtgctgcacagctaacagctgaatgtgcaatagtaactttggtttacttagaaaggcttttaacttatgctgaaatcgacatttgtcccaccaactggaaaaggattgttctgggagccattcttcttgcctccaaggtttgggacgatcaggctgtatggaatgtggactactgccagatcctcaaggacattacagttgaggacatgaatgaaatggaaaggcattttctggagcttcttcagtttaatattaatgttcctgccagtgtttatgccaaatactactttgaccttcgctccttagcagatgacaacaacctgaattttctatttgctcctcttagcaaagaaagagcacagaacctagaggctatttctagattgtgtgaagacaaagacttgtgtagagccgctatgagaaggtctttcagtgctgataacttcattggtattcagcgctctaaagccatcctctcttaaaaggagaaatgaggggttataacgtcatgggaccttcatctacaaagactggagaaataccacctttcctgctcaaaaaccagcaaaattagtgttttcatcaaaaggaaagatctcaaattcaagagactcatggacaacaaggattatactccacaggaaagaatgggaccttgtcaatgcaacaaaacactcttctgtcctttttaatgtaaacagagttacaaaaaccactccaaagtgaaggctcccatcctacacacagatatttgcttactgtgtgggccgatagctgtgaactatgtaaggttttttaaacaatagtttaaatttttagactttaaagacactaaccatataacttttatgtttcttccagtttctctccctccccccgcattttgctgcatatgcctttaaaatcaatgcagtattaccattaaaacatgggactctaactaaagccacttaggagcagacagcagcgttgttaggtactgaagggttcttcctccctactgttaaccattgaagctgctagtcattggcaatcattttaaaccaaaaagctgctggataacatttgtcattcatattctttgcaagcattactttagcattttagcatgtttggggtcataaacagaggaagtatcagttattgatatctacttctattggagtccatgttgcatttcttgtgaactataaatggtgcttctcattttctgataatttttctcttgctaaataaatgtattaaaagat

SEQ ID NO: 31326 - DNA, 2820 bp, Homo Sapiens; identical to SEQ ID NO: 27213

SEQ ID NO: 31327 - DNA, 5384 bp, Homo Sapiens
tgaacccaagggacgagggcagtgtggggaacaaagccctggtgtctcccgagtcctctgcggaagaggaagaggagcgtgaagagggaggcgaggcatgtggcctggagggtacaggagctggtgaggattcagtggcccctactgctccgggtgcaggagcgctgagcagggagggtgaggaaggcacagaccttgctcttgaggatgaaggggagggctgcgctgatgagccagggacactggagcaggtgtccagaagtgaggaggaagagaagctagtgcagccacacagggagtgcagcctggaggacagtgggccttgggctggagagggggtcttccagagcgacctcctcctgcctcacatccatggagaggaccaggagccccccgacacccccggggagggagaggaggatgatgaggaagggtgtgccagcacagacccagcaggggcagatgagggttcgggtcctgacaggcccacggaggacatgggacaggatgctgaggacaccagtgaggagccccctgagaaggaggagctggccggggtccaggaggcagagacagccacagactgccctgaagttcttgaggagggatgtgaagaggccacgggtgtcacaggtggggaacaggttgacctcagtgaaccacctgaccacgagaagaaaaccaaccaagaagtggcagccgccaccctggaggaccatgcacaggatgagtccgccgaggagagctgccagattgtcccttttgagaatgactgcatggaggacttcgtgacttccctcacaggaagcccctatgagttcttcccaactgagagcacctctttttgcagcgagagctgttctcctctttctgaatcagcgaaaggtttagaatcagagcaggcaccaaagctggggctgcgtgcggaggagaaccccatggtgggggctttgtgtggccagtgtggctccctacagggtggagcggccgagggtcccgcagcccctgatgtggtggtcgtgctggaggaggaggccttggatgatgcactggccaacccctatgtgatgggagtgggcctgcccggtcaggcggcccctggagaaggagggcaggctgcatcggacgccctgggtggttatggctcgaaagaagaattgaactgtgaggcagagggtggcctggttcccgcggacaggaagaacaccagcacgagggtccggccccactctgggaaggtggccggctatgtcccagaaaccgtccctgaagaaaccggacctgaggcgggctcgtcagcccctggcattggaggtgccgcagaggaggtgggaaagacgcttttgtcattggaggggaagcccttggaagccagcagggccttgccagcaaagcccagggcctttactttataccctcggtcgttctccgtggaaggccgagagattccagtgtccgtgtaccaggagcctgaggggtcagggttggatgaccacaggataaagaggaaagaggacaatctctctctgtcgtgtgtaattggctcctctgggagtttctcccagagaaaccaccttccgtccagcggcacctccacgccttcttccatggtcgacatcccacctcctttcgacctggcctgcatcaccaagaagcccatcacaaagagctctccctcactcctgatcgagagcgactccccggacaagtacaagaagaagaagtcatcctttaagcgcttcctggcactgacgtttaagaagaagacggagaacaaattgcatgtggatgtgaacgtgtcttcctctaggtcctcttcagagtccagctaccacgggccttccaggattctggaagttgaccggagaagcctcagcaactcccctcagcttaagtctcggactgggaagctccgggcttctgaatccccctcctccctcatcttttatagagatggcaagaggaaaggtgtccccttcagcaggacggtgtccagagtggagtcctttgaagaccgctcccggccgcccttcctgcccttgccactgaccaagccacggtccatctccttccccagcgctgacacttcagactatgagaacattccagccatgaactcggactatgagaatatccagattccaccccggagacctgccagggctggcgcgttcacgaagctgtttgaagatcagagcagagccctgtccacagcaaacgaaaatgatggctacgtggacatgagcagcttcaacgcctttgagagcaaacagcagagtgcagaccaggacgcagaaagcgcctacacagagccctacaaagtctgtcccatctcgtcggcagcccccaaagaggaccttacgtcggatgaagagcagagaagctcggaggaggaggacagtgcttcaagagaccccagtgtcacccacaaggtggaaggacagtccagagcccttgtcatcgcacaggaactgctatcttcagagaaagcatacgtggagatgctccagcacttaaatctggatttccatggagctgtcatgagggccttggatgacatggaccatgaaggcagagacacattggcccgggaggagctgaggcagggcctgagtgaactcccagccatccacgaccttcatcaaggcatcctggaggagctggaggaaaggctgtcaaattgggagagccagcagaaggtagctgacgtcttccttgcccgggagcaggggtttgatcaccacgccactcacatcctgcagttcgacaggtacctaggtctgctcagtgagaattgcctccactctccccggctggcagctgctgtccgtgaatttgagcagagtgtacaaggaggcagccagactgcgaagcatcggctgctgcgggtggttcaacgcctcttccagtaccaagtgctcctcacagactatttaaacaacctttgtccggactccgccgagtacgacaacacacagggtgcactgagcctcatctccaaagtcacagaccgtgccaacgacagcatggagcaaggggaaaacctgcagaagctggtccacattgagcacagcgtccggggccaaggggatctcctccagccaggaagggagtttctgaaggaagggacgctgatgaaagtaacagggaaaaacagacggccccggcacctatttctgatgaacgatgtgctcctgtacacctatccccagaaggatgggaagtaccggctgaagaacacattggctgtggccaacatgaaggtcagccgccctgtgatggagaaagtgccctacgctctaaagattgagacttccgagtcctgcctgatgctgtctgcgagctcctgtgcagagagggacgagtggtatggctgtctgagcagagccctccctgaggactacaaggcccaggcgctggctgcattccaccatagcgtggagatacgagagaggctgggggttagccttggggagaggccccccaccctggtgcctgtcacacacgtcatgatgtgcatgaactgcggctgcgacttctccctcaccctgcggcgtcatcactgtcacgcctgtggcaagatcgtgtgccggaactgttcgcggaacaagtacccgctgaagtacctgaaggacaggatggccaaggtctgcgacggctgcttcggggagctgaagaagcggggcagggctgtcccgggcctgatgagagagcggcctgtgagcatgagcttcccgctgtcttcaccccgcttctcgggcagtgccttttcatccgtcttccagagcattaacccctcgaccttcaagaagcagaagaaagtcccttcagccctgacagaggtggctgcctctggagagggctctgccatcagtggctatctcagccggtgtaagaggggcaagcggcactggaagaagctctggtttgtcatcaaaggcaaagttctctacacctacatggccagtgaggacaaagtggccttggagagtatgcctctgctaggcttcaccattgctccagaaaaggaagagggcagcagtgaagtaggacctatttttcacctttaccacaagaaaaccctattttatagcttcaaagcagaagataccaattcagctcagaggtggatcgaggccatggaagatgcgagtgtgttatagcagttatcaagcatgtggacttgtaacaaattcttaggtcaatatgtgaatgcttttagaagctaagctgtggctcaactcatccggacacacacctggattcagcaatgaggcctgaccttttttgctataaccgccccaccactcccctgcccttgccaacatcttcatgaatggaatccttaagggatatttatggacctctccttttctgtgttttccacccctacccccacccgccacccagtaataaactatttccttaccccgcagtgagttaaaatttagtaagatgaagatgtggaaaccaatgaaaagtacatttagaaatgcaggctttttagtagaaagaagctcttacagtttttactcatgataaatcttatcacctttcaaaaattgattgtggtgcctcaggtgaaatgagaagctatcagtaacagctactctcatcgaaagcactttattattttacggagctgcaacctccaattttgtgttttctaagtgatttacttaagtcaataacagatggaatcctgtggactaatgtgccaccagttttctaacaagggtgtacataaaatggatttgtgcagacctggctgtggcttgctggtgtgcaagcacacatcactttagaggggctgcgccccaccagataggaaggggaggattttctcctccagtcgaccttgtgacctgtatactaacataacttattaaaggaggggtccctcctcccccagagcagtcctcaacactatgtcagtgctggaaatgcagccactggcagatctggccccccagacgtcaccgcagggcctctgaagagtcaaggtctgctttaatttattgtgtgcctttctgtgtttacctcactcaagctgacaacattgtttatgggaatctatccttcttttagacacacggtaatccttgggctgtattactgaaggctttttattttttgagaggtgaaaaaaagagaaaacaagttagactccaaaggtgaattcctggtcttggcagatggctctgggaacagcgagggagcacagaagtcgtggcctgaggctgttctatgggcacttggggctaaatcgcctcctgagggtgactgttgcttattctgctggacaggtttttacataaagcaaagggcatgtgaggggtgggattccttgttactcttactgcaataaaaatcaattgtttgat

SEQ ID NO: 31328 - DNA, 3204 bp, Homo Sapiens
tcagggagcgtgtcagaggccgaccacgtgtactgtggagactgtcaaagtctcccggagcccaatttccggaagcggtgagttctgaaagaagttcctgcaccgtagtttcccaagtctgcgaatccccaaccatgagcgcctcgggcgtactgtcctttacccagcaaggatgggagcaggtgctggccaaagtgaaacgggctgtggtttacctggacgccgcctgcgccgagagcctgcactggggctgcggatccacccgtctcctggaggcggtggggggtcctgactgtcacctgcgagagttcgagcccgacgcaattggtggtggagccaagcagcccaaggcagtgtttgtgctgagctgcctgctgaaaggccggaccgtggagatcctacgggacatcatctgccgcagtcacttccagtattgtgtggtggtcacaaccgtgagccacgctgtccacctcacagctaatcatgtcccagcggcggcagcggccgagatggaggggcagcagccggtgttcgagcagctggaggagaagctgtgtgaatggatgggcaacatgaactacacggccgaggtgttccatgtcccgttattgcttgcccctgttgctccccactttgccttgactccagcttttgcatcccttttcccactgctaccccaggatgtgcacctccttaatagcgcccgaccggacaagaggaagctgggaagcctgggtgatgtggactccactacgctaaccccagagctgctgctgcagatcagatgcctagtgtcaggcctcagttctctgtgtgaacatttaggagtacgggaggagtgttttgctgtaggttccttaagtcaggtcatcgctgcggatctggccaattatgcccctgcaaagaacaggaagaagactgctgcaggcagggcatcagtggtttttgtggacagaaccctggatctcacaggagcagttggacatcatggagacaacttagtagagaagatcatttcagcacttccccagctcccaggccacacaaatgatgtgatggttaacatgatagcgctcactgcactccatactgaggaggaaaattataatgtggttgcaccaggctgtctttcacaatccagtgacaccacagccaaagccctatgggaagctttactgaacactaagcacaaagaggcagtgatggaagttcggagacatctagtggaagcggcaagcagagaaaacctgccaatcaagatgagtatggggagagtcacaccgggacagctcatgtcctatattcagctcttcaagaacaacctcaaagctctaatgaatcattgtggcctcctccagcttggactggccacagctcaaacgttgaaacacccacagactgccaagtgggacaactttctggcttttgaaaggctccttcttcagagcattggggagtcagcaatgtccgttgtgttaaatcagctgctgcccatgattaagcctgtaacccagagaaccaacgaggactacagccctgaggaactgctgatccttctcatatatatttattctgtcactggagagctcacggtagacaaagacctgtgtgaagcagaagaaaaagtcaagaaagcattggctcaggtcttctgtgaggaatctggattgtcacctttgctgcaaaaaattacggactgggactcttcaattaatctgacatttcacaaatccaaaattgccgtggatgaactctttacttcacttcgggatattgctggagctcggagtctcctgaaacagtttaagtctgtatatgttcctggaaatcatacccaccaggcatcttataagccattgttgaagcaagttgtggaggaaatatttcatcccgagaggccagattccgttgatattgaacacatgtcttcaggcctcactgatctccttaaaactggatttagcatgttcatgaaggtgagccggcctcatcctagtgactaccccctcctgatcctctttgtggtaggtggggtcacagtctctgaagtgaaaatggtcaaagatcttgtggcatcgttgaagccaggaacccaggtaatcgtgctgtccacacgactcctgaagccacttaacattcctgagctgttatttgcaactgaccgactgcatccagaccttggcttctgagcatccgctaagaagataagacctactcaagctggaaatgccgatgcaattttctgccaccactccaaatactcctccacaaccagcgtccctgtcactaattgcgagaatgatggaattctgcctgaagggtcttgatacctactcagtgaggtactttgcttggattgctgtgattcttaaaaaaaaaaaaaaaaagtttttttattttcctgaaggcgacagtctgtcttttggcgagtccaattagtgatcgtttccatttatccttaaccctctgtttgtgatcttcctgattccacctacaagttcattagttctaaataaaagcctgttggcaagtgttggtagattacaactctttttatttgaagttgctcgagaagttagacatgctttagaattatgagtgtggggaaaatttgatgttccttaggattatataactgaggagggaacattgcaaatagggtctgaggctttgtttctctcttgctctgaaacatttctgaaaaggcaaggaagggaggggtagtgtctggggcagtgctggtagcctgcatgtgttgtaaatcatcctgccataacaaaggactgcattgttctagctggcccactgggcaggtctgccaggctacttggaactgtagtgggaaggtggttgattggagggttatctgtatataaaaggttttctcccctccaaagaaagactccagtacaagatacctggtcccagggagtctaaattgtaacagcaacccctgtggactttgtgggtatgagttttgattgaaatataaagctttcttttctgtaagtttaagttttccatctgaccatagcagaaaaacctagacccacctagtgaaactttgtaagaactccagggcaaaaacgaaccacttgcaacccacatgtttgtaggtgtatggtcgatggaagtttctggcatccatgttggtaataaagagataaaactgaaaaaaaaaaaaaaaaaaaaaaaaaaaaaaaa

SEQ ID NO: 31329 - DNA, 2103 bp, Homo Sapiens
tctccatctggtcaactgcgggagaaaaattttcgagaatttccagcaggcaaggcagtggccgctttgactgcttgcttcggagatccgagacgacggagaaggcactcttatttaccgaccaagaaagctcctcccccgtcctccgttagctaattaaaacatttttcagggacgtagccatccagagacattccattattgttccattgacctttccctcatcactgagtcctttggagctgagttatgtcaacagctgccttaattactttggtcagaagtggtgggaaccaggtgagaaggagagtgctgctaagctcccgcctgctgcaggacgacaggcgggtgacacccacgtgccacagctccacttcagagcctaggtgttctcggtttgacccagatggtagtgggagtccagctacctgggacaattttgggatctgggataaccgcattgatgagccaattctgctgccacccagcattaagtatggcaagccaattcccaaaatcagcttggaaaaggtggggtgcgcctcacagattggcaaacggaaagagaatgaagatcggtttgacttcgctcagctgacagatgaggtcctgtactttgcagtgtatgatggacacggtggacctgcagcagctgatttctgtcatacccacatggagaaatgtattatggatttgcttcctaaggagaagaacttggaaactctgttgaccttggcttttctagaaatagataaagccttttcgagtcatgcccgcctgtctgctgatgcaactcttctgacctctgggactactgcaacagtagccctattgcgagatggtattgaactggttgtagccagtgttggggacagccgggctattttgtgtagaaaaggaaaacccatgaagctgaccattgaccatactccagaaagaaaagatgaaaaagaaaggatcaagaaatgtggtggttttgtagcttggaatagtttggggcagcctcacgtaaatggcaggcttgcaatgacaagaagtattggagatttggaccttaagaccagtggtgtcatagcagaacctgaaactaagaggattaagttacatcatgctgatgacagcttcctggtcctcaccacagatggaattaacttcatggtgaatagtcaagagatttgtgactttgtcaatcagtgccatgatcccaacgaagcagcccatgcggtgactgaacaggcaatacagtacggtactgaggataacagtactgcagtagtagtgccttttggtgcctggggaaaatataagaactctgaaatcaacttctcattcagcagaagctttgcctccagtggacgatgggcctgattaccagctgggacttagagtttctgtgcaacagtttttcactgagcatgtcaagaaactgataagatcaaaaaggtctcctaactcactagatcagcgcacaagtcagtgtaaaccacttagatagtagttttttcataaatgctcatcatatttatgttccgctgtacatgttcagtataaatatatgtgtagtgaagctactgtgagtctttaaatggaaagagcaaatgagaagtggtttggatacacttgatgagagatgagagtgtcacattaataatttttaagactcttaggcagctatgggtttcttcttaatcatttttgttctttattcatttgaacacgtttttgaagttcttcaaaactagtcagtttgaattttgacagctattcaatatgtgatctccaagtttaaaaaaatttttttccagacttccctaatcctaaaatgcgagtttttatttttaataactgtaccaaggaataagtatgaaaacagttctctgttaccatattttgtattctggaccacttactggtgaaagcaaccatgcaaaagaaattaatttggccaggcacagtggctcatgcctgtaatcccagcactttgggaggccaaggtgggtagatcatctgaggtcaggaattcaagaccagcctggccaacatggtgaaaccctgtctctagtaaaaatccaaaaaaaaaaaaaaaaaaaaaaaaaaaaaaaa

SEQ ID NO: 31330 - DNA, 2269 bp, Homo Sapiens
agtataaacaaggaacccgactggttagacagattttgtttttcttcttcccgcgcgctttagctccctgtcctttggtcgcatttgtgggcgcgcggcacgcagccgggaggccgaggactcggagttcacctgcaggaaagtatgcctcagactcctcccttttcagcaatgtttgacagcagtggttacaatcgaaacctctatcagtctgcagaggacagctgtggagggttgtattaccatgacaacaacctcctctctggatccctggaagcactcatccagcacttagtacctaatgtggattactatccagatagaacatacatatttaccttcctactcagttctcggttatttatgcatccgtatgagctaatggccaaagtttgccacttatgtgttgagcaccagagactaagtgatcctgatagtgataagaaccagatgagaaaaattgcacccaaaatccttcaactcctcacggaatggacggaaacatttccctatgattttcgggatgaaagaatgatgagaaacttaaaagatctggctcaccgaatagccagtggcgaagagcagacatacagaaagaatgtccagcaaatgatgcagtgtctgatccgcaagcttgctgcgctcagccagtacgaagaagtcctggcaaaaatcagctccacatccacagatcggctcacagttctcaagaccaagccacagtctatacaaagggatatcattactgtctgcaacgacccttacacgttggcccagcagctgactcatatagagctggagaggctcaattatattgggccagaagaatttgttcaggcgttcgtgcagaaggaccctttggataatgacaagagttgctacagtgaacggaagaaaacacgaaacttagaagcttacgtggaatggtttaatcgcctcagctacttggttgctacagaaatctgtatgcctgttaagaaaaaacaccgagcaagaatgattgagtatttcattgacgtagctcgggagtgttttaacattggcaacttcaactccttgatggcgataatctctggtatgaatatgagcccagtctctcgactaaaaaaaacttgggccaaagtgaagactgcaaaatttgacattcttgagcatcagatggacccttcaagcaatttctataattatcgaacagctcttcgtggggcagcacaaaggtctttaactgctcatagtagtagagaaaagattgtgataccattcttcagtctcttaatcaaagatatttatttcctcaatgagggttgtgccaaccgccttcccaatggccatgtcaattttgagaaattttgggaactggccaaacaagtgagtgaatttatgacatggaaacaagtggagtgtccatttgagagggaccggaagatcttgcagtatctgctcacagtaccagtcttcagtgaagatgctctctacttggcttcttatgagagtgaaggacctgaaaatcatatagagaaagacagatggaagtctttaaggtcgagcctcttaggcagagtttaacacatgggagctgcctgcctgctgctgctgctgcttcctgcagatcatggaggggctggcctttgttttctggcatctcgtaccacgaacgctcatgaagaccctgcagtcattggagcacccgggtcagcaaagcacacaagctcactcaagaccagatggagaacttatttcctgcagctgacagatagactcagattttgtgagactgaaatgttcactgaagacacttgagaaagaatcctctaaaaatcccggctctgcacattattcatctcctggaatttccatgtgaatcacagctctgcacctggatggagttttcttttgtgtgtgtgtgttttttttaatttggttgaacatttgctgctaatgggacttgcccagctgagtgctggctctgaggaagcccacgtttcttttgttaacttaaatgaagaaaggagtggagggaggggatctaaaacccccccgtttagatcccaaaccttagctcaaccagtattgccagagaggggtaagactggttggaagctgactgcagactttgtttccccttagtatgtgctgtgttgtaaatttttctcctccctcctcctacaaggttttgagttggctgctggttagcaaactcctttttacccatataagttatttaatataataatgaagctcaacactgtggtaggaaaatagccactag

SEQ ID NO: 31331 - DNA, 2199 bp, Homo Sapiens
atatatcttagggtggaagatggataaataattctgtcacacgtgccctggcctctggagctcagctgccagtccacgtctagggaatcttagcatctgggaccaagacactttacagcaatcatcaccctttgcagaggaggtgagctcaccaggactcatctgccatttcagaccttttgctgctacctgccaggtggcccccactgctgacgagagatggtggatctctcagtctccccggactccttgaagccagtatcgctgaccagcagtcttgtcttcctcatgcacctcctcctccttcagcctggggagccgagctcagaggtcaaggtgctaggccctgagtatcccatcctggccctcgtcggggaggaggtggagttcccgtgccacctatggccacagctggatgcccagcaaatggagatccgctggttccggagtcagaccttcaatgtggtacacctgtaccaggagcagcaggagctccctggcaggcagatgccggcgttccggaacaggaccaagttggtcaaggacgacatcgcctatggcagcgtggtcctgcagcttcacagcatcatcccctctgacaagggcacatatggctgccgcttccactccgacaacttctctggcgaagctctctgggaactggaggtagcagggctgggctcagaccctcacctctcccttgagggcttcaaggaaggaggcattcagctgaggctcagatccagtggctggtaccccaagcctaaggttcagtggagagaccaccagggacagtgcctgcctccagagtttgaagccatcgtctgggatgcccaggacctgttcagtctggaaacatctgtggttgtccgagcgggagccctcagcaatgtgtccgtctccatccagaatctcctcttgagccagaagaaagagttggtggtccagatagcagacgtgttcgtacccggagcctctgcgtggaagagcgcgttcgtcgcgaccctgccgctgctgttggtcctcgcggcgctggcgctgggcgtcctccggaagcagcggagaagccgagaaaagctgaggaagcaggcggagaagagacaaggtgagcggggacagggcgttctgcacgcacctgcccaagtgccaaaacccgccgtcatctaaaggctgtgggtcccgttacgagggtttattccagcgcgaggtgtcagggcggccaccggggaacggggatcggtgaccccggtggggaagggggaagatcgttcatatggacaaaagcgggggtgcggaacggctgcattttccacggaggctagtgcacagatgtcagggttgaccggctgctgtcgttacgccctcggagcttcacatcacactgtacagagggagcggtgaccagggtctctgctgccagcgccacctcgtccaggttttcatagcgcacagggagtcgggcggatgcgcaacatctccgcacagggtcaggaagcggcggtcaggcaccgagaaaacagcccagttacgtgaggcagtgtccggggcttaacgtttccgccgagctaatagatttgggaggctccgaccctgattttcacactagcaggagggagggcgctgggtcaccctcctatgcagaagggcagccaagggtgcgcacttccccatcccctgcctggagcctcacttccagcccagcctgggcccgcagaccaccgcgggtgggagtgccgcatcggaggtgaggcctcagtgttcacccatctgttctgtctgcctcattccccaacctgagagtctttccccttttcttcatcttttttttttttttttctctagagaaactcactgcagagctggaaaagcttcagacagagcttggtaagtgacccctcttagaactatttctcctcagggccgggtccagtggctcacacctgtaatcccagtactttgggaggccgaggcgggtggatcacgaggtcaggagatcgagaccagcctggctaacacagtgaaaccccgtctcttctaaaaatacaaaaaattagcccggcgtggcggcatgtgcctgtagtcccagctacatgggaggctgaggcaggagaagggcgtgaacccgggaagcggagcttgcagtgagccgagatggcgccactgcactccagcccgggcgacagagcgagactctgtctc

SEQ ID NO: 31332 - DNA, 3019 bp, Homo Sapiens
aaagcggttggcagcagcggcgcttggaggaaaggaagccggttggagggcgcagcgcacccctgctgcgcggaggagggggctgagctgaactcagcagaagttacatgcacaaggcaaaaattctgacgttctcaagagaccagctctgcccccgtggctcaactgaccctaccatgtggacgctgctcctccaggtgggaactggagttttgaaataaaatggatgatttgacgttacttgatcttctggagtgccctgtgtgctttgagaagctcgatgtcacagccaaagtcctcccttgccagcacaccttctgcaaaccatgtctacagagggttttcaaggcccacaaagagctgcggtgccccgaatgcaggacgcctgtgttttccaacattgaggcgctgccggccaacctgctgctcgtgcgccttctggatggagtgcgctcagggcagagctccgggagagggggctccttccgcaggcctggcacgatgaccttgcaggatggcaggaaaagcaggaccaaccccagacgtctgcaggccagtcctttccggctagtgcctaatgtcagaatccacatggatggggtgcctcgagcaaaggccttatgcaactacagagggcagaatcccggtgacctaaggtttaataagggagatatcatccttctccggagacagcttgatgagaattggtaccagggggaaatcaatggcatcagcgggaacttcccagccagctccgtggaagtcatcaagcagctgccccagccgcccccgctctgcagggccctctacaacttcgacctacgaggcaaggacaagagtgagaaccaggattgcctgaccttcctcaaggacgatatcatcactgtgatcagccgagtggatgagaactgggcagaaggcaagttaggagataaagtaggcatcttccctatcttgtttgtagagccaaacctcaccgcaagacaccttttagagaagaacaaaggtcgccagtcatcctgcacaaaaaacctgtccctggtgtcctcgtcctccagaggcaacacgtctaccctccgtaggggcccagggtccaggaggaaggtgcctgggcagttttccatcacaacagccttgaacactctcaaccggatggtccattctccttcagggcgccatatggtagagatcagcaccccagtgctcatcagctccagcaacccctctgtgatcacccagcccatggagaaagcagacgttccttccagctgtgtgggacaggtcagcacttatcaccccgcacctgtctctccaggacattccacagccgtggtcagtctgcctggctcccagcaacacctctcagcgaacatgtttgtagccctgcactcctactcagcccatggacccgatgagctggacctgcaaaagggagaaggcgtcagggtcctggggaagtgccaggacggctggctcaggggcgtctccttggtcaccgggcgagtcggcatcttcccaaacaattacgtcatccccattttcagaaagacctctagttttccagactcccggagccctggtctctacaccacatggacgttatccacctcctctgtgtcctcccaaggcagcatttcagaaggtgatccacggcaaagccgtcccttcaaatccgtctttgtgcccactgccatagtcaaccccgtgagaagcacagccggccctgggactttaggacaagggtctcttcggaaagggcggagcagcatgagaaagaatggatccctgcagagacccctccagtccgggatccccactctcgtggtaggctccctcagacgcagccccaccatggtccttcggcctcagcagttccaattctaccagccacaggggatcccctcctccccctcagccgtggtggtggagatggggtccaagcctgccctcacgggggagcccgccctcacgtgcatcagcaggggcagtgaggcccggatccactccgcggccagctccctcattatggaagacaaagaaatccccatcaagagtgagcctctgccaaaaccgcccgcatctgccccaccatccatcctggtgaaaccagaaaactcaagaaatggcatcgaaaagcaagtcaaaaccgtgagatttcagaattacagccctcctcccaccaaacattacacctcccatcccacctccggaaagcctgaacagccagccaccctcaaggcgtcccagcctgaagcagcgtccttgggcccagagatgaccgtcctatttgcccaccgaagtggctgccactccggacagcagacagacctccggagaaagtcagctcttgccaaggccacaaccctggtgtccactgcctcaggcacgcagaccgtgtttcccagcaaatgaacctacgggtggcttttcctagaccccaaagaggtgaattgcatttaaatacagtctgcctccactgagggcatcctgccattctttggggacttgagcatgggtccttgttcttcctatttcacctccaggaaagcaaaagtgggagcagaaattcctgccctgggtgggaggatagatggcgtggccttccaaacatacaaacataatgatttgatgccacaaagctcgcttactcagaccaaggagtgaaaaattgtcgtgcccactttatgccccagcatggagtatgtggcctcttgtcatccccgtgttactgtgtagaatttctatggtgtcctaaagggggctgcagcaggggtgtgacaacggtgggattgttggcgttgcttctttgaccttacaatatcctcaacaagcattagaacaacttctgccatcttctggggcctgtacactggccactagtagctgccatatctttttccctctgtaaagtcataatcctggctgcaaagggaggatttctgcgcggggtgtgaggtggatactttgaacattctgagaacccaataaaactagaaggagccaaaaaaaaaaaaaaaaa

SEQ ID NO: 31333 - DNA, 1799 bp, Homo Sapiens
agtatacaggggaggacacaaacatgagaagattaaggtagagagtgaaatatggtcaggacaaatgtgaatttagagcctgagtgatggtttagtggatttatgtcctcacttgtcactaatgaaaaggaccttacaggttatataattaaagctctgttgacattggctcttgaaggcaaacttcataatgaggggaagagtcaagttttgtgtaacctgaagcatatacagtgtccattgccagcacttgagtaaagataaagagtaggagaatcaaagctgttgtataattagttctcttctcatccacacccataaaccagttcaagaaagggatgaaggtacaacttggccaagtagaaatcaaatgccccatcacagagtgttttgaattcttggaagaaacaactgttgtctataacttaacgcatgaagactccatcaagtataagtacttcttggaacttggccgtattgattccagcaccaagccatgtcctcagtgcaagcactttacaaccttcaagaaaaaaggacatattcccaccccttccagatcagaaagcaaatacaaaatccagtgccctacctgccaattcgtctggtgttttaagtgccactctccttggcatgaaggtgttaactgcaaggagtacaaaaaaggagacaaattgttgcgtcactgggccagcgaaattgagcatgggcagaggaatgcccagaagtgtccaaagtgcaagatccacatccagcgaactgaaggatgtgaccatatgacctgctcacaatgtaacactaatttttgttaccgatgtggtgagagataccgccagctccgattttttggagaccacacatcaaacctcagtatatttggatgcaaatatcgctacctcccagagagacctcatttaaggagattagtgcgagggtcagtctgtgctggaaaattattcattgcacctctaattatggttttgggattggcactaggggccatagcggttgtaatcgttgaggaaattaagacttactggaacctcataagtggtagaaccaggaatcaaacccaacatttggctccacagcctgtgttgttaagtgatatgctatactgcctgaaacaagtgtttatttgtatttcctatctattgcctttgtaaaaaacagagaaaacgatcacggacaggtatgcactggtaacatgcagatgatttcatccagctaagctggttggagtaggagcgataccaaagggtacacccatctgtgagtcacatcttgaaaaacactgagaggaaccttctaccatctcatctcccagtgattctccgtgggccacaatgcctctagctatggtgcactcccaacatggtatcctgtcctttccctaaacaaattgctgctgcttttaaaaaatggtcactttcataaactataaacatctatatcataactctgacctttgtggttcttggaagaagatattttaagaaccagttatcctaagaattctgagcacgcctcttctgagaattgcttggactgtctttgaactctgcacctccttccaggccatcttgtgagacttggtgttaatagctgaagtcctatctgtaccaacaagcaaggccacttttcagaagataagagttcactgaatgcacctattataatctgtggccccagcagtataattcttttatctttcaaatgttataattgcaaaaaatctcaatgtccaaaagggaatgagtgaaactaaattaatgagaagaataaaaaaaaaaaaaaaa

SEQ ID NO: 31334 - DNA, 3706 bp, Homo Sapiens; identical to SEQ ID NO: 28105

SEQ ID NO: 31335 - DNA, 3735 bp, Homo Sapiens
ggagtccccgaggtcacaaggcagtggcaggtgtctgtagtcctcgggttgactgcagctcgcggtggtccctctccgagcccaggaagccactccagtgccgagggagaggcctgggagcgctcggagtgtgcgcggactggagaagggggaggtggcggagtgattcgtagagtaaattcggtaccgaggggcggggtcggggatttgaatcggtcggcgggcggaggaggcgggtggaggaggctgccgggcagagcgcaggccaggatcagcgcaggctgtgagtccaggtcagccgtcgggacctcgggctccgggttcgaagagcggctcccggctgcgggtgctttgccaggagagcccttccggacagaggagccggggtctggaaggagcggccgacgcgacgctcgcctgccacggggctctgggagtaagcctgtctgcctggcgggccttcaggtgcggcgtgagagatggatgccaattcaaaagacaagccccctgaaaccaaggagtctgcaatgaataatgctggaaatgcctctttcattttgggaactgggaagattgtgactcctcagaagcatgccgaattacctcctaatccttgcacaccagatacttttaaatcacctttgaacttttccacagtaaccgtagagcaattgggaattacacctgaaagctttgttaggaactctgcaggaaagtcatcatcctaccttaaaaaatgtagacgacgttctgcagtcggtgctcggggctctcctgaaacaaaccatctgattcgtttcattgctcggcagcaaaatataaagaatgctaggaaatctcctttggcacaagattctccttcccagggcagccctgcactgtatcgaaatgttaacactttaagagaacgaatatcagccttccagtcagcttttcactccataaaggaaaacgagaaaatgaccggctgtctggaattctcagaggcaggaaaagagtccgagatgacagacttgaccagaaaggaaggtctcagcgcttgccagcagtctgggttccctgcagtgttgtcctccaaacgtcggagaatatcctatcagagagactctgatgaaaatctgacggatgctgaaggaaaagtaattggtctccagatattcaatattgatacagacagagcatgtgcagttgaaacttctgtagatctttctgagatatcatctaaacttggttcaacacagtctggatttttagttgaagagtctcttcccctttcagagctcacagagacttcaaatgcactaaaggttgctgactgtgtagtgggcaaaggatcaagtgatgccgtttcgcctgacacgttcacagcagaagtgagctcagacgcagtccctgatgtcaggtcaccagctactccagcctgcaggagggaccttcccacccccaagacctttgtacttcgttctgtactgaagaaaccctctgttaagatgtgtctagagagcttacaggaacactgtaacaacctctatgatgatgatgggactcatccgagcttaatctcaaatctcccaaactgttgcaaagagaaagaagcagaagatgaagaaaattttgaagcacctgcctttctaaatatgaggaagaggaagagagttacttttggagaggacttaagcccggaagtgtttgatgaatctttgccagcaaatactccattgcgtaaaggaggaacacctgtttgtaaaaaagacttcagtggtctcagttccctgctgcttgagcagtcacctgttcctgagccattacctcaaccagattttgatgacaagggggagaatcttgaaaacatagaaccacttcaagtatcatttgccgttctcagttctcctaataaatcatcaatctctgagaccctttcaggcactgatacctttagttcttcaaataaccatgagaaaatatcctctcctaaagttggtagaataacaaggacttctaacagaagaaatcaattggtcagtgttgtagaagagagtgtttgcaacttattgaatacagaagttcagccttgtaaagaaaagaaaattaataggaggaagtctcaagaaacaaagtgtacaaagagagcacttcctaagaagagtcaggttttaaaaagttgcagaaagaagaaaggaaagggaaagaaaagtgttcagaaatctttatatggggaaagagacattgcttctaagaagcccctcctcagtcctattcccgagctgcctgaagtccctgagatgacaccttccattccgagcatccgaagactgggttcaggttatttcagttcaaatggcaaactggaagaagtgaagactcctaaaaatccagtgaaaagaaaggatcttttgcgtcatgacccagatttgcatatgcatcaaggctatgataaatatgatgtctctgaattctgctcttatataaaaagttcctcatcgcttggcaatgctacttctgatgaagatccaaatacaaatataatgaacattaatgaaaataaaaatattccaaaagcaaaaaataagtcagaaagtgaaaatgaaccaaaagctggaactgacagtcctgtttcttgtgcttctgtaactgaagaacgtgtggcatcagatagtcccaaacctgctctgaccctgcagcagggtcaagaattttctgctggtggtcaaaatgcagaaaacctttgtcagttctttaaaatttcaccagatttaaacataaagtgtgaaagaaaggatgacttcttaggagctgcagaaggaaaactgcaatgcaatcgtttaatgcctaattcacaaaaagactgtcattgtttaggagatgtcttaattgaaaatacgaaagaatctaaaagccagagtgaggatttgggaagaaaacccatggaaagtagcagtgttgtgagttgcagagacaggaaagatagaagacgttccatgtgttattctgatggtcgaagtttacatttggaaaaaaatggaaatcacacaccatcctccagtgtgggcagctctgtagaaattagtttagaaaattctgaactgtttaaagatttgtctgatgccattgagcaaacctttcagaggagaaatagtgaaaccaaagtgcgacgtagcacgaggctacagaaggatttagaaaacgaaggtcttgtatggatttcacttccacttccttccacttcccaaaaagccaaaagaagaacaatatgtacatttgacagcagtggatttgaaagtatgtctcccataaaagaaactgtgtcctccagacaaaaaccgcagatggcacctcccgtctcagatccagaaaacagccagggccctgctgctggttcttccgatgaacctggtaagaggaggaagagcttttgtatatctacacttgcaaatactaaagccacttcccagttcaaaggctaccggagaagatcctctcttaatgggaagggagagagctctctgactgccttggaaaggattgaacataatggagaaagaaagcagtaattgacatttcctgcagagtctgtggcaagagggaaagtaaccatctatgctgaaatgatctgtctagttcccattctctgttcaacctcagtgtttcaaaagttcctaataaataaactcatttgagttgaacctacttttatgtagaaataaataagtttcttcatcattaaaaaaaaaaaaa

SEQ ID NO: 31336 - DNA, 3735 bp, Homo Sapiens; identical to SEQ ID NO: 31335

SEQ ID NO: 31337 - DNA, 14036 bp, Homo Sapiens
ggcgcggtacaggagcagcactgccggcgggggcgggtgccagggacttggaggtggaggggacgcggcggtactctggcgtcttccgacttcgactccttaccttaaaagatgctggagtcatatgtaactccaattttaatgagctatgtgaatcgctacatcaagaacttaaagccgtcggatctacagctttcactatggggtggagacgtggtactcagcaagctcgagttaaagttggatgtgctggaacaggaactgaaattaccattcacttttttaagtggacatattcatgaattgaggattcatgtaccatggacaaaactgggttcagaaccagtggtaattaccatcaatactatggaatgcattttgaaacttaaggatgggatacaggatgaccatgaaagctgtggttctaattctaccaaccgtagtactgctgagagcacaaaatcatcaatcaaaccgcggagaatgcagcaggctgctcctacagatcctgacttaccaccaggttatgtgcagagtctgattagacgagttgtaaataatgtaaacattgtgataaataatctcatactaaaatatgttgaagatgatatcgtcctttccgtcaatatcacttctgcagaatgttatacagtaggtgaattatgggatcgtgcattcatggatatttctgcaactgatttggtgctgagaaaggttatcaatttttctgactgtacagtttgtcttgataaacggaatgccagtggtaaaatagaattttaccaggatcctttattatacaaatgttccttcagaactcgtcttcattttacatatgaaaacctaaattccaagatgccatctgttattaaaattcatactttagtggaaagtttgaaactttctatcacagatcaacaactgcctatgtttattcgtataatgcaacttggaattgctctttactatggagaaataggcaattttaaagaaggcgaaatagaggaccttacttgtcataataaagatatgctaggaaacattacaggttctgaagatgaaacaagaatagatatgcaatatcctgctcagcataaaggtcaagagttatattcacagcaagatgaggagcagccacagggatgggtgtcatgggcctggtcctttgtgcctgcaattgtgagttatgacgatggcgaggaagactttgttgggaacgatcctgcatcaaccatgcatcaacaaaaagcacagactttgaaggatcctattgtttctataggattttattgcacaaaggcaacggtgactttcaaactcacagaaatgcaagttgagagtagttattacagtccacagaaagtaaaatctaaagaagtattgtgttgggaacaagaaggaactacagttgaggcccttatgatgggagaacctttctttgattgccagattgggtttgttggttgcagagccatgtgccttaaaggaattatgggtgttaaagattttgaagagaatatgaatagaagtgaaactgaagcctgtttcttcatttgtggtgacaatttgagtacgaaaggtttcacataccttacaaattcattgtttgattaccgaagcccagaaaataatggtactcgcgcagaatttatcttggattcaactcatcataaggagacatacactgagatagctggaatgcaacggtttggggctttttatatggattacctgtatacaatggagaacactagtggcaaaggttccacaaatcaacaagacttttcttcagggaaaagtgaagatttgggaacagttcaggagaagtccaccaaaagccttgttataggtcctcttgattttcgtttggatagcagtgcggtgcataggattttgaaaatgattgtgtgtgccttggaacatgaatatgaaccatatagcaggctaaaatcagatattaaggatgaaaatgaaacaatactgaatcctgaagaggtggctcttctggaggaatatattcctactcgacatacaagtgttactctcctcaaatgtacctgcacaatttccatggctgaattcaacttgctggaccatttactacctgtcattatgggagaaaagaactcaagtaacttcatgaatactacaaacttccagtctcttcggcctttgccatccattcgaatattggtggataaaattaatctggaacattcagtgccaatgtatgctgaacagttggtgcatgtggtcagcagccttactcaaccttctgataacctgcttcattattgttatgtacactgctatcttaagatatttggtttccaggcaggactgacgtctttggattgcagtggatcttactgcttacctgtaccagttattccctctttcagcactgctctttatgggaaacttctgaaactccccacatgctggaccaaaagatctcagattgctataactgaaggtatatttgaacttccaaatctcacaattcaagctacaagagcacagacacttctcttgcaagcaatatatcaaagttggtctcatcttggaaatgtcagctcttccgcagtgattgaagctttgataaatgaaatcttcctaagtataggtgtgaaatctaagaatcccctgccaactcttgagggctcaatccagaatgttgaattgaagtactgcagcacatcattggtcaaatgtgcctctgggaccatgggatcaataaaaatttgtgccaaagccccagttgatagtggaaaagagaagttgattcccttgcttcagggtccttctgacactaaagaccttcatagcaccaagtggctcaatgagagtagaaagccagagtctctcttagctccagatttgatggccttcacaatccaagttccacaatatattgactactgccacaattccggtgctgtacttctttgcagtatacaaggactagcagttaatattgacccaatcttatatacgtggctcatctatcagcctcagaaacgaacaagtagacatatgcaacagcagcctgtggtagctgttcctcttgttatgccagtttgtagaaggaaagaggatgaggtgtctattggaagtgcccccttggcaaagcagcaatcatatcaggcctctgaatatgccagcagccctgtaaaaacaaaaacggtaacagaatcccgcccattgtcagttcctgttaaagccatgttgaatatatctgaaagctgtagaagtcctgaagaaagaatgaaggaatttattggaattgtttggaatgcagtgaagcatctcacactacagcttgaagtacaatcttgttgtgtgtttattccaaatgatagcctgccttccccaagtacaattgtatctggtgacattcctggaacagtaagaagttggtaccatggacaaaccagcatgccgggaacacttgtcctctgtttgcctcaaataaagattattagtgctgggcacaagtatatggaacctctgcaggagattccatttgttatcccacgacccatccttgaagaaggtgatgcttttccttggacgatcagcttgcataatttcagcatatatacccttcttggaaaacaagtgacactttgcctagtggaacctatgggttgcacctccactctagctgtcacgtctcaaaaactgcttgctacgggacctgatacacgacattcatttgttgtctgtctccatgttgacctagagtcactagagataaaatgctctaatccccaggtccagctcttctatgaactaactgatatcatgaataaggtctggaacaagattcagaagagaggcaatctcaacctatctccaacctctccagagaccatggcagggcctgttcctacttctccagttagaagcagtataggcacagctcctccagataccagcacatgcagcccatctgctgacattgggactactactgagggagattctatacaagcaggtgaggaatcaccattctcagattctgtgaccttggaacaaactacaagtaatattggaggaaccagtggacgtgttagtttatggatgcagtgggtgcttcccaaaattactataaagctctttgctccagatcctgaaaataaaggcacagaggtttgtatggtcagtgaactagaagatctcagtgcttccatagatgtccaggatgtatataccaaagtgaaatgtaaaatagagagtttcaatattgatcactatagaagcaggccaggggaaggttggcagtcaggacattttgaaggagtatttctacaatgcaaagaaaaatctgtgacaactacaaaacttctagatggcactcatcagcagcatggattcctctctctgacatacacaaaagctgtaacaaaaaatgtccgccacaagttaacatcaagaaatgagcgaagaagttttcataagttatctgaaggcctaatggatggttctcctcattttcttcatgaaattcttctttcagcacaagcttttgatattgttctttattttcctttacttaatgccattgcaagtatatttcaagcaaaactaccaaagacccaaaaagagaaaagaaaatctcctggtcagcccatgaggacccatacactgacatcccgcaatttacctttgatttatgtcaacacaagtgtaatcagaatttttattccaaaaacagaagaaatgcagccaactgttgaagctaatcaggcagcaaaagaagacactgtggttttgaagattggctctgttgccatggctccccaggctgacaatccccttggcagatctgtccttaggaaagatatttaccagagagccttgaacttaggaattcttcgagatcctggatcagaaatcgaagacagacaataccaaatagatctgcagtccatcaatattggtactgcacagtggcatcaactaaaaccagagaaggaaagtgtctcaggaggggtggtaacagagactgaaaggaattctcaaaatccagcccttgagtggaatatggccagcagcatacggcggcatcaagaaaggagagcaattttgacccccgttttgacagatttttctgtccgaataactggagcacctgctgtcattttcaccaaagtagtttctccagaaaatttgcatactgaggagattttagtgtgtggccattccttagaagtgaatataaccacaaacctggacttcttcctaagtgtggctcaagttcaactcttacatcagttaatagtagcaaatatgactggactggaaccatcaaacaaggctgcagagatctctaaacaagaacagaaaaaagtggatatatttgatggaggcatggctgaaacctcatctcgctacagtggtgctcaggatagtggaattggcagtgacagtgttaaaatcagaatagtgcaaatagagcagcacagtggtgccagtcagcatcgcattgcccgtccctcacgccagtcatcaattgtaaaaaatctaaattttattccctttgacatatttattactgcaagtagaatctcactaatgacctattcctgtatggccttatccaaatcgaaatcacaagaacagaagaataatgaaaaaacagacaagagttcattaaatctcccagaagttgattcagatgttgctaagcccaaccaggcatgtatttccacggtgacagcagaagatctcttaaggagcagcatttcttttccttcagggaaaaaaataggggtcctctctcttgaaagtcttcatgcatccacaaggtcatctgctagacaagcacttggtataactattgttcggcagcctggtcgaagaggaactggtgacttacagctagagccttttctgtactttattgtgtcccagccttccttgcttctgagttgtcaccacagaaagcagcgagtggaagtatccatttttgatgctgtgcttaaaggggtggcctctgattacaaatgtatagatcctgggaagactctgcctgaagcccttgattattgcactgtttggctacagacagtgcctggagaaatagacagcaaaagtggtattccaccttcctttataacactacagattaaagactttctgaatggaccagcggatgtcaatttggatatatcaaagcctttgaaagcaaacctgagtttcaccaaactggatcagataaacctttttttaaagaagataaaaaatgcacacagtttggcacatagtgaagagacttcagccatgtccaacaccatggtgaataaggatgatcttccagtctccaaatattaccgtggaaagttgtctaaacccaaaattcatggtgatggagtgcaaaagatttcagctcaagaaaacatgtggagagctgtttcctgctttcaaaaaatttctgttcaaactactcagattgtgatctccatggaaactgtaccccataccagcaaaccatgcctgttagcatctctctcaaacctcaatggaagccttagtgtcaaggcaacacaaaaagtacctggcataattcttgggtcatcatttctactcagtataaacgattttctccttaaaacaagtctcaaagaaagaagccgcattctgataggaccatgttgtgctactgccaatctggaagctaagtggtgtaaacacagcgggaatccaggcccagaacaatccataccaaaaatatccattgacttaagaggaggtctactacaggtcttctggggtcaagaacatttgaattgtttagttcttctacatgaattactcaatggataccttaatgaggagggaaattttgaagtacaagtttctgaaccagtgcctcaaatgtcatctcctgtggaaaagaatcagacatttaaaagtgaacaaagttcagatgacctacggacaggtctatttcagtatgtacaggatgctgaatctttgaaattgcctggggtctatgaagtcttattttataatgaaactgaagattgcccagggatgatgttatggagatatccagaacctagagtactcacccttgtacgaataactcctgtaccttttaacaccacagaggatccagatattagcacagcagaccttggtgatgtgctacaggttccttgtagcttggaatactgggatgaactccagaaggtttttgttgcatttagagaatttaatctgtctgaaagcaaagtttgtgaactgcagttgccggatatcaatctcgtgaatgaccagaagaaattagtatcttcagatctttggagaattgtcttgaacagcagtcaaaatggagctgatgaccaaagctctgcaagtgagtctggttctcaaagcacttgtgatccacttgtgactccaacagccctggctgcctgtaccagagttgactcctgctttaccccatggtttgtcccatccctttgcgtttctttccagtttgctcacctggaattccatctttgtcatcaccttgaccaactaggcacagctgcaccacagtacctacagccatttgtttccgacagaaatatgccatctgaactagaatacatgattgtttccttcagagaaccacacatgtatcttcgacagtggaataatggttctgtctgtcaggagatccagttcttagctcaagcagactgtaaacttctagagtgcagaaatgtcactatgcaaagtgtggtgaaacccttcagcatcttcgggcagatggcagtttccagcgatgtagtggaaaagctgcttgactgcaccgtgatagttgattctgtatttgtaaaccttggacagcatgtagtccattcactaaacactgcaatacaagcttggcaacagaacaaatgccctgaggtagaggagttggtcttcagccattttgtgatctgtaatgacacacaggagacactgcggtttggccaggtggatactgatgaaaatattctgctggcgagtctccacagtcaccagtacagctggcgctctcacaaatccccacagctgttacacatctgtattgaaggttggggcaactggcgttggtcagagcctttcagtgtggaccatgccgggacttttattagaacaattcagtacaggggtcgaactgcttctctcatcatcaaggttcagcaactcaatggagtacaaaaacagattatcatctgtggaagacagatcatctgtagttacttgtctcaaagcatagaactaaaagtcgttcagcattacattggtcaagatggacaagctgtagttcgggaacattttgactgcctcacagccaaacagaaattgccttcgtacatactagaaaacaatgaactgacggagctgtgtgtgaaggccaaaggagatgaagactggtcaagagatgtgtgcctggaatccaaagcccctgagtacagcattgtcattcaggtgccatcttcaaacagttccattatttatgtctggtgcacagttttgactttagaacccaactctcaagtgcaacaacgaatgattgtgttcagccctctttttatcatgaggagtcatcttccagaccccattatcatacatttggagaaaaggagtctgggattgagtgaaacacaaattattccaggaaaagggcaggaaaaaccactgcaaaacatagaacctgaccttgtacatcacctgacattccaagcaagagaagaatatgatccttcagattgtgcagttcccatctcaacatccctcattaagcaaatagccactaaggtacaccctggaggcacagttaatcagatccttgacgaattctatgggccagaaaagtcgcttcaacccatatggccctataataagaaggattctgacaggaatgaacagctaagtcagtgggatagcccaatgcgagtgaagctgtcaatctggaagccatatgttagaactttgttgatagaacttctgccctgggccctgcttatcaatgaatccaaatgggacctctggctatttgaaggagagaaaattgttctacaggttcctgctggcaaaattattattcctcctaattttcaggaagcttttcaaattggaatatactgggcaaatacaaacactgtgcacaagtcagtagcaattaaactggtccataacctgacatctccaaagtggaaagatggaggtaatggtgaagttgtgacactggatgaagaagcgtttgttgatactgaaataagacttggtgcttttccaggacatcagaagttatgtcagttctgcatttcctccatggtacagcaaggtatacaaattattcagattgaagacaagactacaataatcaataatacaccatatcaaatattttataaaccacagctatctgtctgcaatccccattctggaaaggagtattttcgtgttccagacagtgctacttttagcatttgcccaggtggagagcagcctgctatgaaatccagctcccttccttgctgggacttgatgcctgacatcagtcagtcagtactggatgcatccctgcttcagaaacagatcatgctgggcttttctcctgccccaggtgctgacagctcacagtgctggagcctgccagctatagttagaccagagtttcccagacagagtgtggcagtacccctcgggaatttccgggaaaatggattctgtaccagggctatagtgctgacatatcaagaacacctcggagtgacttatttaaccctctcagaagaccctagtcctcgagtaattatccacaatagatgtccagtaaaaatgcttataaaggaaaacattaaagatattccaaagtttgaggtttattgcaaaaaaattccctccgagtgctcaattcatcatgagctgtatcatcagatttccagttatccggactgcaagaccaaagacttacttccaagcctacttttgagagttgaacctctagatgaagtaacaactgagtggagtgatgccattgacatcaacagtcagggaacacaggttgtgttcctgactggctttggctatgtgtatgtggatgttgtacatcagtgtggcacagtcttcatcactgtggccccagaaggaaaagcaggacctattttaaccaataccaacagagcgccagagaagattgttacatttaaaatgttcatcactcagttaagcctggcagtgtttgatgacctcacccaccacaaagcatcagctgagcttctgagactcacactggacaacatttttctctgtgtggccccgggagctggtcccctccctggggaagagcctgtggctgcgttgtttgaactttactgtgtggagatctgctgtggggacctgcagctagacaaccagctttataacaagtccaatttccactttgctgtcttagtctgccagggagaaaaagcagaacccattcagtgttccaaaatgcagagtctcctcatatccaacaaagagttggaagaatacaaggaaaaatgttttatcaaactttgcatcaccttaaatgaaggcaagagcatcctctgtgatattaatgagttcagctttgaattaaaacctgctcggttatacgtggaagacacatttgtatactacatcaagactttgtttgacacctaccttcctaacagcaggttggctggtcactccacacacctctccgggggtaaacaggtgttgcccatgcaggtcacacagcacgccagggccttggtgaatcctgtgaagttacggaaactggtgatccagccagtaaatttgctcgtcagcatccacgcttccctcaagctgtacatagcctcagaccacactcctctctccttctcggtgtttgaaagaggacccatcttcaccactgcgaggcagcttgtgcacgccctggcaatgcactatgccgctggggccctttttagagcaggctgggtagttgggtctctggatattcttggcagccctgcaagcctggtgagaagcatcgggaacggggtcgccgacttcttcaggcttccgtatgaggggctgacccggggccctggagccttcgtgagtggcgtctccagagggaccacatcgtttgtaaagcacatctccaaaggtaccctcacatccatcaccaacctcgccacaagcctggcccggaacatggaccggctctcactggatgaggagcactacaaccggcaggaggagtggcggcggcagctccccgagagcctgggcgaggggcttcgacagggcctgtcccggctgggcatcagcctgcttggtgcaattgctggtatagttgatcagccgatgcagaacttccagaaaacatctgaggcacaggcttcagcaggacacaaggccaagggtgtcatctcgggtgtggggaaaggaatcatgggggtgttcacaaagcccatcggaggagctgctgagctggtgtcacagactggctatggtattttacatggagctggactttctcagcttcccaaacagcgccatcagccaagtgatctacatgctgaccaggctccaaacagccatgtcaaatatgtctggaaaatgcttcagtctctgggcagaccagaagtccacatggccctggacgtggttctggtgaggggctcaggccaggagcatgaagggtgcttgctgctgacatcagaagtgctcttcgtggtgagtgtcagtgaggacacacagcagcaggccttccccgtcacagaaatcgactgtgcacaggacagcaagcagaacaacttactcacagtgcagctcaagcagccaagagtggcctgtgatgtggaggtagatggagtccgagagagactgtcagagcaacagtacaacagactggtggactacatcacaaagacatcttgtcacctggcccccagctgttcttccatgcaaataccatgccctgtggtggctgcagaacctcccccctccactgttaaaacataccattacctggttgatccacattttgctcaggtcttccttagtaaatttaccatggtgaaaaataaagccctgaggaaagggtttccttgagtcccctctgaggtgtttattcctgcttgtgtgatttagtttttgggtttctttgagacagggtctcactgcattgcccttgctgacctcaaattctggggttcaagcaatcctcccacctcaacccacaagtagctacgactgcaagcacctgccaccataaagggctgcattttgccaccataaagggctgcatttttttaaaaagcctaggcagctctaacatcatctgatatggacacaaggccaacagtttccttatttacatccttacctctaaaagatacttcaaagtgacaaaaacgtgttccttccccacttagagacaatgattaacagggccctatatgttcttaccacatacagaggatgcatttatttttgctctatgacacttgcaaaaatctctactgtaattaatttgggtctattattaactctctgttccatcatagaatgtggccaggccttacaatggagagccagagttaaaacttcaagttgcatctgtttttgggctgagtcaccacctttgcctcatgctcctttgtctgcaaaggcctaggattctttctttaaatgaaatgcttaggactttgtggcttgttacatttgtcatttaactgcagtgctattctttgaaagctgctatgtgtattttctctgaagtctgcattttactaaaatttacaacagtctgatgattgattgattactgtccaggtacattttagaaaaagtgttcttcttccagtttgttttactaagcaaactttgagtaaatcctttgtcctatattgaatccagtcccaaagtgttcaggtgagtttctctagttccataaacaaaacatacatagtgggaactccctggtatgccatagagcacacaagaaccccaatattaatgctaacaattataccagtccattttgtttattctgtggaattgacttgacaaagcatgaagatattcccagtgtctgtctgataatattttgcatctaagaatgggtttgactcaagatcttgggttaccaagatgtcttaaatgttcagtaaatatctttcttacagtccagtagcttagagcatgtttgctgattgatattacatttaaacttggggctacagcttgttacctagaattttgagatactaagagaatgcaattttaaatgcccactggttttatttgttttggagagagggtctcattctgtcacccaggctagagtacagtgggaacagtcatggctcactgcagcttaagctcactgcctgggctcaagtgatcttactccagcctcccaagcagctgggactacaccaccacaggtatgcaccaccatacctggctgatttttaaaattttttctagagatgaggtctcactatgttgcccagctggtctcatactcctcagttcacgcattcctcccacctccacctcccaaactgctgggattacaggtgtgagccaccatgcccaacacccactgatctttaactctcacatgttgggcataagaagtcactatataattgttactggaaagcaagacttaacgaacaattctgactatgaaaaatgtctctttcagtttgttctgtaaatatttagaaaagtgacagctgtcaacctcagagtaactatttctaaaaatgtaaatatgtattaatccttgtatcttttatggtaattttgcatattgatatgaattatataaaattgtttaaaataaaaggtgtccttgaattactgaccacccatagatgtctactgttaccaggttttacaatgcaaattttcactaatacctgggtttaatacagctcacatcactgaatgttacacatgagtttaaatgggtaatatacaggttttgttataataaagttactgattaaattaaaaaaaaaaaaaaaaaa

SEQ ID NO: 31338 - DNA, 2770 bp, Homo Sapiens
ctccttggcggtgcctggagcccgggcgcaccccaccgctcccgggacctgttgggggctggcccgaaccgtcgtcgaagggagccgctcggccacccccgacgttcctcgccccgcccgacgttccctcaagtggccgaaccagccggacgagccaaactcgccgggcctcccggcggcagcaggtggccccgtccttccagggagggccctgcgccccgcggcgctccggagccctctcggccgcccccgccaggcgggatggaggcggatggggacggagaggagctggcccggctgcgctcagtcttcgccgcctgcgacgcgaaccgctcggggcgcctggagcgcgaggagttccgggcactgtgcacggagctgcgggtgcggccggccgacgccgaggcagtattccagcggctggacgccgaccgtgacggcgccatcaccttccaggagttcgcgcgtggcttcctcgggtccctccgcggggggcggcgccgggactggggtcctctggatcccgcgcccgccgtgtctgaggcggggccggagacacacgacagcgaggaggacgaaggcgacgaggacgcggcggcggcgctggccacctcgtgcggcccggcgagtcccggccgggcttggcaggatttccaggcgcgacttggggacgaagccaagttcattcccagagaagagcaagttagtaccttgtaccaaaacatcaaccttgtggagccaagattaattcagccatatgaacatgttataaagaacttcatccgtgagatcagacttcaaagcacagaaatggaaaatttggccattgcggtgaagagagcccaggacaaggcagctatgcagttgagtgagttggaagaggaaatggatcagaggattcaggctgcagaacataagacacggaaagacgaaaaacgcaaagctgaggaagccctcagtgacctcagacgtcagtatgaaactgaagtaggagatctgcaggtgaccattaaaaagctaagaaagctcgaagaacaatcaaaacgcgtaagtcaaaaggaagatgtggctgcattgaaaaaacaaatttatgatttatcaatggaaaaccagaaagttaagaaagaccttttagaagcacagacaaacatagcctttcttcagagtgagttagatgctttgaaaagtgattatgctgatcagagtctgaatactgaaagggatctggaaataatccgagcatacacagaagatcgaaatagtcttgagaggcaaattgaaatactccaaacagctaaccggaagctacatgacagtaatgatggccttagaagtgcccttgaaaacagttatagcaagttcaacagatctttgcatataaataatatctcaccagggaatacaatttctagaagcagtcccaaattcattggtcattcccctcaacctctaggctatgacaggtcatcccgctcttcctatgtggatgaggactgtgactccctggccctctgtgatcctctgcagaggacaaattgtgaagttgacagcctgcctgaaagctgcttcgacagcggcttgtctaccttgagagatcccaatgagtatgactcagaagtggaatacaagcaccagaggggatttcagaggtcacacggggtgcaggagagctttggaggtgatgcttcagacacagatgttcctgacataagggatgaagagacatttggtttagaagatgtggcttccgtcttagactggaagccccaagggtctgttagtgaaggcagcattgttagttcatcaagaaagcccatctcagcactctcgccccagacagacctggtagatgacaacgctaaatcttttagctcacagaaggcttacaagattgtacttgctggggacgctgcagtggggaagtctagtttcctcatgagactttgcaagaatgaatttcgagaaaatataagcgccaccctgggagttgatttccaaatgaaaaccctcattgtggatggagaacgaacagttctgcagctctgggatacagctggtcaggagagattcagaagtattgccaagtcttacttcagaaaggcagatggtgttttgctgctgtatgatgttacatgtgagaaaagctttcttaacatacgagaatgggtagatatgattgaggatgcagcccatgagactgttcccattatgctggtaggaaacaaggctgacattcgtgacactgctgctacagagggacaaaaatgtgtcccagggcactttggagagaaactggccatgacgtatggggcattattctgtgaaacaagtgccaaagatggttctaacatagtggaggctgttctgcaccttgctcgagaagtgaaaaagagaactgacaaggatgacagcagatccattaccaatctaaccgggaccaattccaaaaagtcaccacagatgaagaattgttgcaatggctaaatcccaaacatccttggcctgtgaagtcttcatttccagaatactgaatttgtgtgacttatttggctcttaacagagtggcacatcctactgacactgtcctatggagagttacagtgcaggaaacctgaacccagctctcaggtccctctggaactttggctcttctttgttttgtctcagtgagtgatttgggccctctggctaaatagactagtcatgtccttacaggtcttaaaagataacatgtaaatgtttttaaaatggtaaaaaaaaaaaaaaaaaa

SEQ ID NO: 31339 - DNA, 4773 bp, Homo Sapiens
taacaatagcagagcaagactgacaacaataattaaaataagagaataaagaagatgtagtcagaggccattctgaatgcattcagattctcagtgtgtatgaggaaggctgcctgtaattaagagggaatctttaaccagtttcagtgtagtagtgaaaaagtgcttccatctgacactctccgcagtgctctggcaaagactttccaggatgaacaacgtttccagctgggaattatggatgatgctgcagagtgctttgaaaacctcctgatgagaattcacttccacattgctgatgaaaccaaagaggatatatgtactgcccaacactgcatttcccatcagaaatttgcaatgacattgtttgagcagtgtgtatgtactagctgtggtgccacttctgatccgctgcctttcatccagatggtacattatatctccaccacttccctttgcaatcaggctatttgtatgctggaaagacgagagaaaccttcaccaagcatgtttggtgagctgctgcagaatgccagcaccatgggggatctgcggaactgtccaagcaactgtggagagaggatcaggattcgccgtgtgttgatgaatgctccacagattatcacgattgggctggtatgggactcagaccactcagacttagcagaagatgttatccacagcctgggaacctgccttaagctgggtgatctgtttttcagagtgacggatgaccgggccaagcaatctgaactgtacttagttggaatgatctgttactatggcaaacattattctacattcttttttcaaacaaagattcgcaaatggatgtattttgatgatgctcatgtcaaggagattgggcccaaatggaaggatgtggtgaccaaatgcatcaaggggcattatcagcccctgctgctgctttatgcagatccccagggtaccccagtttccacccaggacctgcctccccaagctgagttccagtcatacagcaggacatgctacgacagtgaagattcaggacacctgactgatagtgaatgtaatcagaaacacacatccaagaaagggtcactgatagagcgcaagaggagctctggtcgggttaggaggaaaggcgatgagccccaggcctcgggataccacagtgaaggagaaacactgaaagagaagcaggctcctagaaatgcctccaaaccatccagcagcaccaacaggctgagagattttaaagagacagtcagcaatatgatccataacagaccatccctggcttctcagaccaatgtaggctctcactgcaggggcagaggaggagaccagcctgacaaaaaacctcctaggaccctgcctttacactctcgtgactgggaaatagagagtaccagcagtgagtcaaaatccagttcttccagcaagtatcgtcccacatggagacccaaacgagaatctctgaatattgacagtatctttagtaaggacaaaaggaagcactgtggctatacccagcttagccccttttctgaggattcagctaaagaatttataccagatgaaccaagcaagccaccttcttacgacattaaatttggtggaccaagcccccagtacaagcgctggggcccagcacggccaggctctcaccttttagagcagcacccccgactaatccagcgaatggaatctggctatgaaagcagtgagaggaacagcagcagccctgtcagcctggatgcagccctgcctgagagctcaaatgtctacagggatccaagtgctaagagatcagctgggttggttccttcctggcgtcatatcccaaagtcgcacagcagtagcatcctggaggtagactccacagcatccatgggtggctggacaaagagtcagcctttctctggtgaggagatatcttctaaaagtgaactggatgaattgcaggaagaggtggccaggagggcgcaggaacaggaacttcgaagaaaacgggagaaggagttagaggcagcgaaagggtttaaccctcatcctagccgcttcatggacttggatgaactgcagaatcaggtgagcagcctatcccgctccaagtattgttaagccaagaggcccaactggaatccggcatggatacagagtttggggccagttctttcttccattcacctgcttcctgccatgagtcacactcatcactatctccagagtcatctgccccacagcacagctcccccagtagatctgccttgaagcttctgacttcggttgaagtagacaacattgaaccctctgcattccacaggcaaggtttacctaaagcaccagggtggactgagaagaattctcatcatagttgggagccattggatgccccagagggtaagctgcaaggctctaggtgtgacaacagcagttgcagcaagctccctccacaagaaggaagaggcattgctcaagaacagctgttccaagaaaagaaggatcctgctaacccctccccggtgatgcctggaatagccacctctgagaggggtgatgaacacagcctaggctgtagtccttcaaattcatcagctcagcccagccttcccctgtatagaacctgccaccccataatgcctgttgcttcttcatttgtgcttcactgtcctgatcctgtgcagaaaactaaccaatgcctccaaggccaaagcctcaaaacttcattgactttaaaagtggacagaggcagtgaggagacctataggccagagtttcccagcacaaaggggcttgtccgttctctggctgagcagttccagaggatgcagggtgtctccatgagggatagtacaggtttcaaggatagaagtttgtcaggtagtctaaggaagaactcttccccttctgattctaagcctcctttctcacagggtcaagagaaaggccactggccatgggcaaagcaacaatcctctctggagggtggggatagaccactttcctgggaagagtccactgaacattcttctcttgccttaaactctgggctgcctaatggtgaaacttctagcggaggacagcccaggttggcagagccagacatataccaagagaagctgtcccaagtgagagatgttaggtctaaggatctgggcagcagtactgacttggggacttccttgcctttggattcctgggtgaatatcacaaggttctgtgattctcagcttaagcatggggcacctaggccaggaatgaagtcctcccctcatgattcccatacgtgtgtaacctatccagagagaaatcacatccttttgcatccacattggaaccaagacacagagcaggagacctcagaattggagtctctgtatcaggccagtcttcaggcttctcaagctggctgttctggatgggggcagcaggataccgcctggcacccacttagccaaacaggctctgcagatggcatggggaggaggttgcactcagcccatgatcctggtctctcaaagacttcaacagcagaaatggagcatggtctccatgaagccagaacagctacaccttgccgaggcctcagcagggagtgtggggaggatgagcagtacagtgcagagaatttacgtcgcatctcacgcagtctcagtggcaccgttgtctcagagagggaggaagctccggtttcttcccacagttttgattcatcaaacgtgaggaagcctttggaaaccgggcaccgttgttccagctcctcttccctccctgtcatccatgacccttctgtgtttctcctcggtccccaactctaccttccccaaccacagttcctgtccccagatgtcctgatgcccaccatggcaggggagcccaatagactcccaggaacttcaaggagtgtccagcagtttctggctatgtgtgacaggggtgaaacttcccaaggggccaagtacacaggaaggactttgaactaccagagcctcccccatcgctccagaacagacaactcctgggcaccctggtcagagaccaaccagcatattgggaccagattcctgactactccagggtgcaatcctcaactaacctacactgccacactaccagaaagaagcaagggccttcaggttcctcacactcagtcctggagtgatcttttccattcaccctcccaccctcccattgttcatcctgtgtacccaccatctagcagtcttcatgtacccctgaggtcagcttggaattcagatcctgttccagggtcccgaacccctggtcctcgaagagtagatatgcccccagatgatgactggaggcaaagcagttatgcctcccactctggacacaggagaacagtgggagaggggtttctgtttgttctatcagatgctcccagaagagagcagatcagggctagagtcctgcagcacagtcaatggtaaaggttattcctttcctttcctggagctacacctttctttgtaaaactgtactgtgggccgggcgcggtggctcacacctgtaatcccagcgctttgggaggctgaggcgggtggatcacgaggtcaggagattgagaccatcctggccaacatggtgaaaccccgtctctaccaaaatacaaaaaattagccaggcgtgacggtgcgtgcctgtagtcccaactactcggaaggctgaggcaggagaattgcttgaacccgggaggcagaggttgcagtgagccgagatcgcaccactgcactccagcttggcaatagagtgagactccatctc

SEQ ID NO: 31340 - DNA, 2151 bp, Homo Sapiens
gatcgcggcgccgccccagaccgggggcgcagtcccactcgctccgagccccggtcccccaagcctccctcccgggtacctggggccgcgcccgccctgcgcccagctccgccctccgtcggcccaggcctgacagagcccggcagccatgagtgccaacccccggtgggacatcagcagggcgctgggggtggccaagctcttccacctggtgtgcggggtgcgggaagcctgcgtgaccccgttcctgaccctttacctgaggcagctgggcttggccgcgccctgggtgggcaccctaatgggaaccaagcacctaatcgctgccttctgggctcccgtctgtgccttcctggccaaaagctaccggaaaaggagagcgcttctgatcggctccctgctcggctcggtgggggccagcctgctgatggtcctggtcccaccggtagacaaaaatcgggtgcacttcccttgtaatggaagcagcggcctgaccagcacagacgcactcccgggggtcacgctacctgtgaacatcacctcggcccaagagtctgcctccagccacccagccaagaggactgcagaggtggaaatgcctggcttcagaaacccacctggtgaaagtgaccgagaaactttccgtgatctgcacgtctacttagcgccctccgttgaaggagctaggaccacatcccaagctctcctccatcctgtcacttcggggctgaaagatcatccctgggaagttacttttgaggtggtcaagacagccctccccttgcttactggggggaaagggcccgggaatccagccaatttgtcagggaccaaggggaaagcctgggcttttgacctgtccttggaggcgttgcggcggacttttatcctctccttggggtccgtggcgttctgggagctgctgacagcgcctctggagcaggtggcagatgacagcctttatgagttcctggattttgtggatgccactgaccgatacagaagcctgtgggtctggaggttgctgggcatgtcggcaggcgtgtgtggcatcacagccttggtggggcagctggactgcttcctgatgaccagtggcccccgaggtgtggtccacttctatgggtactcggtggtcagcaccctggccttactggtgagcattgcctttcccattcccatctgtcagcagtgggagcccagctacaaaagggtcaaagcactgtccattgtggggggtgacccccacctcattctcctcgcctccaccactgttttggtaggagccatcgtcagtactgtccagaactttctgttctggcacatgaaggaccatgggagcggcgagctggtcatgggtttctcggtcgccctcagcttgctgggggaaattctgcttcatccgttcaaagctacattgcttaggaaactgtccaggacgggcctggtggggctggggctgagctgcctcgctgggcagctgctgtactactctttcctctggagctggtggtccgtcctccccattcagatcttgagtgccattagcaacagagctttgtggtgggctgtgggggcctcagtagaggacctggccactccccgcatggagagggctctgagtgccttgttccgaggccacttttacgggagtggctgtagcctgggcagctttgtcgggggcttcgtggtgatgcgcttcagcctggctgtgctctaccaggcctgctgtgtggccctgttgctctggttggccttgctcctgtccatacagcggaggctgccccgagagcggaaaatcaagtactcgaagctgctgtccatggaggtgagtgacaccagtgactctgagcaggggacagaacaggactggcttgtgaaggccatgagggaggaacactcagactgaaagggctgagaaatccagagtgtgctgatccagcaaggaacgaatggactgaacaaaactcagcctgctgaggacagaaacctgccctggactgctgggagccggggaagagaggatgggtctgtgctgaaggcccaacaggatcatctcattgcatgattttctttacttttgaagtaaaaggagatttaacttttaaaaaaaaaaaaaaaaaaaaaaaaaaaagaaaaaaaaaaaaaaaa

SEQ ID NO: 31341 - DNA, 4503 bp, Homo Sapiens
gtttcgtgtccgctgcgtttgggttccggtctccgcttctccagtggccccggtggctccaccgcagcgtctggcgcgctgggacctgcacaggccggagagagccgtaggcaggaccccgggacaccctggaagccaggaaatggactcagtggtctttgaggatgtggctgtgaacttcacccaggaggagtgggctttgctgggtccctctcagaagaaactctacagagatgtgatgcaagaaacctttgttaacttggcctctataggggaaaactgggaggagaagaacattgaagatcacaaaaatcaggggagaaagctaagaagtcatatggtagagaggctctgtgaaaggaaagaaggtagtcagtttggagaaaccatcagtcagactccaaatcctaaaccaaacaagaaaacttttactagagtaaaaccatatgaatgtagtgtgtgtggaaaggactatatgtgtcattcatctcttaataggcacatgagatctcatactgaacatagatcatatgaatatcacaaatatggagagaaatcatatgaatgtaaggaatgtgggaaaagattcagctttcgaagttcatttcgaatacatgaaagaactcacactggagagaaaccctataaatgtaaacagtgtggtaaggctttcagttggcccagttcctttcaaatacatgaaagaactcatactggagagaaaccttatgaatgtaaggaatgtgggaaggccttcatttatcacacaacctttcgaggacacatgagaatgcacacaggggagaaaccctataaatgtaaagaatgcgggaaaacgttcagtcatcccagttcttttcgaaatcatgaaagaactcactctggagagaaaccctatgaatgtaaacaatgtggaaaagctttcagatattaccaaacttttcaaatacatgaaaggactcacactggggaaaaaccctatcagtgtaagcaatgtggtaaagctcttagttgtcccacatcctttcgaagtcatgaaaggattcacactggagaaaaaccctataaatgtaaaaaatgtgggaaagccttcagttttcctagttcctttagaaaacatgaaagaattcatacaggagagaaaccctatgattgtaaggaatgtgggaaagcattcatttctcttccaagctatcgaagacatatgataatgcacactggaaatggaccttataaatgcaaggaatgtgggaaagcctttgattgtcctagttcttttcaaatccatgaacgaactcacactggagagaaaccctatgaatgtaaacagtgtggtaaagccttcagttgttccagttcctttcgaatgcatgaaagaactcacactggagagaaaccccatgaatgtaaacaatgtggtaaagccttcagttgttccagttctgttcgaatacatgaaaggactcacactggagagaaaccctatgaatgtaaacagtgtggtaaagccttcagttgttccagttcctttcgaatgcatgaaagaattcacactggagagaaaccctatgaatgtaaacagtgtggtaaagcctttagtttttctagttcctttcggatgcatgaaaggactcacactggagagaaaccctatgaatgtaaacaatgtggtaaagccttcagttgttccagttcctttcgaatgcatgaaaggactcacactggggagaaaccctatgaatgtaaacagtgtggtaaggcgtttagttgttccagttccattcgaatacatgaaaggactcacactggagagaaaccttatgagtgtaaacaatgtggtaaggccttcagttgttctagttctgttcgaatgcatgaaaggactcacactggagtgaaaccctatgaatgtaaacaatgtgacaaagccttcagttgctcacgttcctttcgaatccatgaacgaactcacactggagagaaaccctatgcatgtcaacaatgtggtaaagccttcaagtgttcccgttcctttcgaatacatgaaagagttcatagtggagagtaaccctatgtatataagcaatatggcaaagttttcagttgtcctatttcctttttttttttttttttttgagttgaattctcactctgttgccctggctggagtgcagtagagtgatctcagctcactgcaacctctgtctcctgggttcaagcgattctcctgcctcagcttcctgagtagctgggacaacaggtgtgaacgaccatgcccacttaatttttgtatttttaggagagatggggtttcgccatgttggccaggctggtctcgaactcctgacctcagacgatccacctgccttggcctcccaaagtgttggattacaggtgtgagccaccacacccggcccccatttccttttgaagacatgaaattattcatatttcagagaaaccctataagacatgggaataccttcagttatttacatgtgaatatgaggaagcattcatactggacaggaaaccctgcgaatgtaggcagtgtgggaaaaccttcaatggtcatatgaccttttaaggaccatgagaaggcatatgaagtgtaaagaattttcatatgccctataaatgtaaagaatttataaccttaaaaatgtaaagaatgtggaaaaccctataaatgtaaaaaatgtagaaaaacctttatttgtcttagtttacttggaaaccatgaacaaactcacactggaaagcgacttcttaaatatagacattgtgagaaagccttcagttggcccacatactaatatgtgagaatgcagaccggatagaaatcctataaaagtgagatatagcaatgttttccattttaacaaatgctcatgtgatactcccttatgtgtgaaacttcaatctcatgttgaaactcccactagggaggtactgtataaatgtagataatatgggaaagcctgatgcaaattaattcatgtatattgttctagaaaattcacaacatgtcagaaatgtgataaaacatattatcagttactgattcttaaaatggatctctgaattatggatttctattactttcacaaaagaacactgagatgagataattctgtaagctcttatacagttgtacacaagttgaattgatagtattttttcattaaatcagtttctgaaattttgtctttccatattgaagtctgttagattcatgagtgaattgaagtgtatttataataagctagcagttttgatttttatgtattttttagttgtgctgtaatgggccatcaaaaaatgacaatttggtaatttttaggatttcctactggccttatgtggcaggtactagatatcattatatgtatttcatctttctgaccaaaagaggcttttttagaggaagacagagtaccctttttttctattttttatgctaaaaaataatcataataaatttttgagtctgcaaagtttatcatacagtatactctctcattggaattattattttcatcttctgtttgctgtttgtaattccttctggctgtgatttgaataatagactttgtattaataagagagatctgagatagaaccatataacctatagctggaaatggctgtcctggattgtgttaacatgggttatgttgtgacctatgttttctataatctaaccttttatggctccacggtataattcaccaatagcctacttgcaggagatatggaaggcagaagtgaagaaagcattagtcaggttttatagccaccatatgtggagacagatggatgcataggagcttcagggacacctgcttccaccacattgtcctgatcctttgctctgccaattgagagtattcttagaaccaccactaactgcttgactgccatattttccttccttccttccttctttctttccctttccctttcttttctttctttactttctttttccgagatggagtcttgctctgtcgcccaggctggagtgcagtggtacgatcttggctcactgcaacctctgccttctgggttcaagcaattgtcctgccccagcctcccaagtagctgggattataggtgcccaccaccaagcccagctaaatttttttgtatttttagtagagacagggtttcatcattgttggccaggctggtctcaaactcctgacctcatgatctgcccaccttggccttccaaagtgctgagattacaggcgtgagccactgtgcatggccccagctgccatattttcaaagatgtagttttccacaaattgtcttcaaaagttctactcaaagatgcactgcagtttggattttcctagaaactctaatgtgtccaccaggcaaccatttagactcttaaggttgggaatattctctgatgctctgactcacctcatctctaggttgaatttatccaaggtattatttatgtaataaacaccatgttttgttaacagt

SEQ ID NO: 31342 - DNA, 3934 bp, Homo Sapiens
ggttcgggtagtcggtgacatggcggaggccgcggcgctggtgtggattcgcggccctggcttcgggtgcaaggcggtgcggtgtgcctcgggtcggtgcaccgtccgggattttatccaccggcactgccaagatcagaatgttccagtggaaaacttctttgtgaaatgcaatggagctgtttatagtttggaacccagactttgcggtggaaaaggaggttttggatctatgctccgagcacttggtgctcagattgagaagacaaccaatcgagaagcttgtcgggatctcagtggaaggagactacgcgatgtcaatcatgaaaaagcaatggctgaatgggtaaaacaacaagccgagcgagaggctgaaaaggagcagaagcggctggagcgactgcagcggaagcttgtagaacccaagcactgcttcaccagccccgactaccagcagcagtgccatgggatggctgagcgtctggaggattccgtcctcaaaggtatgcaggctgcctccagcaagatggtttcagcagaaatcagtgagaatcggaaacggcaatggcctactaaatctcaaacagacagaggagccagtgcgggaaagaggagatgcttctggttgggcatggagggactagagactgcagaagggtccaactctgagagttcagatgatgacagtgaagaagcaccaagcacttcaggaatgggtttccatgctccaaaaattggtagcaatggtgtcgagatggcagccaaatttcccagtggttctcagagggcgagagtagtgaatacagaccatggatcaccagaacaactgcagatcccggtgactgactctgggaggcatattttagaagactcatgtgctgagctgggggagtccaaagagcacatggaaagcaggatggttacagaaacagaagagacccaggagaagaaggcagagagtaaagaacccatagaagaggagcccactggggctggactgaataaggataaagagacagaagaaaggactgatggggaaagagttgctgaggtagcacctgaagaaagggaaaacgttgccgttgccaaactgcaggaaagccagccaggaaacgcagttattgataaggaaactatagatttattggcgttcacctctgttgcagaactggagttgctgggtttggagaagctcaaatgtgaactgatggcccttggactgaaatgtgggggcactctgcaggagcgggcagcaagactcttctctgtcagaggactggcaaaggagcaaattgacccggctttatttgccaagcctttgaaagggaagaaaaaatgagtatcatcagagctgattcctatttgtttatagtgtctaccatttacaacctgcataatgtggactcttgaccagtattcctgttgacattaaaagctaactttttagtaacccaattctaactatcccctttttccttgtcagggctgtagaattaatgtctgaaaccatctgggccttaaattttctttgtctggttttctatagtgtatttaataaatatagggctattcacattttttggtttgatcttggtgtcatttaggtaatgaatctatccaagaaatctatccttttgacccaggttatcaaatttgtagacataaggttatttataatggtcccttcttacccttttaatgtctttaggagctgtgttgataatttccttttcattatgatactggtaatttctgttctcactttcctaatcaggttgggtaggggtttatcagttttactgatctgactttttattttattttattttttttgagacagtcttacactgtctcccaggctggagtgcagtggcgcgatctcggcttactgcaagctctgccttccgggttcatgccattctcctgcctcagcctccccagtagctgggactacaggctcccaccaccacgcccggctaattttttatatttttagtggagactgggtttcactgtgttagccaggatggtctcgatctctttacctcgtggtccacccgcctcagcctcccagagtgctgggattacaggcgtgagccaccgtgcctggccgacgatataacttttaaagaaccaacctttggttttatttttctcaattgtttatataattaatttctgttattttctttcttctatttagcttgagtctcctttgatcttttttctttagttccttaagataagccttaggtcattgatcttagacgttatttaaaatacatatttaaagctatacattttcttttaagcattactttagttgcgactttacaattttattatgtcgtatttttattattcagttctaattttcttttttttttctttttgagatggaatttcgcttttgttgcccaggctagagtgcaatggtacgatctcagctcactgcaacctctgcctcctgggttcaagcgattctcctgcctcagcctcctcagtagctgggattacaggctccagccaccatacctggctaatttttgtatttttagtagagatggggtttcaccacattggccaggctggtctcgaactcctgacctcaggtgatccacccactttggcctcccaaagtgctgggattacaggtgtgagccaccatgcccagcctctgattattttctaatttcctccctcagttcttctttgacccatggattatcagaagtgggttgtctgatcagcaaacatttgttttttttcctcttaatatcttcttgttgctgatttctactttaattccattgaggtcagaaaatatcctctttatgatttcaatcctcttagttttattgagactcgttttatgacccaatatgttgtctgtcatggtgagtgtaccatacacagtttaaaagaatgcgtattttaggccaggtgtggtggctcatgcctgtaatccagcatgagattacatgctgagattacagctgtaatctgtaatttgagaggctgaggtgggaggatcatttcgagaccagcctgggcaatgtatagtgagaccatgtctctaagaaaaacaatatgtaatttgaattgttgggttaatatgttttgtaatatcgatgagattaagtggttgatagtattgttcagatcttctatgtctttactgatccttttgtttatttctatcaggtgctgagaaaggatgttaaaatcttcaattatgattgtggaattgtctatttcttaaattctaccagtttttgtatgaagctctaataacttatgtcttcctaatgtattgaccattttatcattatgaaatttccctctgtctctggtaatttgggtttgaaatctactttatcttatgtgaatatagccactgcagccttcttaagcttagtgtttgcacagtatacctctttctattaatttactttgtgcttctgtgcctatttaaagtagtttctttaaacaacatatacttgagacttgcatttttatctgttctctctgtatcttttaataagtttaacattaaatgtaattattaataggtttctaatttacatgtttcctgtttagataagattattttataattgtattttaatttattggctctttagctatactgttttaataatttttttaagttggatgttctagtgattacaatatacattcttaatttttcagtctacctagagttgatgtgccacttcacataaaatgtagaaatcttgtaagtatgtacatccatttatcatacctgtcttttatgctgtagttgtcatacatattaaatctacatatttaaatattgtaagtcctgtcataagttacaatttctgctttaaataatgatatgtattttaaagaaattaagaggaaaaaataaaatcttttgtatttattc

SEQ ID NO: 31343 - DNA, 3608 bp, Homo Sapiens
agagggaggcggggcggaaaggcgagaggtgtctcctccaccggagccaggggagacccgagcaagctccgtgacagcacgtcggccgccatgtcgccgagtggggctggaaacagacccggcgcccagcggtagccctccttgcgcctccgattcccagacatggaaggtctttaatgtaactttaaatggttcaccaaaggatgctctaatggatgacagcgatactcctacatattatctgcaaatagaaccacaagatggatgtcatcctggtgacagcgtggaaaggagtgtgacctgtctgccttctgcatcagatgaaaatgaaaatcagcttgacggggacgggcatgagcatctgaccagcagtgacagtgcgatgggaaagccccaagtgtctgagcaggacagtctcaataataatgaaagctgcacattgagctgcgaggtggctgcaggtgagaactcgcaaaacaccctttgtgaagcctccagagatgaacaggccttcttgggaaaggacaaaaaaattcctggaaaaagaagtccaagaagcaaaaaagggactgctaagaagataccaccaggacttttttcaggagatattgcacctttaatgcaagaaaaagtactaagcgcagtcacatatgctgttgatgatgaagaagctgctgaagtaaatgctaatgagcagccagaggcgccaaagcttgttctgcagtctctgttttcacttatacgaggtgaagttgagcagttggattcaagagcacttcccctttgccttcatcagatagcagaatcctatttccaggaggaggactacgagaaagcaatgaaattcattcagctagaacgattgtatcatgagcaattgctcgcaaatctttctgccattcaagaacagtgggaaacaaaatggaaaactgtgcaaccacatacagttacggctctaaggaattcagaaaagggatttaatggtgaagattttgaacggcttacgaaaatttgtgcaacacatcaagatcctcttttatccaaacataagatagcagctgtggagaagtcccaggaaaggaaatgctccacgcagttactagtgtctgaagatccaaaggaaggaggagctaccaccaaagagtcagagagtaaaacttgtctcggcacagagtcaagtaaagaaagccaacatacagtggagcccctggggagcagtccctgctgtcatcagatggacgtgcaaacagattccccaagcctttcggtaactgcaggaaaggaccacatggaggagctgctctgcagcgctgaagccacgttagcgctccacacccagtcctccgagacagcagggagcccgtctgggccagactcttctgaggatgcttgtgaggatgacagtcgcttgcagctggctcaaacagaggcctgccaggatgtggccagaatagagggcattgctgaagaccctaaggtgtttctttccagcaagtcaaagacagagccgttgatttcaccaggctgtgaccgtatacctcctgcattgatttctgagggtaaatattcacaggctcagaggaaagaactccgtttgccacttcgggatgcttctgaggcgttgcccacagaccaacttgagaacaatgaattaaatgagctgcagcagcctgatcttacagacagtgatggaaaatcaccacaggcgcaggctgactcagacggttctgagaatgtgctctgtggaaataatcaaatatctgacttaggcatactgcttccagaggtgtgtatggccccagaggaaaagggagataaagacgaccaactcaacaaagaaacagaagactatttgaacagccttttagaaggatgtttaaaagatactgaagattccctttcctatgaagataaccaagacgacgactccgatctccttcaagatctctctcctgaagaagcatcctatagtctccaggagaatctgccttctgatgagagctgtctttctcttgatgatcttgccaaaaggatagagattgcagaggttgttcctactgaaggattggtctccatattaaagaagaggaatgatactgtaggagatcatcctgcccaaatgcaacacaaaccatctaagcgaagagtgagattccaagaaatagacgatagcttggatcaagatgaagttggaggtggctcctgtattttgctggtcttgctgtgcatagcaacggttttcctcagtgttggaggaactgcattatactgcactttcggtgacatggagtcacctgtttgtactgactttgcagacaacatggacttctattacactaagttacttcagggagtggcagaactgaagcactggatctacctctcctagcagcattccagacacagacatgctggcagtgagagtgaaaggcgggagactttctaaacagtttttctttcaggaattctgtagcattcccccttccctctgttaggaaccaaggacatcagaaatagcaactttaagtggcaagccggaggaactctgttagaataatccacacagtgaggcaaatatcaatctaagcattgtggatggaaggaatggtctttggagagagcatatccatctcctcctcactgcctcctaatgtcatgaggtacactgagcagaattaaacagggtagtcttaaccacactatttttagctaccttgtcaagctaatggttaaagaacacttttggtttacacttgttgggtcatagaagttgctttccgccatcacgcaataagtttgtgtgtaatcagaaggagttaccttatggtttcagtgtcattctttagttaacttgggagctgtgtaatttaggctttgcgtattatttcacttctgttctccacttatgaagtgattgtgtgtttgcgtgtgtgtgcgtgcgcatgtgcttccggcagttaacataagcaaatacccaacatcacaaagatgatctttcttcttttaacttgatgatgatgtgcaggcacaaatctttggagaaggcttaactgtggaatagatgaattctagaactcttgaccctgcaatgagaaactgtgacagatctgtgtcaattaacttgattagccagaaattaatcacaggcctagagaccaaagaaaaagctcccctgagtctcaggcaacagttttgtcacggatgcaaagcttcctgaaatcatgaatgctggactcagtttggcaaacgcttacacctattatgttctgagattctgagaaccagaatgcaaacttaagtaagatacagttcccactgtaggtgttttaatcctggtcttatatagaataaaccagtactttgctgagtgaaatcaccatatagaattcagtattaacagatcatgcattcagatgcttgaatgtgcattcttgttgtgggcttgatttagatcctattgcggggtcattacgcaaaaattcaatcataccttccatagacaaatgtctgatttttgtttaaatctgtccgttaggtggcctttccttatctgaggtgtagtggtctaacatttaggaagccttgctttgactttatcgggcagcatt

SEQ ID NO: 31344 - DNA, 3260 bp, Homo Sapiens
gtctcttagcaactaagcccccggctcctccagaagcccctcttcgcacatgcgcaaactgcggacggggaactgggctccctagccctggcgtttttggtgttgctgtcccagccagaatcgcgtctggccggtgggaagccgggaactccagccccctgtaggagaggagaaaggagcgagatcatgatacatggtgatggcttgcagagtcgtaaacaaaagaagacacatgggacttcaacaactttcatcattcgcggaaacaggaagaactttcctaggcccactaaaatcatccaaatttattatagatgaagaatgtcatgaaagtgtattaatcagttcaacagtaaggcttcttgaaagtttggatttaaccagtgcagtgggacaacttctcaatgaagcagttcaagcacaaaacaacacatatagaactggaatcagtactcttttgtttcttgttggtgcttggagcagtgcagttgaagaatgtcttcatcttggtgtccccatttccataatagtatcagtaatgtcagaaggcttaaacttttgtagtgaagaggtagtttctcttcatgtacctgttcacaatatatttgactgtatggacagcacaaaaacattttctcaacttgaaacatttagtgtaagtttgtgtccttttctacaggtcccttcagatactgatttgatagaggaattgcatggtctcaaagatgttgcctctcaaacactgaccatttccaacctttctgggagacctcttaaatcatatgaattatttaaacctcagacaaaggttgaagcagataacaacacatcacgaactctgaaaaacagcctgcttgcagatacctgctgcagacagtcaatactaatccacagtaggcattttaataggacagataatactgaaggggtaagcaaaccagatggatttcaagaacatgttacagctactcacaaaacttacagatgtaatgatttggtagagttggcagtaggcttgagtcatggagatcacagcagcatgaagttagtagaagaagcagtacagctgcaatatcagaatgcttgtgtgcaacaaggcaactgtacaaaaccatttatgtttgacatttcaagaattttcacttgctgtctaccaggcttacctgaaacttcttcttgtgtttgtccaggatatatcactgttgtgtcagtatctaataatcctgtgatcaaggaattgcagaatcagcctgtgcgaatagttctcattgagggtgacctcacagagaattaccgccacctgggatttaataagtctgcaaatattaaaacagtattagatagcatgcggcttcaagaagacagctcagaagaactgtgggcaaatcacgtgttacaggtgttaatccagttcaaggtgaaccttgtcctggtacaaggaaatgtgtccgaacgcttaattgaaaaatgtataaacagtaagcggttggtaatcggctcagtgaatggcagtgtgatgcaggcttttgcagaggctgcaggagcagtacaggtggcctacattacacaagtgaatgaagattgtgtgggcgacggggtctgcgtgaccttctggagaagcagccctttggatgttgtagataggaacaacagaatcgcaatcttattaaaaacagaaggaattaatttggttacggccgtgctcactaacccagttactgcacagatgcaaatcaaagaagataggttctggacatgtgcctatcgtttgtattatgctctaaaagaggaaaaggtcttccttggaggtggtgcagttgaatttttgtgtcttagctgtcttcatattcttgcagagcaatctctgaaaaaagaaaaccatgcctgctcagggtggctgcataatacttcctcttggctggcttcatctctggcaatatacagaccaactgtgcttaaattcctggcaaatggatggcagaaatacctttcaactctcctatataacactgccaattactcatcagaatttgaagccagcacatacattcaacatcatctgcaaaatgccacagactctggctctccttcatcttacatcttgaatgaatatagtaaactaaatagtagaatttttaattcagacatttcaaataaactggagcagattccgagagtttatgacgttgttacaccaaagattgaggcgtggcgccgagcattggatttagtattgttagtacttcagacagacagtgaaataattactggacatggacacacacagataaattcacaggaattaacgggctttctatttttgtagtgttactggctaagtctttggaaaataatttttcataatatgtcatgctaataataaatatattgatagccaagtcatggtgcctaaaatgccagctattgccaagaagaaaatagttgatgtctgtcaataactgtgcatggtctgagattttaccctacttataagctaacaagttagcctgttactgtttcgtgggatgctacagaatgcataagacacctgggtcagaaacaaaggacttatcgctcacagcaaaagctgtagccagagcttcatgttggttttattcagttcctcatttttctagttcccacaggaggaacacaaagggcccatgatgaaagcctgcacacagtgggttatgttgtaagcttgggttattaactgcttttatagtaagcaaaaaaatcctggtctttgtccaaagggagttattaccccatacttgaagatagcttagtgtaaacacaagcctaggacatggactaggtaaagacaaagtccttgcattcttgacatacccagtaagtatgcagggacactcagagcccatagtggatagtctcttccaacagtctgctcctcagcctgagatgttcttggccaaacttgaattttcacatgagtatgccactctatcagctactctgattaacctgacagtcgggttgtttagtcagtaccaaatttgttcatttggtctcatatagcaattaatgcaggctattatcagacacagcagcaggatgaagccaacctgcagtattaacctcagtcctgtcccccaaggtcttgactcaatcaactctaagttccaagggaggaccaataggtctttttattaggcagccagaatgtagtgaaggacaatttattatactttatgacccaataaagggagctttgactgacgtaaaaaaaaaaaaaaaaa

SEQ ID NO: 31345 - DNA, 8962 bp, Homo Sapiens
agtcttggggtccaaggctgagggagcgggacggaagtgagcgggtcccgccccttccccttctcgtctccgttggagtcgtctctgccgcggcttcctcggctgccagctctccggcgagccggagtcctagtgccgtaccgtcagtccccggccgcgcggagccgggatgcactgttcctgctgtgggtcctcatcatggagaccaaacgggtggagattcccggcagcgtcctggacgatctctgcagccgatttattttgcatattcccagcgaggaaagagacaatgcaatccgagtgtgttttcagattgaacttgcccattggttttacttggatttctacatgcagaacacaccaggattacctcagtgtgggataagagactttgctaaagctgtcttcagtcattgtccgtttttgctgcctcaaggtgaagatgtggaaaaagttttggatgaatggaaggaatataaaatgggagtaccaacatatggtgcaattattcttgatgagacacttgaaaatgtactactggttcaggggtacctagcaaaatcaggctggggatttccaaaaggaaaagtaaataaagaagaagctcctcatgattgtgctgctagagaggtctttgaagaaactggttttgatatcaaagactatatttgtaaggatgattacattgaacttcgaatcaatgaccagcttgctcgtttgtacatcattccaggaattccaaaagacacaaaatttaacccaaaaactagaagagaaattcggaacattgagtggttctctattgagaaattgccttgtcatagaaatgatatgacccccaaatccaaacttggtttggcacctaacaaattttttatggccattccctttatcagaccattaagggactggctttctcgaagatttggcgattcctcagacagtgacaatggattttcctcaactggtagcacgccggctaaacccactgtggaaaaattgagtcgaaccaaattccgccacagtcagcagttatttcctgacggttctcctggtgaccagtgggtaaagcacaggcaaccactgcagcaaaagccatataataatcattctgaaatgtctgaccttttaaaaggaaagaatcaaagtatgaggggaaatggcagaaaacagtatcaagattcacctaatcaaaagaaaagaacaaatgggcttcagccagcaaagcagcagaattctttgatgaagtgtgaaaagaaacttcatccacggaaacttcaggataattttgaaacagatgctgtatatgacttgcctagctccagtgaagaccagttgctagaacatgccgagggacagcccgtggcatgtaatggacattgcaagttccccttttcatccagagcctttttgagtttcaagtttgaccataatgctataatgaaaatcttggacctttgatagcagcacatgtattgtaaatgtcccaggatcagagacctgttgaatttgagtgggtgtctcctcaagccttacctttctcaggtgttttaaagaaatgcagggaggcaatgtttctgaagacattttctgtttataagagagtagaaagaaacacgagtttgcactgtaaatgcagttataaccttttatacagatttaccttttcagtgttcagtacaagtttaagttgctttctttgagggcatttattctgtgtgactgtgggttttattttgtattctggttaagaaaataatgtattgagttactgtcaagtagccaagttaatgggaatgctccatctacctgttacagtgattgcaataatagtatattggagtttttcaaagaaacttaaagtaatgcccaattattaaatgaacacaagagctgagatgtcacattcgtcagcattacaggtgatctattttggtggcattttgtacttctctctgcttctaaccactgaggctctctaatcttcctctggagttttagtgaaaggatttattgagcagcttctggaatataatgtgcatgtccaaaatgaactcagcgcttcaaaaggacaaagtctgtagcctggaggggcttgagtggatgggagctgatgctgtgattttgagctgtggttacatgcagtcagtaaacctgtgagactgctggaggaaatgtagcagacagcatggaggctgggacccagcagctactttgggtcatgtctttactgtcctgcctccaaccctttagtctcgtagacttttgttcttgtggaaatttcttctgtattccagttgtgtaaatatgtatggaaaactgatattactaggttttacgttgcatctccagtattgatctttggaaactgatgttacattaggttccaattcgcaatagtagcagagactgacatgcttttattgacctgctaagcccctggatgatggagcgagaagggaaggggtatgcagtttacccaagtccaaataaagcatttcactaggttacacgttatgtatatgtgttacataacagtaacatacataactcactcctaggaatgtattttgcttcaggatttttaaattcaaataaggatggcagtgcccattttaaggaggatttcagctataactgaggacaatcaccagggcgttaagggggctttagtgttttggctgcatctgacctcattgaaggaatttcttgggagtcgggggtgtttgagtatatgtgtgtgtgtgtaactatcatgtgggttttaaaaatccttttttacagtggtatccacaaaatacttctctgcttataaatgttattgtagaaatctttattctgtgtaggtagcctatttaattgggttccactgaacctcatgggacttttaaaagaagggctatttaaggaattcacttggtagtactttgctttagcttttaaatggcttgattttaaaggagaaattctatttattaatgaaagtgtcacccttttggtgctaagcaggagaattcacaattaaagcagtgtgtatagaattatgatattcagaatcctgcatcttttaatgtgacaaatttttgaatcctgtgacttttgctttttaatgcattatatgattgtgtttggaagcttttactgttcttttcagaaatacggctgctttgcttgggtctcttcgagccatatttatagttggtcccagcattccagacttctggtaaattgttaaaggagtgaaaatgtagtttgcctggcagatgaataattttcactcatttattgtcttctggaaaccatttaacttttactgttttttatttttttggtatgtgtttttttttttctttttaagtgcatactttggccagtcttcctggtgcctgtagagttggatttttcagctctcaatactgaagcaaaagagattatagttaccagaagtatggcctctaatggtgttgagccttttcaagaaccaacaaattatctttgtgattacagtagtttaactatggttaaatgttactgctgttgcgctgctttatttaatgcactgtggaacaaaatataagggtactgttggggtgtgattatgataacttcaggcttttagctctcctcaaagtttgaggttaaaaaaatgttaaaagatgtgagttaaagtttatgtgtgtgatgtgacttaactatgcagaaaatatttaagttggatgtacttgttttaggtacatctactatacttattctctcaaacctgggtaatagtttctcagtgttcaggttaccttgagaaaggccatgcttagcgaactggatttctcctttgagaaattttagtatggtttgaggaaatcaagtgataaaggagtatgctgaatatgcaatcatttacttctactgagtgctgcattttaagatgctagatgagaagagtagttggttttgcttcattatgttttatgtctttgagagagatacaggtcttggaattcactttttaaatgttacgttccaaccttatatgttccaaggtgcagtgcactgtgaatcttttatttttaaaaaaatttgtaggtgcttttatgtataactttaatgatttataagatgctaaatgaattgtttttgtacctaaccattgtaatccaaaagataagggtgtggtttacatgcttttcaaaaatttttgttaagaagtagcaaatgaatggtttaggatttcaaatagtgataccctcctgagacatgagcatttggagaggcctgagaacctaatagaactcatatagtgtgagtgaaatttgattaaagatgttggaaaatgaagttggatttttgtattcatgtataaaggaaagtctcccagtgctgtcaaaggaattgtggttactacttgctgttctgagctttgaatatcgttatttttctattaaatatcaattagtaagtatagctaatgaagacatataatgaaagtaattttatgctgtaagattgaattggtacttttccttattaaggctttagtaatttgtatgtaatgtcaaataaaaggaattcaaatctgagtaaataacagcctcctactataggaattagattcttctataaaagtcaccatattgtatcctatagaaaagttaaggtctgagtgcatgtgtgcattaaaaacatttcactacctattctctcatggacttctcatcctttcttttttcatctccaacagttaaatggtaaggagagcaaagttaattataaaaattagacattttgccaagttagttttcttaccacaataccctcttggctttttttttttttttttgagatggagtttcactcctgttgcccaggctggagtgcaatggtgcaatttcggctcaccgcaacctacgcctcccgggttcaagtgattctcctgcctcagcctcccaagtagctgggattacaggcatgcgccaccacgccctgctaattctgtctttttagtagagacggggtttctccatgttggtcggggtggtctctcttggctttttatctttatttttgtaccagtggaccttcctgctccctgagactgttttgattgacatcttttgtgtttctatattttccgaggcagtattttctttgtatgttaatcatagttatagtaaagtcagactcattaacttttcttcctagtaattttgacttggattattttctagcctgggggatggggttcatatgtgttgttgtaactttagattactaaacaaaacaaactgtttttttgtttgaaggtatcctttacatacctgtctgtaggtaagcaagtgttagtaaaaacaattttgtcaaacagtactcctgacagcttggtaaagtctaggtagagtttctgattttgtattatgtcctaagacttgaaagtgcatttgtctagttgccaaaagttctaaaaatgagatggtgggctttctcagcatctttttgcttcctagaattgagttgctcttgaagtctgtactcctgtgtcagaaagatggcagactgcaaatgggcagtacaggctttgccccatgctttcaaagtaggattctggattgcagtttcaaaaaaatatgatagattattgttatagaatcaaagtgtcctgaagggagaagaatagctatagttgctgggcaaagagtgtaagaaagaaactttagagcatttatcaatacttgagtgctttattatgttccaggctagaaatgtgatcattgcatggcctaagtgtagtcattcatatatatatgaatatctatatctatatctatacatatatatgtatcgccattatcgagtgttttctagccctggataaagttaatttttttgaagtttgattgccaagcaatccagtgaatctaaagtaatttttctcactttaaagaccagtgatgaggagtctggtccttcctgtactgatactgtagaactccagtcaaacttcagtgcactgctttcttacaggaagacaactcagaacacacagccataatctgctttggtgtcagtcacatcacagtggttatacatttgtcctgaatggtgattcattcctttccatctaacttccttgtgacaaatagcatttactattgaaatagtcttaaaatagggaaaagagtgaaagttactcttatgcatgggagtgggcttaaagggttgacttccaccagctgagtacaaacaagtgtaaagaaaaactatgataaagtatggaggtcttgagaattgttcataatgaaatctttaatctgggttatcagagtaatgaaatcaccaataaaaacattccatttatcttggatcttctgtggttagcagaggagtatggtctagctatgttagcagcttgaaggcacaacgtaaaaggaatgagctttcacaaggtgcttacgttagctgggtagtattggtcaaaggtactctgaagagtgaatgcagaaatcagttggctgtgtttgtaatcttgtcccacatggaccctaacctttagtagacttcagtcttttagtccagtagaagacaatggccctgaatatgtgttttctgctttttggtggaaggtttcctgcaggtggttgggtggtttttgggttattggctactgttcgttcagtgccatttgaagacctgttgtttcttaatcctttttcttggtgtgactggccaggaaaaagtccattgagtcctttttttctccctggtgtcttaccccttctgtagaataatccatattttaaaatttgtttcacatctttatagcaaacctgccacagacttgcaagcagtgattttatctttccttcctgagaaggtgatctcacttttgatgtttgggtcacctgtggacacctgtgctcttttgagtctcaaggcttatagctttcacattggcttgggaacaacagacttgtgtgtggttctagagtgaaatgggcagtgttctgctggtcctcagtctttgagaggtcttaggcaacatccttagtatagtggaatttctgaggtcaaatttaacatttaatatattctccttttagttcattgaatctgaggttctaaatctgtagcttcattttgagcacaagtctgcattgtcattttttaagagattggcaggcatatgcttttgtgatacttaggaaaagactatggatggcagcaaatgaaagtaaaggttctcaactgtgaatgaaatttagaaagataattcttcagcagttggttgattagatgggttagtgcttttggaatatataacagtagacttgtattctttatgcactatacatatgatacgcactgacagaaaagcacagaagacatactgctaagagtttctttgtgcatttcactactgttctaggggactgctgtctctttggttccttttaggtttgtgttaggatgttgcacaagtaatcatttaatgttaaatgcaagtgtccaaagaaatgagtcttaaagttctttggtcatatttcactttagagttaggacaggagacagctaacctgacttccattttacaaatattagaaactttttcttcagtaacaaaaacagggaaggacaataaaaccatgaactattttgctttatgtctgtttttaaaaaataattgttttgaagtttgcttattagcttaataccttatagtacttttaaaaaatcatccttggtaattattgacttatcctagatccatgtacaattcagacttttatctgttagctttaataaaaatttaaaaccatctcatttcagaataaaataaacggaattacagttcatgcattagcatttttaagtgaagttctcttaataagattgccttttgtctaaccgaaatagggcatacagattagtttggatgggaaagtggtaagacttgagtttttaatactgtgcctatttccaaaagaagacttgatgtggctttttacattatgctttaaagatgttaatggaggatacatagtcttaaaacaatttgtttgggagtaagttttagtcggaaaaaggtgaagatatttatgctgagttatgttaagcaaattattttgagaccttttgctggtagacaaaaactgaggaaatgtttcactaaatatattatggtcaatgaaaaaaccggactttagagtaaatgtgataaccaagtagatttgtgaactttatttctttagtaattatttttatcttatgtgaaatgattcaacctttaatttttgcctagattatagcaatgttttgttttaccttatagggcattttaatgcttggagaaagactaagtgaatctacttcaagggattctgttcatggtggtatacagttcttggtgctcttttggaaattgtcaaacatttactgatagcagaaaaggaaccccaaaacacctgtagtgttcaccttgttataagaacagaaacatttggaacaggtttcattctgtttctagatttatgttgttgtagttgaacagcaactgtttttttccctcagtgttaacgaaaggataaagactacctgtattgttgggtatgaccatcaaaggatttccggtgattcatgtttgtgaattggagtttaaatgtttgcaggattactgtacttccaaagacccactagaatgtcagctgtactctgtactctccactgagaaaatgaacaaaatcctatgtcttaacagttatgctctaactttttgaaagctttttgatgtaaataataggttagaaactaaaagccttttaatcttacaaaatacaatttgaacgatggaaggttgttcagatactggctttctgtaaaaacatcattgtgttagattgtttgtaatgtactatcaataaaattggctgcttgggcagttttagttaccaccttaaaaaaaaaaaaaaaaaaa

SEQ ID NO: 31346 - DNA, 2770 bp, Homo Sapiens
attgttcctgttctctttcttaagtcattcgaaacactgtccctgcgagttctttaagttccctgcaatctgtacacaagagaaagagggagagagagagggagagagacagagagagcagggatcaggtaaaggagtggggctgctgcagccattcagacctcaggagctggaaaattgccaaggatgcagaaggaaatgaagatgatcaaagacgaggatgtgcatttcgacttggctgtgaagaagaccccctcctttccccactgcctgcagccagtggcttctcggggaaaggctccccaaagacaccccttcccggaagctctccgagggccattttcccagtttcggtatgaacctcccccaggagacctagatgggttccccggggtcttcgaaggagcagggtctaggaaacggaagagcatgcccacaaagatgccctataaccaccctgcagaagaagtcaccctcgccctccactcagaggagaacaaaaaccacggccttcccaacctccctttgctgttcccgcagcccccgcgccccaagtatgactctcagatgatcgacctgtgcaacgtgggcttccaattctaccgcagcctggaacactttgggggcaagcccgtcaagcaggaacccattaagcccagcgccgtgtggccccagccaacgcccactccattcctgcccacgccctacccctactaccccaaagtccacccgggcctcatgttccccttcttcgtgccctcgtcctcgcccttccccttcagccggcacaccttcctgcccaagcagcccccggaacctctgctgccccggaaagccgaaccccaggagagcgaggagaccaagcagaaggtggagagggtggacgtgaacgtgcagatcgatgacagctactacgtggacgtgggcggctcgcagaagcgctggcagtgccccacctgcgagaagtcctacacctccaagtacaacctggtcacccacatcctgggccacagtgggatcaagccgcacgcgtgcacgcactgcgggaagctcttcaagcagctcagccacctgcatacccacatgctgacccaccagggcacgcggccccacaagtgccaggtgtgccacaaggccttcacccagaccagccacctgaagcgccacatgatgcagcacagcgaggtgaagccgcacaactgccgcgtgtgcggccgcggctttgcctaccccagcgagctcaaggcccacgaagccaagcacgccagtgggcgcgagaacatctgtgtggagtgcggcctcgacttccccaccttggcccagctgaagagacacctcaccacgcaccggggccccatccagtacaactgctccgagtgcgacaagaccttccagtacccgagccagttgcagaaccacatgatgaagcacaaggacatccggccctacatctgctcagagtgtggcatggagtttgtgcagccgcaccacctcaagcagcactccctcacccacaagggtgtgaaggagcataagtgtgggatttgtgggcgggagttcaccctgctggccaacatgaagcgacacgtgctgatccacaccaacatccgcgcctaccagtgtcacctctgctacaagagcttcgtgcagaagcagaccctcaaggcacacatgatcgtccactctgacgtgaagcctttcaaatgcaagctttgtgggaaggaattcaaccggatgcacaacctgatgggccacatgcacctgcactcagacagcaaacccttcaagtgcctctattgcccaagcaaattcaccctgaaggggaacctgacacgccacatgaaagtcaagcatggagtcatggagcggggccttcattcccaaggtctgggaagggggagaatcgccctggcacagacagccggtgtcctgaggagtctggagcaggaggagccctttgacctctctcagaagcgccgggccaaggtgccggtgttccagtcagacggggagagtgcccagggcagccactgccacgaggaggaagaggaggataactgctacgaggtggagccctacagccctggcctggccccccagagccagcagctctgcacacccgaggatctgtccaccaagtcggagcacgcccccgaggtgctggaggaagcctgcaaggaggagaaggaggatgcatccaagggagaatgggagaagaggagcaagggtgaccttggggcagagggcggccaggagagagactgtgccggcagagatgagtgtctcagtctcagggcttttcagagtacccggcggggcccctctttttctgattacttatacttcaagcacagagatgagagtttgaaagaattactggagaggaaaatggaaaaacaagcagtgcttttaggtatctaagtggacagttttaaaattacatttggaaaatgagaacgaggcagttcaaatatagctttctgtatgaactgtcattttctggagactggcgaatagtaccaatctctacaaatggcttagactaaatgagcagggatgtaggtaatggaaagccttctcaggtcattcacggggcccttgatacccttcacacatgtgcagggtcttcatcagtggcgttttatgcattgccagtataataaactgtgagtattcttccagatatctaattgtaagctgatgctgaggtgcttttagaaattctactttcctttgattcatatgcaatacatggtaaatttctaattgc

SEQ ID NO: 31347 - DNA, 1541 bp, Homo Sapiens
gcgtgggtccggctttcggtgactagacggtccgcaggggacatcccgtccctggggcctccccagtctccctccccctcgcgcctgggcagctctctcccagggcttcggctcgagcctgcgacctgcacggacacccccccctcaggatctaaaatgtccactgaggcacaaagagttgatgacagtccaagcactagtggaggaagttccgatggagatcaacgtgaaagtgttcagcaagaaccagaaagagaacaagttcagcccaagaaaaaggagggaaaaatatccagcaaaaccgctgctaaattgtcaactagtgctaaaagaattcagaaggaacttgcagaaatcacattggaccctcctcccaactgtagtgctggacccaaaggagacaacatttatgaatggaggtcaactatattgggacccccaggatctgtctatgaaggaggggtgttctttcttgacattaccttttcaccagactatccgtttaaaccccctaaggttaccttccgaacaagaatctatcactgtaatattaacagccaaggtgtgatctgtctggacatcttaaaggacaactggagtccggctttaactatttctaaagttctcctctccatctgctcacttcttacagattgcaaccctgctgaccctctggtgggcagcatcgccacacagtacatgaccaacagagcagagcatgaccggatggccagacagtggaccaagcggtacgccacataggggcctgctgcctgccgccccgcgggacctgtgcaagcacattcaccaagtgcatcggtagccctgcccacccctccagacctcggttcttattttcctatttttattaaatttggaaccattttgtgatggtatgttgtccatcttcccatcccagttcttcctgccccccttcctctctcccacgctctcttttatctctcattttattcccttgttgatttctgttaacttgaaagatttgggatttttttcccacctcatcatagatgggaacttttgttttcagtgcaaacaatgttggagctgtaatagtaagagctttcttacaaagctttgtattactgtgtggttttgttttttttgttgttgtttatttgattttgatttttttttcttttatgtgatctttgggaaaacacattcagaattatatctcgtttctacttaaatgtagtgcttagggttaattttttgtactgaagtctttattggtgggtgcatgctactgggaacaagtttttgtacaaaagcttcaatcagaatcactgtgcattactgagactctgtttatcactagccttctgtccctcccgcagaagactgttggattgaacaaaataatatgtattttgatttacttaaagtgcttgtaaatttcttagggacctgccacttttgactgtggatcagttgatgtacacttgtattattaaagcactcaataaatcactgtggctgataactgcgaaaaaaaaaaaaaaaaaaaaaaaaaaaaa

SEQ ID NO: 31348 - DNA, 2161 bp, Homo Sapiens
gccgcagccagcagcctgcagccgccgccgggttgtgcctcagactgtcagataaatcggcgggccgggccggcgggtcggtgagcgcggcccgggccggacatggcggcgctctacgcctgcaccaagtgccaccagcgcttccccttcgaggcgctgtctcaggggcagcagctgtgcaaggaatgtcggattgcacaccctgttgtgaagtgcacctactgcaggactgagtaccagcaggagagtaaaaccaatacaatatgcaagaaatgtgctcagaacgtgcagttgtatggaacgcccaaaccttgtcagtattgcaacataattgcagcatttattgggaataaatgccagcgctgcacaaattcagaaaagaagtatggaccaccctattcttgtgaacagtgcaagcagcagtgtgcatttgacaggaaagatgatagaaagaaggtagatgggaaattgctgtgctggctgtgcacactttcatacaaacgggtccttcagaagaccaaagagcagaggaaacacctgagtagctcttctcgtgctggccaccaggagaaggagcagtatagtcgcctgagtggtggtggccattataacagccagaaaacactttctacatcttcaattcaaaatgaaatcccaaagaaaaagtccaagtttgagtcaatcacaactaatggagacagcttctccccagacctggctctggactcaccaggcactgaccactttgtcatcattgcccaactgaaggaagaagtggctaccctgaagaagatgttgcatcaaaaggatcaaatgattttagagaaagagaagaagattacagagttgaaggctgattttcagtaccaggaatcgcagatgagagccaaaatgaaccagatggagaaaacccacaaagaagtcacagaacaactgcaggccaaaaaccgagagctcctgaagcaggcagctgctttgtccaagagcaagaagtcagagaagtcaggagctataacctctccatgacagacctcaaggaggctccctagcaacagcaaatggagttgtccagggttagggttggagacctggctgttctgtgggaattgcaagctttcttaagaaatctctattttattacagttatccttctttgtgcgattgcagtgggctgaatggaaacacctggtttgtgctgtgttagactgcatgcttgagtgtttgggatttcaagctcgctctctttctctcactattaggacttttctttttcttcttcctcttctctctattttggttctattctttttttttcttttttctttttttttttttttttttttttgtggtggtcactgctcagtgtaatgtgcagaatgatttgttttttgttttttttttttttttttggtccttcattgcatcctgccatacccatgagcaaacagtttggcattaattatatatcactgccaccctctgaactttgaaaactgccatcttcagacttggtataatggaagaggctttctctctccaataaaccttttgcttcagggtatactcttcggtttttttccagatgtattatgtatgaactttgtactatgtatagccagagttttatttattttttaaaaaagaaactttttcttgataaaggaataatggtggtctagctagttcttgtaaaagtgatgcctcttgaaaaaaaacagtcctattcactagcttttagtaaaagaatcagatcttttctttcttgttaccttggagtcttaaaaactgattgctaaggtgaaacaattcaatgcataagtatggagctaagtgccttttggaggatttcttggaagagcatttatggagatacttaagggaggtagcaaagatttgaaccgtctgtctttttaagtaagggcagaaagcaaggttgtccaggttgtactggacacttctctccccacccctttcctgattgttttatgtgattgattttaaattctcacactgccacttctttaaaaaataaaatcctttatttgcttaaaaaaaaaaaaaaaaaaaaaaaaaaaaaaaaaaaaaaaaaaaaaaaaaaaaaaaaaaaaaaaaaaaaaaaaaaaaaaaaaaaaaaaaaaaaaaaaaaaaaaaaaaaaaaaaa

SEQ ID NO: 31349 - DNA, 1476 bp, Homo Sapiens
aaaaaattcctccggggtgaactctgagatagaaagttggcccgggaagctcaaggagggagagcggcagaggggaagactctgcaattctgcttgccccccaccccggcccaggcaagccaccctgcccccggcccccacctgcccgccccgcctgcccttcctcaccccggtgcctgcgggattgctggagagaacgcggcgatggagccgggcaggacccagataaagcttgaccccaggtacacagcagatcttctggaggtgctgaagaccaattacggcatcccctccgcctgcttctctcagcctcccacagcagcccaactcctgagagccctgggccctgtggaacttgccctcactagcatcctgaccttgctggcgctgggctccattgccatcttcctggaggatgccgtctacctgtacaagaacaccctttgccccatcaagaggcggactctgctctggaagagctcggcacccacggtggtgtctgtgctgtgctgctttggtctctggatccctcgttccctggtgctggtggaaatgaccatcacctcgttttatgccgtgtgcttttacctgctgatgctggtcatggtggaaggctttggggggaaggaggcagtgctgaggacgctgagggacaccccgatgatggtccacacaggcccctgctgctgctgctgcccctgctgtccacgtctgctgctcaccaggaagaagcttcagctgctgatgttgggccctttccaatacgccttcttgaagataacgctgaccctggtgggcctgtttctcatccccgacggcatctatgacccagcagacatttctgaggggagcacagctctatggatcaacactttcctcggcgtgtccacactgctggctctctggaccctgggcatcatttcccgtcaagccaggctacacctgggtgagcagaacatgggagccaaatttgctctgttccaggttctcctcatcctgactgccctacagccctccatcttctcagtcttggccaacggtgggcagattgcttgttcgcctccctattcctctaaaaccaggtctcaagtgatgaattgccacctcctcatactggagacttttctaatgactgtgctgacacgaatgtactaccgaaggaaagaccacaaggttgggtatgaaactttctcttctccagacctggacttgaacctcaaagcctaaggtggatggcttggacaatgaaaggatgctgtactcattagaatacaagattcctttactgtccctcaaccttgaccaaatgggaagcattcccccttgtcaacacaagctggcagatacatttgactctacagatgaaggtgaacaatgttaggataaaattgctttggatcttgcctggaaggtgttttaagttttgtaataaacaagatgatgtctgaaaatgtgtaaaaaaaaaaaaaaaaaaaa

SEQ ID NO: 31350 - DNA, 3085 bp, Homo Sapiens
aagtcagcaccgacccaaacaagcaggaaacaggaaatgttcacgtttcagagaggctgcagcccggcgcagcatcctgagcgcgcctctgccgaggcgagcggacatgcaggctccccgcgcagccctagtcttcgccctggtgatcgcgctcgttcccgtcggccggggtaattatgaggaattagaaaactcaggagatacaactgtggaatctgaaagaccaaataaagtgactattccaagcacatttgctgcagtgaccatcaaagaaacattaaatgcaaatataaattctaccaactttgctccggatgaaaatcagttagagtttatactgatggtgttaatcccattgattttattggtcctcttacttttatccgtggtattccttgcaacatactataaaagaaaaagaactaaacaagaaccttctagccaaggatctcagagtgctttacagacatatgaactgggaagtgaaaacgtgaaagtccctatttttgaggaagatacaccctctgttatggaaattgaaatggaagagcttgataaatggatgaacagcatgaatagaaatgccgactttgaatgtttacctaccttgaaggaagagaaggaatcaaatcacaacccaagtgacagtgaatcctaaacctgaatggcgctcatgttttccaagagaagcagcccctgagggagtctgctgaggctgccaacagaggatgaagaggatacaaatttaattaatttcaaatcaacatagacacaagaaccttttgctgtttcttccaacgcccactcttcctaatgatggcatcacttgcacttggaagaatgtgcaattgagaagtactaggaaaaggcctggctgccatccatcgctgcctctgagggtggagaaggaggcgggtgatgtgctcacttctgatcaacatgtgttgcctcctctcagccaacttctagctcactgcactcactctggtcatgataaatgttcgtcacctttctgcttcattccttagggcctaaatcaggaagctgttttatcgatggtttccttttgggtcagtaaccagctttggataatttcctctgattattcaagtcgtgggacaggtaaactacattcagcaggaacttttctcgaggagtgttatgtcatggaaaagacaccaaacacagcaagtattttaatgaatacaccatcccagggggtcagtaagctctgcctgccaagaagacacagtgagaggggtccacagtcctgatgaggtggcgtttggtaacttgtagaccctagcatggccaggtctggtcacccttaagaacttctcagagaaactaggaatcttcagtgaaagaactaatgttctcctcagctgaaattcccttgcttgtcagcatttctgcaaagctcacacttgtttcaccatacctcccttggatgtgacatgtaggtaggaagtatgtgcaggtgggagtcatctgtcagccttctatgtttcagagatcctgaaggtggtttgaaacaaacagaagaggagcaggaaatatccgtgcctgtggcagatctcactcatcatgcttagcattctctcccgccaagctgggataagcctcatgtcctaacacagcacaacaggaggtctctgtcagtccatcagagatgacattctatgtgatatttttgacatccttgtgctaaaagcaatggcacaaaatggaaaagggcctattgaccacacctactccagtaaaattgttcttcatttattccttaattttctaaatctgacccctttaaagcaatctagcaaattgagaatcctcagctctccttggatacctgatattttatttcaagaaagagacaaagaaggaaaattttatttattttactacccacatataaaccgaagggagatgggactacccaaacatttgctgctcaattttgtgtcttgtgcttgaaagtctgccctaatgcataacaaaaactacttgtctcctaccttttgggatccctttaacaagtatttgccttctgaactacgtggataatttcaaaggcagagttccagaccagagaggtctttccatacaatgaaagctataactagctggttgtgtttaaccactgctatcacgctatcctgggactgcatagaactttgacaaaagacagacttcatggtacacaacttcaacagattttctgtcatattctcaccagcacatctgaatgaggctttgtgttttccttgctctcttgcatgttccttttcaactcatggcccacagtgactctcagagatttatgccaaaattgcatacaattgttttctgaatcataacttgtctatttttctgcctatgtgtgctactttcagtttgtttctcatcaacattttgactctcagaagagcctccatttgcccctttctctctttaggtatctaagatctttgaacacctggacctttacatttgatccaaccctatcaaataatgaacttctcagagaggcatctggggtcctggaacttcatgttgatgaagtcatattatataatatgataaaaatattctcatgcagtattttaaataatttcaaattctagaagaagcaaatttcagcgacatgtcattgagtttttatttggtaaagctataattgtgcagtgtacaaagcactttttaaaaagatagtttattctgtcagggtatatgaagttagtatacagccagaacagccaagcctcaattcttgtaccttgtgtctttttattactgtttaatcaatagatatcatatgtttatgacagtttcaagaattgtttttaaacccaaacttaattttatgtttcagactattgttagaaaaacaaaacaaaaaacaaaaaaaccctcactaatttgccctaattggatagggcaatcaggacaaaatctgactttcgaatatttaaaagatatgtaagtttgattgcattttcgtacattttaagcaaactaggttaacaacaacatagcctagtcaaacttctcaggaaacttgttttaataaatatgtaaaaat

SEQ ID NO: 31351 - DNA, 2225 bp, Homo Sapiens
accaaagaaaaaagacacctgtgcctggcaggtcgatacgctactaatttgcccgaggtacgaacgaaacagaagatgctgatttctggataaaacgttctgcagtgccaggctgcagtgtgttctactgaatgcatgtaccataatttacttaattatctgggctgattctgaatttctattatgaacaaagccacaggttccttggatatcacccagagtattgaagacgacccacttctggatgcccagcttctcccacaccactcattacaagctcactttagaccccgattccatcctcttcctacagtcatcatagtgaatcttctgtggtttattcatctcgtgtttgttgttttagcatttttaacaggtgtgctttgttcttatcctaatccaaatgaggacaagtgcccaggaaattacacaaacccattgaaagttcagacggttataatccttgggaaagttattttgtggattctccatttactccttgaatgctacatccagtatcaccacagcaaaatcagaaaccgaggctataacttgatctaccgatcaacaaggcatctcaagagacttgcgttgatgatacagtcctctggcaacacagtgcttctcctcatactgtgcatgcagcactccttcccagagcctggcagattgtatcttgacctcattctggccatcttggcactggaactcatctgttccctgatatgtctcctcatttgcacagtgaaaatccggagatttaataaagctaaaccagagcctgatatacttgaagaagaaaaaatctatgcttaccccagcaatattacctcggagactggattcagaactatttcaagcctagaagaaattgttgaaaagcaaggagacaccattgaatacctgaagcgacacaatgcgctgctgagtaagcgattgttggctctcacttcctcagacctgggctgtcagccaagtagaacgtgagaggctcacggtcatgacagcaattgcagaggaacccagagtaattgagactgactgaccacctgacaagctgccacggggaactgcagcttttgctgaatagcattttacagtgtttgttggaaacctgaatttggttctgacttctgtggctgtttaaaatatagggcttgtgggtcacttgaaaagtacctgtagaagcccggataacttgaggggaatgtctgtttgtacttttggaaattatttaactgcttggtttatcctaggatcagaggctaaacaactccatagtcaacacttttccacctgacattagaaccctgtaatgatttcattatggataggggaagtctaacaagacaatcgattttaaacagggttttaatcaaataagttcttcccacttttaagctgatgaaagaagtcattatttcttgtgaatattttttcctggagagccttatcatgtattttatatgcttatgtggtgttggatgacatcatggaccatatagcttttatagagaatttttctcaccataggactgaggtctcaccaggtgatctactatgcaaattcctacagttttctattcttaagaaataagggccgggcacggcggatcatgaggtcaggaaattgagaccatcctggctaacacggtgaaaccctgtctctactaaaaatacaaaaaaaattagccgagcatggtggcgggcacctgtagtcccagccacctgggaggctgaggcaggagaatggtgtggacccaggaggcagagcttgcagtgagccgagatcacgccactgcactccagcctgggcgacagagcgagactccgtctcaaaaaaacaaaaaagaaaaagaaaagaaataagatatgatgattgattacttggaccagtgttagaccgacctgtgttagacgaacctgtgttgcctattatattggcagcaccttccattagcaatagctgaaaaattcagagaagaatttagaactttcactttatttttgccattcttcaagaagttgctgtatatttcagtctggttataccttcaattgatcaataacttcaattataggaaaggcatcttctataattttaaattactgtaaaaaaaagataccttttaaagccttggattatacttaaaaattgtaatggaagaaatgcatattaagttatatgcagatattaaacatatctgattctgaagataaaactg

SEQ ID NO: 31352 - DNA, 2579 bp, Homo Sapiens; identical to SEQ ID NO: 26195

SEQ ID NO: 31353 - DNA, 1977 bp, Homo Sapiens
gtcctccgcgccttccgtcggtcggtccttccttcctgcttcgcctccgcgcctcgcgctatgggacagagcccccgatccgccagcaccacctgaggatccagaaaccgccccagcgatggaagaggatcaggagctggagaggaaagcaatagaagaactgcttaaggaggcaaaacgtgggaaaactagagctgaaacaatgggacccatgggttggatgaagtgtcctcttgctagcaccaataaaagatttctaattaacacaattaaaaacacattgccctctcataaagagcaagaccatgaacaaaaagagggcgataaggaaccagcgaagagccaggcccagaaagaagaaaacccgaagaaacacagaagccatccttacaagcacagcttccgcgctcgaggttccgccagttactccccgccacgaaagcggagcagccaggacaagtacgaaaagcggtccaaccggcggtgaggctggaaccagggccagccagccctgcgggcctccgtgctccttcggggtgcggtgtgcggagaaggcctgagctggcagggcaaacacctgagagtgactttgacattaggtcctttgttgtttttaaagaggctgctggccacaggcaaaaaaaatgacctagcaactcttgaggaaacaagtgcaaaggaggatgtcttggcaagtttaagctacttctgcagtgtagtagacttacatattgttgtttatcttgtttggaagtgtgtttcaaaataaacatgtctagaatttaaagttttcagagattgttaaaactggttccaattttttggtcatttctcagaaaaataaaatacttataaatcctatattttactttttgggggtattacatttaaaatttagaaatcatcagtccagtgaccatatttatgaaaagctgtagccctccaaggtctgggaatttatcgagaagctctttgatagctctgcatttgttttcccttaggtgaacaatgtaggaaatcctcaaagtggctttgaatttaatgctccacttcagttaccagaggttaaaaatgggttttgttgtttcctgtgcattctcaaactcatttattagatagaacaatctttctatatttaatttttttaatatataggtcttaagtggtgctttaaaaagaaccctcacaagttaaaaattaagagttgtttcagtgctagatcttgccagctaaagacttgtgataccactatatagtatagttgttccagaaatcttcattttaaatagaagtgtttacaatgccttttttcccccagtattggttttcaatacctgttttcatatacaattacaaacctttcaaacctgtattccttctttatactcaggaaaatgtcaccaagcaccctcctccccagttcacaaaaggaagaagatgaagattctgtctccctgttccccctccccagttttccaaagtgtctgagcatatgcctggctgtcctcagatcatcaccatgccacatccctgctccctacttcctggcagccaagaaaagccctttctacatgctagaaggaaatacatccaaaaagttagcattggagtgttagaaactagaatagacctctccgccaccgagctgctgtgtcacgccctcagcctgctagggagtgacaagcccaagtcattcttgatccaccccttctcccaccccagatcccagggactcatcctgtgactttgtaaccacactcattcctttcaaacacagaggaggaattattgcttcatctgactttattcaaatctagttatgtattggcctaaattatttgtgcaaaatttgaaatgttttttatttaaatattagaaatagcacaaagtcatggagtttttaaaaattgttataattaagtaaaaataaagctgaattgtgtcaaaaaaaaaaaaaaaaaaaaaaaaaaaaaaaaa

SEQ ID NO: 31354 - DNA, 2560 bp, Homo Sapiens
atccaggctagtcttgaactcctgacctcaagtgatccgtccgcctgggcctcccaaagtgctgggattacaggcgtgagccaccgcgcccggccaggttgtgggttttaatgggaccatctcactgcctaccgtttcctttttccgtccgaacagaaggggcctgagcagtgaactgacagtggcaacgccgggtgaggcgggatggaggagtttacgagcctgggtgacgccctgttccgcgtcctggccccgcccctcccggcagagccccttggcgcgtgacacaggccccgcccttgctgtacgccatcagccggcgccgcgccgccgggtgttactttgccccgccggcggggcggtcagcctcctgtcaccgcctgttccggctatggtcccgtccggtgttctgtaagttggcaacctaggctcctgacgcgaccctggtcctgatggcggcggcgacggccgcggcagccctggcggcggccgatccccctcccgcaatgccgcaggcggcaggggccggagggcccacaacccgcagagacttctactggctgcgctcctttctggccggaggtattgctggatgctgtgccaaaacaacagttgctccattggatcgagtaaaggttttattacaagctcacaatcaccattacaagcatttaggagtattttctgcattgcgtgctgttcctcaaaaagaaggattccttggattgtataaaggaaatggtgcaatgatgattcgaatctttccctatggtgcaatccagtttatggcatttgagcattataaaacgttaattactacgaagctgggaatttcaggtcatgtgcacagattaatggctggatccatggcaggtatgacagcagttatctgtacttaccctcttgacatggttagggtccgcctagcattccaggtgaaaggggaacacagctatacaggaattattcatgctttcaaaacaatttatgcaaaggaaggtggtttctttggattttacagaggtctgatgcctactattttaggaatggctccatatgcaggtgtttcattttttacttttggtaccttgaagagtgttgggctttcccatgctcctacccttcttggcagaccttcatcagacaatcctaatgtcttagttttgaaaactcatgtaaacttactttgtggtggtgttgctggagcaatagcgcagacaatatcctacccatttgatgtgactcgtcggcgaatgcaattaggaactgttctgccggaatttgaaaagtgccttaccatgcgggatactatgaagtatgtctatggacaccatggaattcgaaaaggactctatcgtggtttatctcttaattacattcgctgtattccctctcaagcagtggcttttacaacatacgaacttatgaagcagttttttcacctcaactaaaaaaaaattatggttggtttttcttaatacattctcagagggagaaatgaaacattactataattgtggggggaacattacttgaatggggatatttaccctgtcacaagagccactggtattttagtacttgattattttttctttagtcacaaatcagaactgcttaccatactttttgatgccaaacattataccttagaacattgaagaaaatattcctaagctgatgctggctaaaccgctttaaagttttatttggaagtagaactagctttaaaacggggttcaagaggttgccattagctttgtcatgctgttcaaagtttttaattgttatcatggtttttaaaagactgacagtgtttattattattaaaataaacagggttggttatattgcaatagaataatgagaattgaatttttaagttctatgaaacagccagcattgacattttatttttgttatctctcttctcacaattatgctccactggataataggaaaaacacttctttccttcattttttaaataaaattaatgttgtatttaaaaggtagccatgtagagacacaaaaataaatgaagaagctggacatggtgggatgggcatgtggtcccagctactctggaagctgaggtgagaggatcacttgagccctggaattccatgccagcctatgcaacatcatgaaaccccacttaataaatgaatgaacgactaagtcttgctcaaatgttattatgaggtactatgagtgacttacatgtgttttaaaatgtcagtgtgtttcccagaggcagaaataaaaatactgaatatctttgctcttaaaaaaaaagtaacactatagatttgtttttgttagatgatttgctctatagtagaatatttaagtagactgtgaaatatttattaatatagatgtgaatatcaaaaaatgtttctaaggtattatgatgcatcaactagttcttccatgtaaaataattttagtgcaatatgaagacgtagaaatgtaaaatatgatttgaattgttatcctttatattaagaaaatgttttaaaatgtaagaattccatttaaaaaaaaaaaaaaaaaa

SEQ ID NO: 31355 - DNA, 2560 bp, Homo Sapiens; identical to SEQ ID NO: 31354

SEQ ID NO: 31356 - DNA, 1557 bp, Homo Sapiens
atcgccttgaagttacgcttgaaggaggaaaactcatcaattttcggggaatcccggctttggcagcgtgctgctcatggttcgccgcggccacgtgggcatcttcttcatcgagggcggcgtccccttctggggaggagcctgcttcatcatctccggatccctctcagtggcagccgagaagaaccacaccagttgcctggtgaggagcagcctgggcaccaacatcctcagcgtcatggcggcctttgctgggacagccattctgctcatggattttggtgttaccaaccgggatgtggacaggggctatctggccgtgcttactatcttcactgtcctggagttcttcacagcggtcattgccatgcacttcgggtgccaagccatccatgcccaggccagtgcacctgtgatcttcctgccaaacgccttcagcgcagacttcaacatccccagcccggcagcctctgcgccccctgcctatgacaatgtggcatatgcccaaggagtcgtctgagtagcagatgtggcacctgcgggtggagtccagccttttccctctgggcccagcctctccccacccccaccttgttcatcaggggccagccccatcccagctgccctccctcaccacatctacacatactccggcatctgagtgaagtgtccccagggacatctctcccacactttccccagtgctttctttctaaaagacaccgggctgacgtcaggggtgtgtgtccttcagctccctgagccctgtcacccttccaggacacccaccttgtgcatctaagcatttctctgctcattggggaaatcctggcctcattggagactcaggttcgaggcctgccctgaccctcgggcctcgggaaggtcagagagcccggaatcctccagaatggaagagtctgactctggcattccacagaggtgccgataccaggccaaggcctcacagcagggtagtggcctggccgcaggtctcctggccccaagatcagctctgtcctttgtcatctgttgccacatccatggaactcaggtttcctatttggaaactagagtgttgaaccagataaggttcatcaggcccttccagctccccaggctccctgaagtcctgggtctaggccaggcattgtccccctgcttcctggaaaccctcattttccttgtctgtaatatgaagtcagcattggccccgccccccaccccctaccatctcccaatggaggggaggttgcaggggagagctgccgccagcccactcctgaggcaccaccacagtcagcatcgacaggggcacagcagtggcagtttgggacctccctgtgcctctcagcactcccttccccacccccatagcccaaggacaaggctaccacagaaggttaccacaggacctgggcttcgtctccaggggacaaggagacactgtcagcctggtgttcaccaggcctggtagatgagatggcttgtctcatccacaccacagaaggaaataaaccatgtggcttaaattttaaaaaaaaaaaaaaaaaaaaa

SEQ ID NO: 31357 - DNA, 3292 bp, Homo Sapiens
agccgagcccagcccgggggacccgccgccgccggtcatgtgggccggactgctccttcgggccgcctgtgtcgcgctcctgctgccgggggcaccagcccgaggctacaccgggaggaagccgcccgggcacttcgcggccgagagacgccgactgggcccccacgtctgcctctctgggtttgggagtggctgctgccctggctgggcgccctctatgggtggtgggcactgcaccctgcccctctgctccttcggctgtgggagtggcatctgcatcgctcccaatgtctgctcctgccaggatggagagcaaggggccacctgcccagaaacccatggaccatgtggggagtacggctgtgaccttacctgcaaccatggaggctgtcaggaggtggcccgagtgtgccccgtgggcttctcgatgacggaggcagctgttggcatcaggtgtacagacattgacgaatgtgtaacctcctcctgcgagggccactgtgtgaacacagaaggtgggtttgtgtgcgagtgtgggccgggcatgcagctgtctgccgaccgccacagctgccaagacactgacgaatgcctagggactccctgtcagcagagatgtaaaaacagcattggcagctacaagtgttcctgtcgaactggcttccaccttcatggcaaccggcactcctgtgtagatgtaaacgagtgtcggaggccattggagaggcgagtctgtcaccattcctgccacaacaccgtgggcagcttcctatgcacatgccgacctggcttcaggctccgagctgaccgcgtgtcctgtgaagctttcccgaaagccgtgctggccccatctgccatcctgcaaccccggcaacacccgtccaagatgcttctgttgcttcctgaggccggccggcctgccctgtccccaggacatagccctccttctggggctccagggcccccagccggagtcaggaccacccgcctgccatctcccaccccacgactacccacatcctccccttctgcccctgtgtggctgctgtccaccctgctggccaccccagtgcctactgcctccctgctggggaacctcagacccccctcactccttcagggggaggtgatggggaccccttcctcacccaggggccctgagtccccccgactggcagcagggccctctccctgctggcacctgggagccatgcatgaatcaaggagtcgctggacagagcctgggtgttcccagtgctggtgcgaggacgggaaggtgacctgtgaaaaggtgaggtgtgaagctgcttgttcccacccaattccctccagagatggtgggtgctgcccatcgtgcacaggctgttttcacagtggtgtcgtccgagctgaaggggatgtgttttcacctcccaatgagaactgcaccgtctgtgtctgtctggctggaaacgtgtcctgcatctctcctgagtgtccttctggcccctgtcagacccccccacagacggattgctgtacttgtgttccagtgagatgctatttccacggccggtggtacgcagacggggctgtgttcagtgggggtggtgacgagtgtaccacctgtgtttgccagaatggggaggtggagtgctccttcatgccctgccctgagctggcctgcccccgagaagagtggcggctgggccctgggcagtgttgcttcacctgccaggagcccacaccctcgacaggctgctctcttgacgacaacggggttgagtttccgattggacagatctggtcgcctggtgacccctgtgagttatgcatctgccaggcagatggctcggtgagctgcaagaggacagactgtgtggactcctgccctcacccgatccggatccctggacagtgctgcccagactgttcagcaggctgcacctacacaggcagaatcttctataacaacgagaccttcccgtctgtgctggacccatgtctgagctgcatctgcctgctgggctcagtggcctgttcccccgtggactgccccatcacctgtacctaccctttccaccctgacggggagtgctgccccgtgtgccgagactgcaactacgagggaaggaaggtggcgaatggccaggtgttcaccttggatgatgaaccctgcacccggtgcacgtgccagctgggagaggtgagctgtgagaaggttccctgccagcgggcctgtgccgaccctgccctgcttcctggggactgctgctcttcctgtccagattccctgtctcctctggaagaaaagcaggggctctcccctcacggaaatgtggcattcagcaaagctggtcggagcctgcatggagacactgaggcccctgtcaactgtagctcctgtcctgggcccccgacagcatcaccctcgaggccggtgcttcatctcctccagctccttttaagaacgaacttgatgaaaacacagactttacctacaagcccggcaggagctcatggtccacactcactcgctttggggctgacagccactttcccaggggagcctggggcctcccctcgactctcaccagggccttcgacccctccaggagcccccactctacctctagcttccccaggggctcctcagccacctcctgtgactccagagcgctcgttctcagcctctggggcccagatagtgtccaggtggcctcctctgcctggcaccctcctgacggaagcttcagcactttccatgatggaccccagcccctcgaagacccccatcaccctcctcgggcctcgcgtgctttctcccaccacctctagactctccacagcccttgcagccaccacccaccctggcccccagcagcccccagtgggggcttctcggggggaagagtccaccatgtaaggaggtcactgtgtccgggagactctggagagaggacctctgccagtggcccagggtgtgtgcagggcagctccaaggatgaacctggtggggatgcctgggctccctcctgcaggggccctggtgaggatggaagacccccaaggctggatgtaaccttgttcccaagaagtgtttggaatgtgctgtaagaatggaggaagtcgtttccactgtcagcatcctccctggaccgcgtggctggctcatcttttgagaagggttgggactgccaagttctcctggaggaagagttgcgtccggctgggattccactcactgggactgtaccgccaggtgtcatgcgtctctctgaggtttcctgattaaaggttgtctcggtttccc

SEQ ID NO: 31358 - DNA, 2428 bp, Homo Sapiens
gttacttcatagcattctgaagacctgtccaccaattacagggctccttactggaaaaaccaactgctggggagtgccaagagaccctagcaacaccctgcagcgtttgaaatctgaggggaaaagactgtagtcagcccttagtggatgagagcgcctatgctccagaaacagcaggctcccaggatggacaccccgccccctgaagaacgcttagagaagcaaaatgaaaaactgaacaaccaggaagaggagacggagtttaaggaactggacggtctgagggaagccttggcaaacctccggggactgtcagaggaggagaggagcgagaaggctatgcttcgctcccgcattgaagagcagtcccagctcatctgcatcctgaagcggaggtcagatgaggccctggagcgctgccagatcctagagctgctcaatgcagagctggaggagaagatgatgcaggaggctgagaagctcaaggcccagggtgagtacagtcggaaactagaggaacgctttatgaccctagcagccaaccacgagttgatgctccgcttcaaggatgaatacaagagtgagaacatcaagctgagggaggagaatgagaagctgaggctggagaatagcagcctcttcagccaggctctgaaggatgaggaggcgaaagtattacagctcacagtccggtgtgaggccctcactggggagctagaaacgctgaaggagaggtgtgctcaggatgcctgccaggcacaggcgcgcgagaaggagctgctggagctacagagccagcaggcctgcacccacaccaaggagacagaacagctgcgcagccagctgcagaccctcaagcagcagcaccagcaggctgtggagcagatagctaaggcagaggagacacacagcagcctgagccaggagctgcaggccaggctgcagaccgtcactagagagaaagaggagttgctgcagctgtccattgaaaggggcaaagtgcttcagaacaaacaggcagagatctgccagcttgaggaaaagttggagatagcaaatgaagacaggaagcatgcgctggagcggtttgagcaagaggcagtggctgtggacagcaacttgagagtcagggagcttcagcgcaaagtagatgggatccagaaggcctacgatgaactcaggctgcagtctgaagccttcaaaaagcacagcttggatcttttaagcaaggagagagaactcaatggcaaactccgccatctctctccatagggaagtttctgcttcctctggcctgcaattcagaattcaaatatttgcgtcttagcattatggcaagagtaaagatgatatcccatttattatactttcaagcacaaaaggcaactcaaagaaaagctactttactatgatattgttgttattattgtaaagccattattaattttcatttctacacctagaatacacaagatttgccagatttccttctgtgccttagaaatcttaaatttactagtagtatcttctcctacccataagttattaattctcaacctcagatatcttcatttatgttaggattttaaattagcagcttctatgatttaagtcaatctaagtgcagtgagatgtgccattgtgaaaaataattagcacaattacccactgtagatagttaggcttatagtctcccatagttgagattgtaagcaaacatgtatcagcataatagcatgaatgctttgcagaaaaaaaaaagtgtctgactttattttattttgcgctagcttggaaaatgattgagatcaagttctttaacaaagaaggtcaattttattctgtatgagcaatatgattcaaataagttatacaaaacaacttttattttttctgcaagcttagataatattccattttttggttttctctttaaaaagaggatttagatgtgcaataatgcaaatatcagtagcttaatttaatattgcacgatatgctaatagacaattagacaatttggggtaacaaatcatagcagacgtgatctatagagtaactcagaaattgttttgtttctattagcatattttttgtaattaagattttccttttttaaaaaaatctaagctgaacgtgtgtatgtatgcttgcagcatttttgtagtaatacctacattttgtaagaatagttataaaaacatgatatatatatatgtaaagttcttaaaaaagttctcaaaggtagttatattttcttatcttcctgtaattaggtattgatatataaacattattatgaatacctctcaaaatagattgtaatgtaatatttttctcacccattttgctgaaggctaccaagttacataatgaatttacttaaaaaatatgacttggtgcctttttagtaaaaccatttccaagc

SEQ ID NO: 31359 - DNA, 2182 bp, Homo Sapiens
gccgggaggaggaccggaccccgagcggctgggagcgcacgcgagcgggccgtggccgcgcgggcagcgccctgagcctgtcccgcgcccgcgggcccggccgagcaggagcagctcccggggatgcccgggcggctcggagcgcgggcagcggcagccgtgcggtgagggcggtggcgcccgcgggacctgcgactgccaggaactcctgccaccgccaccggctcccatggcccacatacccagtgggggtgccccagcagcgggggcagcccccatgggcccccagtattgcgtgtgcaaggtggagctgtcagtgagtggccagaacctactggaccgggatgttacctccaagtccgaccccttctgtgtcctctttacagagaacaatggcagatggatcgagtacgacaggacagaaaccgcgatcaacaacctcaaccccgccttctccaagaagttcgtgcttgactaccacttcgaggaggtacagaagctcaagttcgcgctctttgaccaggacaagtccagtatgcggctggacgagcatgacttcctgggccagttctcctgcagcctgggcacgatcgtctccagcaagaagatcactaggcctctgctgctgctgaatgacaagcctgcggggaagggcttgattacgatcgctgcccaggagctgtccgacaaccgcgtcatcacactaagcctggcgggcaggaggctggacaagaaggacctctttgggaagtcagacccctttctggagttttataagccaggagacgatggcaagtggatgctggtccacaggactgaggtgatcaagtacacactggaccctgtgtggaagccattcacagtgcccttggtgtccctgtgtgatggggacatggagaagcccatccaggtcatgtgctacgactatgacaatgacgggggccatgacttcatcggcgagttccagacctcagtgtcacagatgtgtgaggctcgagacagcgtcccgctggagttcgagtgcatcaaccccaagaagcagaggaagaagaagaactataaaaactcgggcatcatcatcctgcgatcctgcaagataaaccgagactactccttccttgactacatcctgggaggctgccagctcatgttcaccgttggaatagactttacagcctccaacgggaatcccctcgacccttcctctttgcactatatcaaccctatgggcaccaacgaatatctgtcggccatctgggctgttgggcagatcattcaggactacgacagtgataagatgtttccagctctgggattcggggcccagttacccccagactggaaggtctcccatgagtttgccatcaacttcaaccccaccaaccccttctgctcaggtgtggatggtattgcccaggcgtactcagcttgcctgccccacatccgcttctacggtcctaccaatttctcccccatcgtcaaccacgtggcccggtttgcggcccaggccacacaacagcggacggccacgcagtacttcatcctcctcatcatcacggacggggtcatcagtgacatggaggagacacggcatgccgtggtgcaggcttccaagctgcccatgtccatcatcatcgtgggcgtgggcaatgcggacttcgctgccatggagttcctggatggggacagccgcatgctgcgctcccacacgggggaggaggcagcccgcgatattgtgcagttcgttccctttcgagagttccgcaacgcagcaaaagagaccttggccaaagctgtgctggcggagctgccccaacaagttgtgcagtatttcaagcataaaaacctgccccccaccaactcggagcccgcctgagctccagtgcccagcagcagcatgtcagctgagcctcctgccctcccccaggaacatgcacgctcactctgcttccttgtgggtggcctttttttaccgatccccttttttattttttacaaccggacctccacccccaacttcctccagcccagctgggcttcctttgttggagtcaactgttgatgcttccaggccaaactggcttcctctcctcctctccccacctttgccattcttaagtattgaatgtactttgtataattttagtggaattgttattgagaataaaatttttacaatcat

SEQ ID NO: 31360 - DNA, 6999 bp, Homo Sapiens
cctcagcgctgggcggccgctcacctcgggccggggggcgccgcgcctcccgcggagtggccgcgcccgctcggagccgtcccgcctgtcctgcccgcccgtccgtccggcgcggcgctcggggtggcggctgctcggcatggcccggggcgcccggccctcggcggccggtggcggcggcggcggcgcggagccccctgagcgcgcgggccccgggcggccgcggggatccccgcccggccgcgcccgcccctcgctggcgccgcgccccggcccggagccctcgcgaccccgggcggcgcccgagacccccggcggggacacggcgggcgcggggcggtgcggcgggcggcgggcggcaaagttggggccgggccgccgcggctggtgggcgctgctggcgctgcagctgcacttgctccgggcgctggcgcaagatgatgttgctccatattttaaaacggagccaggcctaccacagatccacctggaagggaaccgccttgttctcacctgccttgccgaagggagctggcctttggagttcaagtggatgcgcgatgacagtgagctcaccacctacagcagcgaatataagtacattattccatctttgcagaagctcgatgctgggttttaccgctgcgtggtgcgaaacagaatgggagcactcctgcaaagaaaatcagaagttcaagtcgcatatatgggaagtttcatggatacggaccagaggaaaacagtttctcaaggacgtgcagcgattctaaacctgctgcccatcaccagctaccccagacctcaagtgacttggtttagagaagggcacaagattattccaagcaacagaatagccatcacattggagaatcagctggtgatcctcgccaccacaaccagtgatgccggggcatactacgtgcaggccgtgaatgagaaaaatggagaaaacaagacaagcccattcattcatttgagcatagcaagagatgttggcacacctgaaaccatggccccaaccattgtggttcccccgggcaacagaagtgtggtggctggatccagtgagaccaccttggaatgtatagccagtgccaggcctgtggaggacctgagtgtgacctggaagaggaatggagtgagaatcaccagtggcctccacagctttggaagacacctcaccatcagcaacccgacgtccgcggacaccgggccatacgtctgcgaggcggcgctgccggggagcgcttttgaaccggccagggcgacggcctttcttttcatcatagagccaccatattttactgctgagcccgagagtcggatttcagctgaagtagaagaaactgtggacatcggatgtcaagccatgggggtcccccttcccaccctccagtggtacaaggatgccatctccatcagcaggctccagaatcctcgatacaaagtgctcgccagcggaggcctgcgcatccagaagctgcgtccagaggactccggaatcttccagtgcttcgccagcaatgaaggaggggagatccagacccacacctacctggatgtaaccaatatcgctccagtgttcacccagcggccagtggacaccacagttactgacgggatgacagccattctaaggtgtgaggtgtccggggctcccaaacccgccatcacctggaaaagagaaaaccacattctggccagtggctctgtccggattcctaggttcatgcttcttgaatcggggggtctacagatcgcgcccgtcttcatccaggatgccggcaactacacctgctatgcggccaacacagagggctccctgaatgcatcggccacgctcactgtgtggaatcggacgtccatcgtccaccctcctgaggaccacgtggtgattaaggggaccacggccacgctgcactgtggtgccacacatgacccccgggtttcactccgctacgtttggaagaaggacaacgtggccctgactccatcgagcacgtctaggatcgtggtggagaaggacgggtcccttctcatcagccagacgtggtcaggcgacatcggtgactacagctgcgagattgtttctgaaggagggaatgactccaggatggcccggctggaagtgattgaactgcctcattcacctcagaacctcctggtcagccctaattcttcccacagccacgccgtggtgctctcttgggtccggccctttgatggaaacagtcctattctttattacatcgtggagctgtctgaaaacagctctccatggaaggtgcatctgtcaaacgttggccctgagatgacaggcgtcaccgtgagtggcctgactccggctcgtacctatcaattccgggtgtgcgcggtgaatgaagtgggcaggggccagtacagcgccgagacaagcaggttgatgctacctgaagaaccacccagtgctcccccgaaaaatatagtggccagtgggcggactaatcagtccattatggtccagtggcagccacccccagaaacagagcacaacggggtgttgcgtggatacatcctcaggtaccgcctggctggccttcccggagagtaccagcagcggaacatcaccagcccggaggtgaactactgcctggtgacagacctgatcatctggacacagtatgagatacaggtggcggcgtacaacggggccggtctgggcgtcttcagcagggcagtgaccgagtacaccttgcagggagtgcccaccgcgcccccgcagaacgtgcagacggaagccgtgaactccaccaccattcagttcctgtggaaccctccgcctcagcagtttatcaatggcatcaaccagggatacaagcttctggcatggccggcagatgcccccgaggctgtcactgtggtcactattgccccagatttccacggagtccaccatggacacataacgaacctgaagaagtttaccgcctacttcacttccgttctgtgcttcaccacccctggggacgggcctcccagcacacctcagctggtctggactcaggaagacaaaccaggagctgtgggacatctgagtttcacagagatcttggacacatctctcaaggtcagctggcaggagcccctggagaaaaatggcatcattactggctatcagatctcttgggaagtgtacggcaggaacgactctcgtctcacgcacaccctgaacagcacgacgcacgagtacaagatccaaggcctctcatctctcaccacctacaccatcgacgtggccgctgtgactgccgtgggcactggcctggtgacttcatccaccatttcttctggagtgcccccagaccttcctggtgccccatccaacctggtcatttccaacatcagccctcgctccgccacccttcagttccggccaggctatgacgggaaaacgtccatctccaggtggattgttgaggggcaggtgggagctatcggcgacgaggaggagtgggtcaccctctatgaagaggagaatgagcctgatgcccagatgctggagatcccaaacctcacaccctacactcactacagatttcgaatgaagcaagtgaacattgttgggccgagcccctacagtccgtcttcccgggtcatccagaccctgcaggccccacccgacgtggctccaaccagcgtcacggtccgtactgccagtgagaccagcctgcggcttcgctgggtgcccctgccggattctcagtacaacgggaaccccgagtccgtgggctacaggattaagtactggcgctcagacctccagtcctcagcagtggcccaagtcgtcagtgaccggctggagagagaattcaccatcgaggagctggaggagtggatggaatacgagctgcagatgcaggccttcaacgccgtcggggctgggccgtggagcgaggtggtgcggggccggacgcgggagtcagttccttcagccgcccctgagaacgtgtcagccgaggctgtcagctcgacccagattttactgacatggacatccgtgccggaacaggaccagaatgggctcatactgggctacaagatcctgttccgggccaaagacctggatcccgagcccaggagccacatcgtgcgagggaaccacacgcagtcggccctgctggcaggcctgcgcaagttcgtgctctacgagctccaggtgctggcgttcacccgcatcgggaacggggtccccagcacgcccctcatcctggagcgcaccaaagacgatgccccaggcccaccagtgaggctcgtgttccccgaagtgagactcacctcygtgcggatagtgtggcaacctccggaggagcccaacggcatcatcctggggtaccagattgcctaccgcctggccagcagcagcccccacaccttcaccaccgtggaggtcggcgccacagtgaggcagttcacagccaccgacctggccccggagtccgcatacatcttcaggctgtccgccaagacgaggcagggctggggggagccactggaggccaccgtcatcaccaccgagaagagagagcggccggcaccccccagagagctcctggtgccccaggcagaagtgaccgcacgcagcctccggctccagtgggtcccgggcagcgacggggcctcccccatccggtacttcaccatgcaggtgcgagagctgcctcggggtgagtggcagacctactcctcgtccatcagccatgaggccacagcatgcgtcgttgacagactgaggcccttcacctcctacaagctgcgcctgaaagccaccaacgacattggggacagtgacttcagttcagagacagaggcggtgaccacgctgcaggatgttccaggagagcccccgggatctgtctcagcgacgccacacaccacgtcctctgtcctgatacagtggcagcctccgagggacgaaagcctgaayggccttcttcagggatacaggatctactacagggagctggagtatgaagccgggtcaggcacygaggccaagacgctcaaaaaccctatagctttacrtgctgagctcacagcccaaagcagcttcaagacggtgaacagcagctccacatcgacgatgtgtgaactaacacatttaaagaagtaccggcgctatgaagtaataatgaccgcctataacatcatcggcgagagcccagccagcgcgcccgtggaggtctttgtcggcgaggctgccccggccatggccccgcagaacgtgcaggtgaccccactcacggccagccagctggaggtcacgtgggacccaccacccccggagagccagaatgggaacatccaaggctacaagatttactactgggaggcagacagccagaacgaaacggagaaaatgaaggtcctcttcctccccgagcccgtggtgaggctgaagaacctgaccagccataccaagtacctggtcagcatatcagccttcaacgccgccggagatggacctaagagtgacccccagcaggggcgcacccaccaggccgcccctggggcccccagctttctggcgttctcagaaataacctccaccacgctcaacgtgtcctggggcgagcctgcggcggccaacggcatcctgcagggctatcgggtggtgtacgagcccttggcccctgtacaaggggtgagcaaggtggtgaccgtggaagtgagagggaactggcagcgctggctgaaggtgcgggacctcaccaagggagtgacctatttcttccgtgtccaagcgcggaccatcacctacgggcccgagctccaagccaatatcacagccgggccagccgagggatccccgggctcgcctagagatgtcctggtcaccaagtccgcctctgaactgacgctgcagtggactgagggacactctggcgacacacctaccacgggctatgtgatcgaggcccggccctcagatgaaggcttatgggacatgtttgtgaaggacatcccgcggagcgccacatcctacaccctcagcctggataagctccggcaaggagtgacttacgagttccgggtggtggctgtgaatgaggcgggctacggggagcccagcaacccctccacggctgtgtcagctcaagtggaagccccattctacgaggagtggtggttcctcctggtgatggctctgtccagcctgatcgtcatcctgctggtggtgttcgccctcgtcctgcacgggcagaataagaagtataagaactgcagcacaggaaaggggatctccaccatggaggagtctgtgaccctggacaacggaggatttgctgccctggagctcagcagccgccacctcaatgtcaagagcaccttctccaagaagaacgggaccaggtccccaccccggcctagccccggcggcctgcactactcagacgaggacatctgcaacaagtacaacggcgccgtgctgaccgagagcgtgagcctcaaggagaagtcggcagatgcatcagaatctgaggccacggactctgactacgaggacgcgctgcccaagcactccttcgtgaaccactacatgagcgaccccacctactacaactcatggaagcgcagggcccagggccgcgcacctgcgccgcacaggtacgaggcggtggcgggctccgaggcgggcgcgcagctgcacccggtcatcaccacgcagagcgcgggcggcgtctacacccccgctggccccggcgcgcgaactccgctcaccggcttctcctccttcgtgtgagcaaagcgccgcgcctccctcagggcggaacggaggcaactttccggagtctatttttgttaagacaatcaactccaataactgagctgaagtttttgtttaaaaagaaaaaaatctgataagtgatgattttacctacttgtggacactagatttcaattaggaaggtttttttaaacggctttttgtaacttcgctgcaggaagcaggtttgtttc

SEQ ID NO: 31361 - DNA, 1530 bp, Homo Sapiens
actcaatgtcggaacgttccgaagatgacgtcggagcgttctcgaatcccgtgtctctcggctgctgctgccgaaggaacagggaaaaagcaacaagaaggaagagcaatggcgacactggatcgcaaagtgcccagtccggaggcgtttctgggcaaaccctggtcctcctggatcgacgccgccaaattacactgctccgacaatgtagatttagaagaggctggaaaagagggtggaaaaagcagggaggttatgaggcttaataaagaagatatgcacttatttggccattacccagcacatgacgacttctatctcgtagtgtgcagtgcctgtaaccaggtcgtcaagccacaggttttccagtcgcactgcgggagaaagcaagacaacaggagaaatgaaggcatctccaggagtggaccagagagcagccaagccatagagaagcatcaggtgtgagaatggaaaacgcagaagagacgtacaacttctgaaagatctcagaggactggcattgtctggagacggcttcctggaagaggagactccagcagagccctgaagtgtggacaagcttccattcactgcaaattcgtgagcacactctggtgtcaggatctagtaaggaaatgggcttgagcagagcagggggtacctgtggggttcttctcttcattttcaccaccacaaagctggtctaagctgccatcaattcccacctggacaactgcaaaagccttccagctgttcctgcttccactcttgctcctctacaattcattctgcacgcagaagtcagaatcaaaatcaaagttcatcatgtcattctcttgacttgtggcttccctttgctcttaagctaaaagtaaaaatcattatcatggctacaaagtcttgtgtggtctgggccacatcctgtgccaggctccctttcattgtctatattccagtcaagctggccttcaaaatttcagcacattgggtctttctgccacaggcccttgcacatacatgcttttccctctgtacatgtgattttctttcatccccgctttccaaagctaactctgactcatccttcagactgcatcttaatgattacttccttctggaagactcccctaattttcacaactagatgagctctcccttatatgttgaaaacaagtatttcttgtgtgaacagaaatgtttaatgtctgccttcccaactcagccacaagctctgtgaggatggggactcagtctttgcatccctcagagcctagcatagtctcagttaatacgtgatagctggagcgtgacatttcattaggaacagtgaggctagttgagaaattatacctcaccagtatataggagagtaccattaggaattcttaatgggatgaaaacctgaattcatgtctagaccctgccacctgctggctgtgctgttttaaataaattgcagatcctctcagaaaaaaaaaaaaaaaaaaaaaaaaaaaaaaaaaaaaaaaaaaaagaaaaaaaaaaaaaaaa

SEQ ID NO: 31362 - DNA, 2411 bp, Homo Sapiens
ctcactcggtcagttcctcgggcgagttacggggacgacctgcgggagcacgcgggcagtggccggacgctgaagcccaggagagcgatggagacgtatgcggaggttggcaaggagggcaagcctccctgtgcatcggtggatctgcagggagacagctccttacaggtggagatttctgacgcagtgagtgagcgggacaaggtgaaattcactgttcaaacaaagagctgcctccctcacttcgcccagaccgagttctcagtcgtgcggcagcacgaggagttcatctggctgcatgatgcctacgtggagaatgaggagtacgccggcctcatcatccccccagcccctccgaggccagactttgaggcttcgagggaaaagctacagaaattgggcgagggggacagctctgtcactcgggaagagtttgccaagatgaagcaggagctggaagcggagtacctggccatctttaagaagacagttgcgatgcacgaagtctttctgcagcgcctggcggcccaccccaccctgcgtcgagaccacaacttctttgtgtttttggaatatggacaggatctgagtgtccgggggaagaacaggaaggagctcctcggagggtttctgaggaatattgtgaagtccgcggatgaagccctcatcacgggcatgtcagggctcaaggaggtggatgacttctttgagcatgagaggaccttcctgttggagtatcacacccgtatccgagatgcctgcctgcgggccgaccgcgtcatgcgcgcccacaagtgtacgcagggcccaaggggtcctggatccccctgcccctctccccagcggttcaactccttgggggagagaagagagcagggcgtgccttgttgtttgtctgtggccacaagcaccaaggcttgacatgcagatgtaggggctctgatgggggctgttccccaacaggcctggcagacgattatatccctatctcagctgcgctgagcagtctgggaacacaggaagtcaaccagctaaggacgtgaggactccccccacccctaccctctccctgtgcctgtaataccatgtcttcccatgaggggtcactctgtagatgtctactgtcagctctaggtgggaggtgtaggctctcctgttgggggatggtgttgggaaggaaaggggagagggagattcccaaggagaggctgagacagagaggctttgagctgttcctcagccccctaccctaactccctccctactgcttcctaggagcttcctcaaattggcagagctctttgaacggctgaggaagctggagggccgggtggcttccgatgaggacctgaagctgtcagacatgctgaggtactacatgcgtgactcacaggcagccaaggacctgctgtaccggcggctgcgggcactggccgactacgagaatgccaacaaggcgctggacaaggcgcgcaccaggaaccgggaggtgcggcccgccgagagccaccagcagctgtgctgccaacgcttcgagcgcctctccgactccgccaagcaagagctcatggacttcaagtcccgccgggtctcctcttttcgaaagaatctcattgagctggcagagctggagctcaaacacgccaaggcagaagagcaccgccttcttgcgcttcttcacctcctctggcgttgaagacttacgcaccttcatgtcgttgaacaccttgatgacaccatcagagacagccacaccggaggcctaggagacatgccacgtatacgtcgagaaaaggattctagggaactgccccttgttttttcagaagatctcagtccacgtcccgagtggtcactagtgcccttcccaaggcaagtcactagttttcccacccaagtcactgtcaaagaaccagatgggacacaacctcagaatggcagccatggcctctgatcacctagttcaacaaccccttccctcattttacaggatagaaatgcaaaactcgtgaaaagcagaaccttgaccaaaatgtgaacccagaattaaaagatccaccggctactgactcatttgctactcacagtacttgctctcagcctttggataaaactggtgatttagaacttcggatatggaggacccaaacacctgagccaagactcctcttcagaaagagccaagaccccacaatgctagatgggaccccaaggacaccgaacagttacaacaaacccaccagaactgcttaatacagttactacacaaacgacccctgttcccagctaggctctttcccaaccaagacaagaattgcaacccccattaaggaccctgcccgacaactcccttcttccgggaatggtgctaggccccagaagtcgctgataaaaattaacatgccaaactc

SEQ ID NO: 31363 - DNA, 3109 bp, Homo Sapiens
cggctgagccgggttggggcccgggttgggccgcccggggactctggagcattgggatttgtagcgcgccctctgggtaggcggctgtagcggagaggcgtgcgggatcgggatgtcggggctgctcacggacccggagcagagagcgcaggagccgcggtaccccggcttcgtgctggggctggatgtgggcagttctgtgatccgctgccacgtctatgaccgggcggcgcgggtctgcggctccagcgtgcagaaggtagaaaatctttatcctcaaattggctgggtagaaattgatcctgatgttctttggattcaatttgttgccgtaataaaagaagcagtcaaagctgcaggaatacagatgaatcaaattgttggtcttggcatttcaacacagagagcaacttttattacgtggaacaagaaaacaggaaatcattttcacaactttataagttggcaagacttaagagctgttgaacttgtaaaatcttggaataattctcttcttatgaagatatttcacagttcttgccgagtgcttcactttttcactagaagtaaacgactttttacagccagtttgttcactttcacaacccagcagacttctttgagattggtctggattttacagaacttgactgaggtgcaaaaggcagttgaagaagaaaattgctgctttgggactattgatacctggttgttatataagctcacaaaaggttctgtatatgccacagatttttcaaatgctagtacaactggactttttgacccatataagatgtgttggagtgggatgattacctctctaatttcgataccactttctctcctacctcctgtgagggacacaagccacaattttggatcagtggatgaagagatatttggtgtgcctataccaatagttgccttgttaaaggtccctggatatgaccagaatatctgctatatttttgggaaggggaccattgagccagtattctatcatggaagtactttataaccttttctgacttgcttgtatattgtttatcagaaaacttaaattaaaaaaaattttttttaattctgagtggtatttagtttacatttggtactctgagacaaaacacagtgatggggcgaatatttatgttctgtttgataatgtgtaaccacaaacagtgttagggcaacttaaactagcagagaaagttgtatgtacatttaataaagtccttagccatcatctaccagtaaataagtttgtagaataatgaaatatttgccatttttgattttttttttttttttgagacggggtctcgctctgtcactcaggctggagtgcagtggtataatcatgcctcactgcagcctcggcttcctgggctcaggtgattcttccaccccagcctcccaagtagccggggccacaggtgtgtgccacgacacctggctaattttttgtatttttggtagacatgggattttgctgtgttcccctggctgatctcgaactcctagactggggccttctgccacctttgcctcccagggtgctgggactgcaggcatgagtcactgtgccaagcctgtttttgatttttaagagtcctttcacattgcctttgatttcctgtggcagcttaagcaggaggtagagaccacctgttgcaagatgtgcagtctccacagtagctgggggagcagctgagggaaagggaatttaatttccaagttacaaaatcattatcatttagagaggatcggtcttattcaatctaggcataggtgcagggttagattaaggtatggctggaagagttaccaattagtgacagagggttctttaaatgagttgttgttgttgttgttgtttttgagatggagtttcactcttgtctcccagactggagtgcaatggcatgatctcaccgatggctcactgtgacctccgcctctcgggttcaagtgactcttctgcctcagcctcctgagtagctgggactataggttgctgaccagcaatcagccatgtttggagagtgctgcttccagacaggtgatgtgaaattaaccatgggaactgggacatttttggatattaacactggaaatagccttcaacagactactggaggcttttatccattaattgggtggaagattgggcaagaagtcgtatgcttagctgaaagcaatgcaggagacactggtactgccataaaatgggctcagcagttagggttttttgttgtttgtttgtttttgcagaccttttcacagatgctgctgagactgaaaaaatggccaaaagtttggaggattctgaaggagtttgttttgttccatcttttagtggattacaggctccattaaatgacccctgggcatgtgcctcttttatgggtttgaagccttctaccagtaaataccatcttgtacgagcaatattggagtcaatagctttcagaaacaaacagttatatgagatgatgaagaaagagattcatattcctgtaaggaaaatccgggcagatggaggagtttgtaagaatggttttgtcatgcagatgacttcagacctgattaatgagaatatagacagacctgccgacattgacatgtcatgcctgggtgcagcttctctagctggccttgctgttgggttttggactgacaaggaggaactaaagaaactgagacaaagtgaagtggttttcaagccacagaagaaatgtcaagaatatgaaatgagtctggaaaactgggccaaagcagtgaaacgctccatgaattgggtcttgctgtgttgcccggggtagtctttaattcctggcctcaagtgatcctcccaccttggcctcccaaagtgctgggattgcagccgtgaaccactgcacccagccaatgggtgtaatttcataggaaataattctttttgtcagaatgtactgaattgtaatattaatacctgaaaatttgttagttcacttcttttccacgttcttctttcccaacatataaccacaaaataaaggataaatacttaaaaaaaaaaaaaaaaaaaaaaaaaaaaaaaaaaaaaaaaaaaaaaaaaaaaaaaaaaaaa

SEQ ID NO: 31364 - DNA, 980 bp, Homo Sapiens
agcgtctggtccgcgcagtcagggcatcctccgcatcctccacatccttccatggctctgaagaataaattcagttgtttatggatcttgggtctgtgtttggtagccactacatcttccaaaatcccatccatcactgacccacactttatagacaactgcatagaagcccacaacgaatggcgtggcaaagtcaaccctcccgcggccgacatgaaatacatgatttgggataaaggtttagcaaagatggctaaagcatgggcaaaccagtgcaaatttgaacataatgactgtttggataaatcatataaatgctatgcagcttttgaatatgttggagaaaatatctggttaggtggaataaagtcattcacaccaagacatgccattacggcttggtataatgaaacccaattttatgattttgatagtctatcatgctccagagtctgtggccattatacacagttagtttgggccaattcattttatgtcggttgtgcagttgcaatgtgtcctaaccttgggggagcttcaactgcaatatttgtatgcaactacggacctgcaggaaattttgcaaatatgcctccttacgtaagaggagaatcttgctctctctgctcaaaagaagagaaatgtgtaaagaacctctgcaaaaatccatttctgaagccaacggggagagcacctcagcagacagcctttaatccattcagcttaggttttcttcttctgagaatcttttaatgtcatttatatacaaaagaaattctcaaatgttaaaataaaggaatagtttattgcttaatataacttatcatcactttgcttctttactgaatcttctacactcttgcctgatacctaaatttaatgtttgtttttaactcaaaaaatgtactgtagtatggaaaatggatggcagtagaataaagtcttaagattattttttaattacaaaaaaaaaaaaaaaa

SEQ ID NO: 31365 - DNA, 4299 bp, Homo Sapiens
agcggagcgaaggcgcgagctgcccgataatggcggcctgcagagcccatgagagggagaagcggcagcgtctaccctgaggaaggtgctcttccccatggggactgtaccaggctggagaggacatggcactgcttcagagacacgaaccaccttgagtggatgtgattggcgatccccgtagagcaggaaagctcgtctgctgtgcagccggcgcagaggattctgtggcaggaaattagacactaggaaattcagtagcgatttgaaggaaacctcgaccttgaagatggtgagtagccagccaaagtacgatctaatacgggaggtaggccgaggtagttacggtgttgtgtatgaagcagtcatcagaaagacctctgcacgggtggcagtgaagaaaattcgatgtcacgcacctgaaaatgttgaactagcccttcgtgagttctgggcactaagcagtatcaagagccaacatccaaatgtgattcacttggaggaatgcatcctacaaaaggatgggatggtgcaaaagatgtcccacggctctaattcttccctttatttacagcttgtagaaacttcattaaaaggagaaattgcctttgatcccagaagcgcctattatttgtggtttgtgatggatttttgtgacggaggagatatgaatgagtatctgttgtccaggaaacccaatcgtaaaactaacaccagcttcatgcttcagctgagcagtgccctggctttcttgcataaaaaccagatcatccaccgagatcttaagcctgataacatcctgatttctcaaaccaggttggataccagtgacttggaacctaccctcaaggtggctgattttggtctaagtaaagtttgttcagcctctgggcagaacccagaagaacctgtcagtgtaaacaagtgtttcctttccacagcatgtggaacagatttttacatggctcctgaagtttgggaaggacattacacagcaaaagctgacatctttgctctggggattatcatctgggcaatgctggaaaggatcacattcatagacacagagacaaagaaggaactcttggggagttatgtaaaacaaggaactgagattgtgcctgttggggaggcacttctggaaaatcccaaaatggaacttctcattcctgtgaagaaaaaatctatgaatgggcgaatgaaacaactgattaaggaaatgctggctgcaaaccctcaggatcgtccagatgcttttgaactagaactcagattagtacaaattgcatttaaagatagcagctgggaaacgtgacacatattatttgcaaataccatggatgatatgctgcttctgtttaacagtgatgcaacattatgtggctgaaaaagaatataaaaagctagactctaccctctaagggtttagattttttgtgggatttttttttttcctcatttttcttaaatccaagttggccgttttattagtatgtttcaaatgtgtattaccaatgtgggtgtaaatttttaaaaaatgattattgatagaagtttggcaggaaaattctttaagagctaacaagagaagagagtccagttttctggaaatatgtctttaagtattttagacattcctcgtcagtattaggaatttccatgggaaaagaggtttgcatgctggtaatgcaacctttgaaactttgtaaaggaaacatatatgtatatatttatgtatatgtaagtatgtgaatgtgcgcattttgcattccatatgaaaaaaatgccacgtctgtttaaattatttgatgtaggtttgggtttttgagatttgctggtgaagtcagtgacgaaaaataaaccttcccttatcttcctactctgcccctccccctaatgaaatcatattaagttgtttttttttttttgtaatatacagctttttttttaaggcatcattttcgagggtctaaaattatctggtaaaacaaatgaaattaagtgatccaaagctgctgaagtatgtttgaactctccagtgccctatagctgcaagagttgaattagtcatgcagtcatatggcagcaggttggtgattcagtccgaccttctttaggtaaccgagcatttatttaaccaactataccactgcattgggacgtctgcacttgagcttctacaatctgatataaatctgaatacaggattattctgtttgaaaactttgctatgtgtgaactgtaatacttgatacatttttggtttgaagactttgtctaagcctcattatactgaagttgaagaaaccaaatgagctccaccctcactttgcctgccctgatatgatcacttgttgagtcactggagttcctttcattttggcactgatgctgttttctcttgtctgatttgaaacagtactggtaataatatggttgttgaaaatgtgatcacctttatctaaagtgggagaagatacatacacagtatggcaaatggataaaatattgtggcatcaactacttttaaagtagaaaagctatccattttatacaatcactgatacagtctatgtcaaaaaaccaacagaccattattcctcttgaagttagtttgattttatctttgtatggttgtctacaatttgttttcctgtaaatgcagatagttaaaatctaaaggatagaatgctttcctaaaacagaacattagcctttaaggttaaatagactttacattgtatctaagttaatctttataaagcactagaatttttggtcaaaagtcaaaatagtattagaatattgaaattattgatagctttcataatctcagcttttttgaacttccacaatttttggaatatgtcataatttttttccctgtttcaaatgtgttcagaggaaatagaatgtaaaacatcacaaaaaaaattgcagtacataaaatttctggactatgttagttacttgatctggaagtttaaaatttggactaaaaggttttattgaaataaagcctcttaaaatgaaaaatcatatacttttaacatcacttttaagctaataaatataagaattcttttggaaattagaggtggaaacacactggaacctcatgataattgaccctctggatcaccagattagtttaatttaacagatatgtccaaggaagttgagctatagggagtaagaaaaagcatcatgataacgtctagtcaataacatggcacttcagcagagattcatagatgatggtatgcccatgcatcatttgctcttcaaatatctatgtgcttggagccacagtttcctaagcgcatagtttttggtcctgcctcatgtaaaatagttaatgattatcatttacttggaaagattttacctgtgaagtgaaattctttcattgggggtaagggtatgaggtgatcaggaagtttcttctggaattttatcaagtccttgtattctaaaatagccaagcaaaatgatagtaaattctttgtctttgttctttcagtcagaggtatttattaagtacctactgtgtgctcagcactaaaggtttgttgataaaatgacaattaaaaaatggcatttagccaaaggccttttcagccaggagtaagaaaagatggttagtgatatttggaaatacctggatatttgctagaggaaaaatgaaagcaaaacttcgtacacagtgccttgcccataataggtactcaataagcaattgttcctcatagagtcttttgccatgatttatggtgttttttgaaatttgtcttaattgaaaaaagaccaaatatttcaaatgagcttataggcagctgtggccagtgaaaatatggggttgtacagttagttcctagaatgttattttgcactagttgtcacttagaaagatggggttcctgtagattttttggtgctaagggatactttgtcattatgatgaagtaagtgttaagtgtcagataaatagcacacagaatagttctttctgctggtctgttttttctcttcgttgttgttgtttttaattgtaaattgttatcaatcaaactattgtagcagctacaaagtaattcaccagcatgacaaaatggtcaaaaaataagtcatcagcacttaagaaatgaaagcaacttttgaaattttctgttaaaattgtcaaatatattttatgaagaatttataaaaggggaaaatgattgtaatttattgttcatgacttttttttttaaataaagtgagtttcaacaaaaaaaaaaccgaaaaaaaaaaaaaaaa

SEQ ID NO: 31366 - DNA, 2950 bp, Homo Sapiens
acgtcatcgccgcgcgccggcttgccaggagctggagggggaggtaggcggggcggcgcgtgacctaaggcctctctgccgcgcgcgcagagccaaggcactgatgtttgaactggaaacttcaaaacgtttaataagagtcttcaggatgggtttgaactagacaagctagaaatttctttagaacaccagctctagcatgcatctcccacttttggctttcctggagaggagcttgaagaggtggttctgcagacagccacagtgatacttaggaaaccagaggaatggatttgacttttctgctaggattctctgttatagtttctccctgagttgtaagaggcatggaaatatacatgaaactgaagaacctgcaaggaagggaagtggaactttccatgctgagtgaaaactaaccaagtggcagttgtgactgaaaacactgaaacctaccacgtccagattcactggattgggggatagaggaacggtcacagctagggagaaagaagtgataccggaaaagaaaacctaaatgaagagaatgaggatgactgcacagtagatggccacctctacctccacagaggcaaagtcagcctcgtggtggaattatttttttctttatgatggttccaaggtaaaggaagaaggcgatccaacaagagctggcatttgttacttttatccttcccagaccctgctagaccaacaggagttgctttgtggacagattgctggagttgtccgctgtgtttctgacatttctgactctcctcctactcttgttcgtctgagaaaactgaagtttgccataaaagttgatggagattacctttgggtgctgggctgtgctgtggagctccctgatgtcagctgcaagcggtttctggatcagctagttggattctttaatttttacaatggacctgtttccctagcttatgagaactgttctcaggaagaactgagcacggagtgggacaccttcatcgagcaaattctgaaaaacaccagtgatctgcataagattttcaattccctctggaacttggaccaaactaaagtggagcccctgttgttgctgaaggcagcccgcattctgcagacctgccagcgctcgcctcacattctcgctggctgcatcctctataaaggactgattgtcagcacccaactcccgccctccctcaccgccaaggtcctgcttcaccgaacagcacctcaggagcagagactccctacgggagaggatgccccgcaggaacatggaaaatggatgttatggagcttcaagaatcgagttacccaccagaaccctaatggagcggcattgcccccgaatgtccagattatccctgtttttgtgaccaaagaggaagccattagtctccacgagttcccggtggaacagatgacaaggtctctagcatctccagcaggactccaggatggttcagcccagcaccatccaaagggtgggagcacatctgccctgaaagaaaacgccactggccatgtggaatccatggcctggaccaccccagatcccacatcccctgacgaagcttgtccagatggcaggaaggagaacggatgcttgtctggccatgatctggagagcatcaggcccgcaggactgcacaactctgccaggggtgaggttcttggcctcagctcctccctggggaaggaactagtctttctccaagaagaactcgacttgtctgaaatccacattccagaggctcaggaagtggaaatggcctcaggtcattttgccttcctacatgtgcctgttccagatggcagggctccttactgcaaggcatctctcagcgcctccagcagcctggaacccacgcctcctgaggacacagccatcagcagcttgcgccctccctctgctcctgagatgctgacccagcatggagcccaagagcagctcgaagaccatcctggccatagcagccaagcccccattcccagagcagaccctctccccaaaagcactgtgcttttcagtggtggctgcgtgaaagggagcgacactcagctgtgtgttcctgggcttgtgtggtacttagaacctcagttctattacgttatagtcagacatttttttgacagtatgagacagactgcaggatgaaaatatttgtcaaaatcttaactgaatgtttactggaagtacttgagattccatttgagagttgtattgttaataatttcatgtcagtgaactgatatctgatgtttatgatatggtgtctttttcttgaaacaagcttccaagggctagaaataaaatagccaaaaaatgctggagttctgagtaattaaatggcagcatttttttgtgacaaaggtaagggttaagacagtgtgtgtgtgtgtgtgtgtgtgtgtgtgtgtgtgtgtgcgcgcgcgcgcgcgcgcgtaacgtgggcgcatccctcttttccttccctgggttcagtgtggctgggtaaggaccgtctgtttgtagggctgccaggctgcagcctgctgctccagggagcaccagctgcagctgatccaatacaccaagcctgtgtctccctcttctatcacctctctccaggatctctgctgtctcttggatcccatctgcctagatggaagaggatcctatccgaagctaggataaatgttgtcttactcctctgctatgttctcccagaaaaaattgattacaagttctctgctgtggttgctgcagctccaggaagtccccgcaatgtctcacgttgtctttgaccagtggtccccagtaccaggccagcgaagacaactttataatgtcatttgtgttgtgaaaattcttccactgacccaaaatggaaccgtacaaagcctatccgtgtatatggaaaagtctcatgcacctggattaactcagaaaaagtaaagtcctgaaacttca

SEQ ID NO: 31367 - DNA, 6294 bp, Homo Sapiens
tggcccggcagcatggcggcggcggcgggcgcccctccgccgggtcccccgcaaccgcctccgccgccgccgcccgaggagtcgtccgacagcgagcccgaggcggagcccggctccccacagaagctcatccgcaaggtgtccacgtcgggtcagatccgacagaagaccatcatcaaagaggggatgctgaccaaacagaacaattcattccagcgatcaaaaaggagatactttaagcttcgagggcgaacgctttactatgccaaaacggcaaagtcaatcatatttgatgaggtggatctgacagatgccagcgtagctgaatccagtaccaaaaacgtcaacaacagttttacggtcataactccatgcaggaagctcatcttgtgtgctgataacagaaaagaaatggaagattggattgcagcattaaagactgtgcagaacagggagcactttgagcccacccagtacagcatggaccacttctcagggatgcacaattggtacgcctgttcccacgcgaggccgacctactgcaatgtgtgccgtgaggctctgtctggggtcacgtcgcacgggctgtcctgcgaggtgtgcaaatttaaggcccacaagcgctgtgctgtgcgtgcaaccaataactgcaagtggaccacactggcctcgatcgggaaggacatcattgaagatgcagatgggattgcaatgccccaccagtggttggaaggaaacctacctgtgagcgccaagtgcactgtgtgcgacaagacctgtggcagtgtgctgcgcctgcaggactggcgctgcctctggtgcaaggccatggttcacacatcgtgtaaagaatccttgctgaccaagtgcccacttggcctgtgcaaagtgtcagtcatcccacccacggctctcaacagcatcgactccgatgggttctggaaggccagctgtcctccttcttgcacaagcccactgttggtcttcgtcaattcaaaaagtggggacaaccagggtgtgaagttcctcagaagattcaaacagctactaaaccccgcccaggtcttcgacctcatgaacggaggcccacacctcggcttacggttattccagaagtttgacacattccggattctggtttgtggcggggatggaagtgttggctgggtcctctccgaaatcgacagcctcaaccttcataaacagtgtcagctgggagtgctgccgctcggcacagggaacgacttggcccgagtactgggctggggctcagcctgcgatgacgacacccagctcccccagatcttggagaagttggagagagccagcaccaagatgctggacaggtggagcgtcatggcatacgaggccaagctcccccggcaggcctcctcctctaccgtcaccgaagacttcagcgaggattccgaggtacagcagattctcttctatgaagactcggttgcagcccacctttctaaaatcctcacctcggaccagcactcggtggtcatctcctcggccaaagtgctctgtgagacggtgaaggacttcgtggcacgggtggggaaggcctatgagaagacgaccgagagctcggaggagtcagaggtcatggccaagaagtgctctgtcctgaaagagaagctggattcccttctcaagaccttggacgatgagtcccaggcctcgtcctctctgcccaacccgccccccaccattgccgaggaggctgaagatggagatgggtcgggcagcatctgcggttccaccggagaccgcttggtggcatcagcttgcccggcccggccgcagatattccggcctcgagaacagctcatgctgagagccaacagcctgaagaaagcaattcgtcagatcatagaacacacagaaaaagctgtcgatgagcagaatgcccagacccaggagcaggagggcttcgtcctgggcctctctgagtcagaggagaagatggaccacagagtgtgcccaccactgtcccacagcgagagcttcggggtccccaaggggaggagccagcgcaaagtgtcgaaatctccgtgtgaaaagctgatcagcaaagggagtctgtccctaggcagttctgcttcccttccgccccagccgggaagccgggacggcctgcctgcgctcaacaccaagatcctgtacccaaatgtccgggctggaatgtctggttccttacccggtggctcagtcatcagtcgcctgttaattaatgctgatcccttcaactctgaaccagaaaccctagagtattacacggagaaatgtgtcatgaacaactattttggcattggcctggatgcgaagatatccctggactttaacaacaagcgcgatgagcacccagagaagtgcaggagccgaaccaagaacatgatgtggtatggagttcttggaaccaaagagttgctgcacagaacctacaagaacctggagcaaaaggtcttgctggagtgtgacgggcgacccatcccactccccagtcttcagggaattgctgtccttaacattcccagctatgccggaggaaccaacttctgggggggtaccaaggaagatgatactttcgcagctccatcattcgatgacaagattctggaggtggtcgccgtgttcggcagcatgcagatggccgtctctcgagtcatcaggctacagcatcatcggatcgcccagtgtcgcacggtgaagatctccatccttggggatgagggcgtgcctgtgcaggtggacggagaggcctgggtccagccgccagggtacattcggattgtccacaagaaccgggcacagacactgaccagagacagggcatttgagagcaccctgaagtcctgggaagacaagcagaagtgcgagctgccccgccctccatcctgttccctgcacccggagatgctgtccgaggaggaggccacccagatggaccagtttgggcaggcagcaggggtcctcattcacagtatccgagaaatagctcagtctcaccgggacatggagcaggaactggcccacgccgtcaatgccagctccaagtccatggaccgtgtgtatggcaagcccagaaccacagaggggctcaactgcagcttcgtcctggaaatggtgaataacttcagagctctgcgcagtgagacggagctgctgctgtctgggaagatggccctgcagctggatccgcctcagaaggagcagctggggagtgctcttgccgagatggaccgacagctcaggaggctggcagacaccccgtggctctgccagtccgcagagcccggcgacgaagagagtgtgatgctggatcttgccaagcgcagtcgcagtggtaaattccgcctcgtgaccaagtttaaaaaggagaaaaacaacaagaacaaagaagctcacagtagcctgggagccccggttcacctctgggggacagaggaggttgctgcctggctggagcacctcagtctctgtgagtataaggacatcttcacacggcacgacatccggggctctgagctcctgcacctggagcggagggacctcaaggacctgggcgtgaccaaggtgggccacatgaagaggatcctgtgtggcatcaaggagctgagccgcagcgcccccgccgtcgaggcctagcctctgtcctctcagcctgtggcctccacatccccgccgccgaggcctagcctccgccctctcagcctgtggcctctgcgcctcctgccactgaggccctgggcagatgctgcagcccgcccccttctcatggtgctacttcctctgtcagctacagaaagcctccgtgacaccgtccaccagagctctggggtctcgaacataacaacacagctacctttgaaacaacactttctccagctcagagtcacctggggcacatgtgtcacggccactcagctctcgcccgcctgtgctgtgggccagggaatccagcggcgtctggcctcctgggcactgcttgcctggcctcgtgcttggattgtcccgggggctcctctccgtgtgtccttctgtggccgcaccgtgtggctccgcctcctggcccccagccagttctcagaaacgtggctggggcccagcacagcagcctgcaagggcccctgtttgttgatgcagcttttgttgaacaaaaatcgtgctctttcctggtttgaaagtagcatggatgtttccagtcttgttgattgtaatttgacgtgaagagaaaaaaaaattcctcctgcgtgagccaaggcagcgggtgctgtttcccaggcggggagcccctccctgggtgtcacagggcctgtgctcctccctcctccatcctctctcctcccgctcctccctccccccactgtgggctggggacgcctgcccttctgtctccggacgctctaggcgagttcagcttggggtgtgagtgagacagcttgccagctgcatccctgcagacagaggatgtgtgtccacatgagtgtttctgtgtgggaaatgcttcctggctctgggaaactttttctgcccattctgtggttcccagggagcgtggccctggtgggccaggggtggtttgacctcttcagcccgtccggtggcctggaggccggaggctctcctgagtgtctgcccctgcagtggcttcttgtcgcctgctgctgggcgtgatgtcgctggaggtgctggcagggactctgatttggtggtccgcgctgcccctgccctgcctctgtcctggctctgaactagtagatgatggtgccagagggcagggagctcgcctggggagagggctgtgccccgtagggacagtgcccaggtgaaggatgcccctggtcctccagggcactgactttgcccttttttcccgttgatagtcatggctcagaggtgcttgtaaatgtcttgggaagaggtttctgtaacccctgccctggtgtgaggaggaaatggctctggcctggctgcctggccgtggcttctctttggctcccaaagagaaggacagtgttgggagtatctgccgtggcttctctttggctcccaaagagaaggacagtgttgggagtatctgccggcgctgtccaggtcctttagtcagcgtcactccatctgatgtgcagaagctgggctgcacctgcgggggtgggcatagaccgggctgggtctgcagcagcccctggtcctgagcaggcggcagtgaacagcactggcccacctcccactcacagcccctctgtcccctctgcagtgcacccaggtgggcccctctgcgtgcctttgggtgctcccctctcgtggtcgttctggcccgaggcccttagagtatggaggctgagccaggccttgggtttccccagcacagcctcctgtcgctgcatgcgacgtgttgggatttttggatgaaagactctcccacgctctgttggtggacttagctgcctcactggaagtgatgtgggtggaaggtggttgtatgttaccttttccacctctcattgttttccccagaacattgtagatgggggttggcagagggagaaataagccagccacggcagtcgcttggtttcccaggtggaatgggctaacacaggagatgatgggaacctgtcccgcagtccctgcatgaccattggccctgctggcctggcgatgtgggcatcctggggttcttagggtcccagaacaagccccaggcaagctggaacttgggtggggaggggacatgaggaggataaacagctgactgtggcttcaaggacatcagggccaccccaagtcctcagtgtcctactcctggcaaggagttgggtttggatcaaaagtgtttaaaattaatatgttgtcagtgattagaacaacactgtttacataaaaaccatttttctaattctaacaagttagaatgtgaggaaggaatgaacatgagtgtttaggaacctgccctttggtgctgggctggcgtcccgcactggggtgtcctcgctgtctgggggctgctctgctgccccggcccaggtccccttgtggtgttgccagacgggcctcatggtctgctgtgcagagagaggcaggaaggatccctgaagagtcttggagaaaaggttctgtgccctcaggtggggcttaccccctcgtatttataatcttaatttatatagtgaccaccgtggaaacaaacgcctcttgtattgtcatgtacatagtccatacctgagtgctgtacataagttgttctgtgtataaataaaacaagcctgtttttgatcttcc

SEQ ID NO: 31368 - DNA, 1747 bp, Homo Sapiens
atggggaggcgctgctgccggcggcgcgtgctggcggccgcctgtctgggcgccgcgctcctgctcctatgcgccgcgccccgctccctgcgcccggcatttggaaacagagccctgggctccagctggcttggtggggagaagagaagccccctgcagaagctctatgacctggatcaggacccgcgctcgaccctggcgaaggtgcaccgtcagcggcgcgacctgctgaacagcgcctgtagccgccactcacgccggcagcgcctgctacagccggaggacctgcggcacgtgctggtggacgacgcgcatggcctgctctactgctacgtgcccaaggtggcctgcaccaactggaagcgcgtgctgctggcgctgagcggccaagcccgcggcgacccgcgcgccatctccgcgcaagaggcgcacgcgcctggccgcctgccctcactggccgacttcagccccgccgagatcaaccggcgcctgcgcgcctacttggccttcctgttcgtgcgggagcccttcgagcgcctggcatcggcttaccgcaacaagctcgcgcgcccctacagcgccgccttccagaggcgctacggtgcacgcatcgttcagcgcctgcggccgcgcgcgctccccgacgcccgggcccgcggccacgacgtgcgcttcgcggagttcctggcctacctgctggacccgcgcacgcggcgtgaggagcccttcaacgagcactgggagcgcgcgcacgcgctctgccacccgtgtcgcctccgctacgacgtcgtgggcaagttcgagacgctggcggaggacgcggccttcgtgctgggcctggcgggcgcatccgacctgagcttccctgggccgccgcggccccggggagccgccgcctcccgcgacctggcagcgcgcctcttccgggacatcagccccttctaccagcggcgcctcttcgacctctacaagatggacttcctgcttttcaactactccgccccctcctacctgcggctgctctagcggtcctggaggtcctgtggccacgcggggcaagtgcctttccgacaagacccccggggaatgcaggtgctgccggccccaggacccctcttcaagagccactgcgtgcactcacctggccgccgggccagcgggcgcagggcacacctggccaggcttgggggcagcccatctcaggtggccctgcacgcgtgtgcctgcctcggcctgtcgcctgaggcctgcttcctccacttgctccagctgacaggcacctctccaggccccgtagatgggcaaggacttgataaccagggttttaggcttttaaaggccattttgggggtcagccctgcccctgaacctgttcatggtgcatcagaacataatgctgacaccggtgtcagtgtggcccgagcctgtgtcctccccacctcgcccaccctggcaaggacagctgcggccaaggacgaaagccctcccttggctggcctcacgatggggccgtcccgggagccaggtgggagctgccttccactgccatcgggtctcctctcctctcccacgcggctggccctacccaggcgccaccttcggtctcagtctggcaagacgctgggtcttcaggctccatgccaacagagcccctggtgcaatgcggtcacaggttttatgggactttggtgagctgggcggtcatggttttgaaataaatgtattttgttactttctgaaaaaaaaa

SEQ ID NO: 31369 - DNA, 2291 bp, Homo Sapiens
agcggaagtcggcggcggtggcggaggcggtgagtgcgcggctccggggctggccgactccgctagtggcccggccggcctgggctcgggggctccgggctctgggctctgggtgcgcggaccgggccaggctgcttgaagacctcgcgacctgtgtcagcagagccgccctgcaccaccatgtgcatcatcttctttaagtttgatcctcgccctgtttccaaaaacgcgtacaggctcatcttggcagccaacagggatgaattctacagccgaccctccaagttagctgacttctgggggaacaacaacgagatcctcagtgggctggacatggaggaaggcaaggaaggaggcacatggctgggcatcagcacacgtggcaagctggcagcactcaccaactacctgcagccgcagctggactggcaggcccgagggcgaggtgaacttgtcacccactttctgaccactgacgtggacagcttgtcctacctgaagaaggtctctatggagggccatctgtacaatggcttcaacctcatagcagccaacctgagcacagcaaagggagacgtcatttgctactatgggaaccgaggggagcctgatcctatcgttttgacgccaggcacctacgggctgagcaacgcgctgctggagactccctggaggaagctgtgctttgggaagcagctcttcctggaggctgtggaacggagccaggcgctgcccaaggatgtgctcatcgccagcctcctggatgtgctcaacaataaagaggcgcagctgccagacccggccatcgaggaccagggtggggagtacgtgcagcccatgctgagcaagtacgcggctgtgtgcgtgcgctgccctggctacggcaccagaaccaacactatcatcctggtagatgcggacggccacgtgaccttcactgagcgtagcatgatggacaaggacctctcccactgggagaccagaacctatgagttcacactgcagagctaaccccacctctgggcctggccagtgggctcctggggggccctgccttgaggggcactgtggacaggaaaccttcctttgccatactgcattgcactgcccgtggcttggccagcatcccccggatcagggccctgtggtttgcgtgttacccatctgtgtccccatgcccagttcagggtctgcctttatgccagtgaggagcagcagagtctgatactaggtctaggaccggccgaggtataccatgaacatgtggatacacctgagcccactcttgcacatgtacacaggcactcacatggcacacacatacactcctgcgtgtgcacaagcacacacatgcaagccatatacatggacaccgacacaggcacatgtacgtgcacaggtgtgctacacatgtgcacacatgcacagttgcacagacacacacacacaggtgcacacacacgatgccgaacaaggcagaagggcgactctcacctctcatgtgcttctggccagtaggtctttgttctggtccaacgacaggagtaggcttgtatttaaaagcggcccctcctctcctgtggccacagaacacaggcgtgcttggactcttgacaagcagacctgctcctgcagaggagacagccacatttggaattgggcaccgagaagacctgagaaaaacccactctctctttttttttttttttgagacggagtcttgctctgtcacccaggctggagtgcagtggcacgatctcggctcactgcaacctccgcctcccaagttcaagcaattctcctgccccagcctcctgattagctgggattacaggcgtgtgccaccatgcccagctaatttttgtgtttttagtagagacggggtttcaccatgttggtcaggctggtcttgaactcctgacgtggtgatccacctgcctcggcctcccaaagtgctgggattacaggcgtgagccaccacgcctggccgaaaaacccactctcataacagaagtgcagactcattgctagattcagtgcccttgagtgtgccagaggtcctctgtgtttgagacaatcctgtgtgtgccaggaggctccgtgtgcaccaggggctctcagaatcccgcttacccagctggagaccatgcctctggcagccccatctcagccagccctgctctctccctcttccctccaggtgaggcaaacttcataggaatctgtacctgaatgtgagctccggataataaaactctgaggctttggtgagcgtaaaaaaaaaaaaaaaa

SEQ ID NO: 31370 - DNA, 3782 bp, Homo Sapiens; identical to SEQ ID NO: 23679

SEQ ID NO: 31371 - DNA, 2004 bp, Homo Sapiens
cggactcctctttctcccggaagcggagcaccgagccggcaaaggcttgggtgtgagacagcagcggtggcagacaccgcagaagcaaagagcagtgaggctcctgcattcgggtggagcaccatggacgaagctggcagctctgcgagcggcgggggcttccgcccgggcgtggacagcctggacgaaccgcccaacagccgcatcttccttgtgatcagcaagtacacacctgagtcggtgctgagggagcgcttctcgccttttggcgacatccaggacatctgggtggtgcgggacaagcacaccaaggagtccaagggcattgctttcgtcaagttcgcccgcagctcacaggcctgcagggccatggaggagatgcatggccagtgcctcggccccaacgacaccaagcccatcaaggttttcattgctcagtcccgatcatctggaagtcaccgagatgttgaagatgaagaacttacaagaatctttgttatgataccaaagtcctacacagaagaagatctgcgggaaaaatttaaggtgtatggagatatcgagtattgcagcattattaagaataaagtgactggagaaagtaaaggtttgggctacgtacgatacttaaaaccatcacaagctgcccaagcaatagaaaactgtgatcgaagttttagagcaatcttggctgaacctaaaaataaagcatctgaatcctctgaacaagattattatagtaatatgaggcaagaagctttgggacatgaacctagagtaaatatgtttccatttgaacaacaatctgaattttcaagttttgacaagaatgatagccgaggccaggaagcaatctccaaacgcttgtcagttgtatcaagagttcctttcactgaagaacagcttttcagcatttttgatatagtaccaggattggaatattgtgaagttcaacgagatccttattcaaattatggtcatggagtggttcagtattttaatgtagcatcagctatttatgcaaaatacaaattacatggatttcagtaccctcctgggaaccgaataggtgtttccttcattgatgatggaagtaatgcaacagagtaagtaccattccaggagtgtctaaagccgagctttgagtgtacatgattgataggacttgaagaataaaaatagaaacaattgacctctcaggtgagaaagtcacacaaaacaagctactgttaaaagactgaatatttttagttttctgtaaattatcagttattttttccagtctccttagaaaaatggcaacacagatggtagctgcacagcttgcatcaatggtgtggaataacccaagtcagcaacaatttatgcaatttggaggaagctctggatcacagttgcctcaaatccagacagatgttgtacttccatcatgcaaaaaaaaagctcctgctgaaactcctgtgaaagaaagactttttattgtgtttaatcctcatcctttacctttagacgtattagaagatatattctgtcgttttggtaacctgatcgaagtttaccttgtgtcaggaaaaaatgtggggtatgccaagtatgccgatagaataagtgctaatgatgccattgccactctacatggaaagattctgaatggggtgagacttaaagttatgctggcagattcgccaagagaagaatctaacaaacggcaaagaacttactgattcttgagaacaaagactaaataatgacataatcctcagctgactgactgaaaatgtgactggacgcattccctgtggacagttgacagctttttttttttccatatacctgatagtctgtgtacagcattgttttgtctgggaagcagggattgctgacatgtatttttgaatccatacattaatgctaaaacgaatatagtagttgttccttagagcaatatgttgttacgtgtagcagaaataaagttttctttgcttaactaaaaaaaaaaaaaaa

SEQ ID NO: 31372 - DNA, 3878 bp, Homo Sapiens
ttgtctgttgggggcgtgcgcagtcgggatggaagcttcctggcgccaggtggccggtggccgaggccgatcccggggacgggccactgccgccccctcaggaaatggagtccatctccgcggcgccggaggagggcgagagaaggggtcggtgggcgcagttccttctggcaccagtcccggaggagtcgcgaccacggcggctgcagggagcaggcacagccccgcaggatcccaagccctgcagactaccgcagccagcgagctaatgtctcagaaaaaatttgaagaaatcaagaaagctaaccaagctgcagccagaaaacttgttgaagaacagtttagctcttcatctgaagaaggagatgaagattttgaaggaaaacagggaaaaatacttgcaaatacgtttataacatacactactcagacagatggagatacacgtgaattagagcgaacaaaacaatatgtaaatgaagcttttcaagcaggggctatgacatgcctaatttgtattgcttcggtgaagagaaaccaagcagtttggagctgttcgggatgtttctgtatatttcacatgccctgtatccagaagtgggctaaagacagccagtttcttgtatcttctgtgactgatgatgattttggaaagaaagattgtccctggccttgtccaaaatgtaggtttgaatacaaacgatctgaaacacctagtaggtactattgctattgtggaaaagtagaagatccacctttagatccgtggcttgtgcctcattcatgtggccaagtatgtgagcgtgaatttaaacctccttgtggccataaatgtttactcctctgtcatccaggtccctgccctccttgtccaaagatggtcacaactacttgttactgtaagaaagcaaaacctatccctcgtaggtgcagtgccaaggaatggtcttgtcagctgccatgtggacagaagttgctttgtgggcaacataagtgtgaaaatccttgtcatgcaggaagctgtcagccttgtccaagagttagtagacaaaagtgtgtctgtggcaaaaaagtagctgaaagaagttgtgcaagtccactatggcactgtgatcaagtatgtggaaaaacactgccatgtggtaatcacacatgtgagcaagtttgccatgttggtgcttgtggagaatgtcctcgatctgggaaaaggttctgtccatgtcagaaatcaaagttttctttgccttgtacagaagatgtaccaacttgtggagacagttgtgacaaagtacttgaatgcggaatccatagatgttcacagcgttgtcaccgaggtccctgtgaaacatgtagacaagaagtggaaaagcattgtcgctgtggaaagcatacaaaacgaatgccttgtcataaaccttatctgtgtgaaactaagtgtgttaagatgcgtgactgtcagaagcatcaatgtagaagaaagtgttgccctggaaactgtccaccttgtgatcaaaactgtggacggactttaggatgtagaaaccataagtgtccatctgtctgtcacagaggcagttgctatccctgcccagaaactgtagatgtgaagtgtaattgtggcaatacaaaggtgacagtgccctgtggccgagaacgtaccacaagaccacccaagtgcaaggagcaatgcagtcgaccaccaacttgtcatcatacaagtcaagaaaaacatcgctgtcactttggttcttgtccaccatgtcatcaaccttgccaaaaagttttggagaaatgtggtcacttgtgtcctgctccgtgtcatgatcaagcgttaataaagcagactggcaggcaccagcctacaggcccttgggaacagccttctgagccagcatttattcagactgcattaccgtgtcctccatgtcaagttcctattcctatggaatgtcttgggaaacatgaggtgagtccactaccatgccatgctgtaggaccctactcttgtaaaagagtttgtggaagaatcttggattgtcagaatcacacatgtatgaaagaatgccacaaagtaaccaaaactgatggctgcactggaaaaaacaagatagggaaactgaagctctgtgatttgtccatgattctgcaacaggagagtagcaaatcagaaagtactgtgcctgatcttttaactcccagcccaatgtgctcttctactcatgttatttaaatagaagatttttgtaggtgtaccacataggaagagcaaatgaaataaactctttaggctggcccagaatgccttcattgtgaggaagggtgctccaagtcacggccactaggttgtcttcacccatgtattttgcgatgtcaccctggagaatgtccaccttgtgttcagatgcttagaataaaatgtcactgtaagatcacaagcctgtatgtggaatgtagaaaaataaccacagctgatgtaaatgaaaagaacctcctcagttgttgcaaaaatcagtgccctaaagagcttccttgtggtcatagatgcaaagagatgtgtcatcctggtgaatgtccctttaactgcaaccagaaggtaaaacttagatgtccttgtaaaagaataaaaaaggaattgcagtgcaacaaagtacgtgaaaatcaggtttcaatagaatgtgacacaacgtgcaaggaaatgaagcggaaagcatctgagataaaagaagcagaagccaaagctgctcttgaagaagaaaaacgaagacaacaggctgaactagaagcttttgaaaacagactgaagggtcgtcggaagaagaacaggaaaagagatgaagtggcagttgagctatcactatggcaaaaacataaatattatctcatttcagtgtgtggagttgtggttgtagtgtttgcctggtacatcacccatgatgtcaattaaaaaaagttttgatcttttaatgtaactcagattggatttagataagttgttaaatttgaaatattagaaaatgtatattatagaacatgatatatatttacattcatctctgtattctctcagctgttgttagaaggacagaatgttaaactttatcttaattagtatactagaaagggcagtatactactgtttaaagtgaaggcatgactgaaactaaaatatttcataaggcttagctagaggcagagtaacgtgtttttgttcattgggcttccttgtacttagttttttcatttaataattcaaaccaacacttttaaaaaaataattcagatgagactgagccatatctgcagtaagagaaatatttcttaatgttttggttacttatgatagagtacttttcttgttactgttaactttgtgctttttaaaaaaagtgattctctaacagacctcttaaattgtgacatgaaggtatgtaattagatttcagaaattggtttattagtgaggaatttttatcaataaatgtcatggggcgtgttcttcagaatatatagttattttcaacaaatgccaggctagattcctcacatgtggctatttcttatgtaagaagcttttaactgaagttggcatgtttcgtaaaacttgcgtgtcttttaaaaataataaaaggaagatgagtatttatgaagaatatgtgctgacaacagggcttatgaggtctatgtaccttaatctcgtttctccttaccacaatcttaaatagatttcagctgaaaataatcagttcttatgaaaacaaatagagaaatatcagtaagtcaaatctgtttgaattataattcctttcaaatagttttgctatttaatttatatgattaatgttttcattaaaatttttgataccaaaaaaaaaaaaaaa

SEQ ID NO: 31373 - DNA, 1605 bp, Homo Sapiens
atggcgacggcgctgatggctgtggttctgcgggcagctgctgtagccccgaggctgagaggccggggaggcactgggggcgcccgaaggctgagctgtggcgcgcggcggcgggcggcgaggggcaccagcccggggcgccggctcagcaccgcctggtcgcagccccagcccccgcccgaggagtacgcgggcgcggacgacgtctcccagtcgcccgtcgccgaggagccgtcgtgggtgccgagtcccaggcccccggtgccccacgagtccccagagcctccttcgggccgctcgctggtgcagcgggacatccaggccttcctgaaccagtgcggggccagccctggggaggcgcgccactggctcacgcagttccagacctgccatcactccgcggacaagcccttcgccgtcatcgaggtggacgaggaggtgctcaagtgccagcagggcgtatccagtctggcctttgccctggccttcttgcagcgcatggacatgaagccgctggtggtcctggggctgccggcccctacggctccctcgggctgtctttccttctgggaggccaaggcgcagctggccaagagctgcaaggtgctggtagacgcgcttcgacacaacgccgccgctgctgtgccattttttggcggcgggtctgtgctacgcgctgccgagccggctccccatgccagctacggcggcatcgtctcggtggagacagacctgctgcagtggtgcctggagtcgggcagcatccccatcctgtgccccatcggggagacggccgcgcgccgctccgtgcttctcgactccctggaggtgaccgcgtcgctggccaaggcgctgcggcccaccaaaatcatcttcctcaataacacaggcggcctgcgcgacagcagtcataaggtcctgagtaacgtgaacctgcccgccgacctggacctggtgtgcaacgccgagtgggtgagcacaaaagaacggcagcagatgcggctcatcgtggacgtgctcagccgcctgccccaccactcctcggccgtcatcaccgccgctagcacgctgctcactgagctctttagcaacaaggggtccgggaccctgttcaagaacgccgagcgaatgctacgggtgcgcagcctggacaagctggaccagggccgtctagtggacctggtcaacgccagcttcggcaagaagctcagggacgactacctggcctcgctgcgcccgcggctgcactccatctacgtctccgaggggtacaacgccgccgccattctgaccatggagcccgtcctggggggcaccccgtacctggacaaatttgtggtgagctccagccgccagggccaaggctccggccagatgctgtgggagtgcctgcggcgggaccttcagacacttttctggcgctcccgggtcaccaaccccatcaatccctggtacttcaaacacagtgatggcagcttctccaacaagcagtggatcttcttctggtttggcctggctgatatccgggactcctatgagttggtcaaccacgccaagggactgccagactcctttcacaagccagcttctgacccaggcagctga

SEQ ID NO: 31374 - DNA, 3503 bp, Homo Sapiens
gtgtgcgttgcgctttctcccgcgatcgccctgccggtcgctagctccgagggcgcgcactggatcccaggctcctccgagagtgcggcgacctcggggctccgccggcgccggaggtggctctgagggcagggacgtgttggacacgctgactttgtaggctccgccaagaggcgccgcaggaggtcgtccctgatggcccctggaggcgaagctcatcacaggatgaggaaaggacagaggcacagagaacccccaagaggagatggggctctgggagacggccaaggcctcggccattctctgactacggccagctggccagccgcagtttgtctattcctgaagactcggttgctgcagacccccagaaggaagaccgtgtggacgaggacccccaggcaagcatgacttctgccagccctgaagaccagaatgctccagtgggctgccccaaaggagcccggagaaggcgccccatttccgtgataggtggggtcagcttgtatgggaccaaccagacggaggaactggacaatcttctgacccaaccggcttccaggccgcccatgcctgctcaccaggtgccaccctacaaggctgtgtcggcccggttccggcccttcacattctcccagagcacccccattgggttggaccgtgtgggacgccggcggcagatgagagcatccaacgtttcttcagatggaggtactgagccctctgccttagtggatgacaacggtagtgaggaggacttcagctatgaagacctctgccaggccagccctcggtacctgcagcccggcggggagcagctggccatcaatgagctgatcagtgatggcaacgtggtctgcgcagaagccctgtgggaccatgtgaccatggatgaccaggaactgggcttcaaagccggggatgtcatccaggttctggaagcctccaacaaggactggtggtggggccgcagtgaagataaggaagcctggttccccgcgagcttcgtcagattgcgagtgaatcaggaagagctgtcggaaaactccagcagcacccccagtgaggagcaggacgaggaggccagccagagccgccacagacactgtgagaacaagcagcagatgcggaccaacgtcatccgggagatcatggacaccgagcgggtgtacatcaaacacctcagggacatctgtgagggctatatccgacagtgccgcaagcacacaggaatgttcaccgttgcgcagctagccactatttttggaaacattgaagatatttacaaattccaaagaaagtttctgaaagaccttgagaaacagtacaacaaagaggaacctcacttaagtgaaataggatcttgctttcttcaaaatcaagagggctttgccatctattccgagtactgcaacaaccacccgggcgcctgcctggagctcgccaacctcatgaagcagggcaagtacagacatttctttgaagcctgccgcctgctgcagcagatgattgacatcgccatcgacgggttcctgctcacaccagtgcagaagatctgcaaatacccgctgcagctggccgagctgctcaagtataccacacaggaacacggtgattacagcaacataaaggcagcatatgaggccatgaagaatgtggcctgtctgatcaacgagcgcaagcgcaagctggagagcatcgacaagatagctcgctggcaggtgtctatcgtgggctgggagggactggatatcttagaccgaagctcagaattgattcattctggggagctgaccaaaatcactaagcaaggcaaaagccagcagcggacgttcttcctgtttgaccaccagctggtgtcctgcaagaaggacctgctgcgcagggacatgctgtactacaagggccggctggacatggatgagatggagcttgtggacctgggggatgggcgcgacaaggactgcaacctcagcgtgaaaaatgccttcaagctcgtcagtaggaccacagacgaggtttatttgttttgtgccaaaaaacaagaagacaaggcgaggtggctgcaggcctgtgcagatgaaaggaggcgggtgcaagaggacaaggagatgggaatggaaatttcagaaaaccagaagaaacttgccatgttaaatgctcaaaaggcaggacatggaaagtcaaaaggctacaacaggtgccctgtggccccaccgcaccagggcctgcaccccatccaccagcgccacatcactatgcccacaagcgtcccccagcagcaggtctttggcctggcggaacccaagaggaagtcctcgctcttctggcacaccttcaacaggctcacccccttccggaaatgaaaacaggaggctgtgcttccatggagctgggtgtcaagagaagaactgtctttgtttcttgtgtgcttcaatccagggaaagtttcttggacccagtgataaaaacttccttttagggatcaatgaaggagagaaggtcttggaatcaccttcagtctttggagacccagctgcctttgtggaagggaggagacggtcatgacacaaagctttatcctacacagaaacacccgtgacccactatgagatggcccagatgtgggacccggtaccatgctctaaagcgagtgattaggcagcagctgaagccacccctgctgatgatgagcaagtgcctgctgcaggtccaaacacagcatccagggctttgcagttcctaaggagtgatgaggttagaggatcacttctgcatttgattttcaaggatgccgtcaagacggggttgacacaatgctgcacgtgtctggtcacacttagaaattgagctcttactctcttctgtaatactgggggacctacagctgccgtggggctgaccacggtgttccctggcatcgtctgtgtccacacagatgctaactggtagtgcaaatgtcatcctgcaaggttcctcttcctgcaagcaaagtggagagaaagaagatgcatctgtcaccttcatcagggtcctcagtgcagagcaacttacgcatcctcaagaatccactgcttttcaggcaaggagggagaaatcctgctgcacactggctttgtcccggagtcggattccctcctgcctgcacgccttcagtaactccgagcagaaatcacatcttgcccacatgctgtaacctaagaaactgctatgcaaggctgggtgctgtggctcatgcctgtaatcccagcactttgggaggccaaggcaggtggatcacctgaggtcaggagttcgagacaagcgtggccaatatggcaaagcccagtctctactaataatacaaaaattagctgggcatggtggcgcatgcctgtaatcccagctactgggaaggctgaggtaggagaatcttttgaatctgggaagcggaggttgcagtgagctgagatcgcaccactgcactccagcctgggagatacagcgagactgtctccaaaaac

SEQ ID NO: 31375 - DNA, 2190 bp, Homo Sapiens
atggtgacgcacgccgctggcgcgaggaccttttgtgaggagcaaaagaagggatccacctattcagttccaaaatctaaggagaagttgatggagaagcattcccaggaagccaggcaggcagacagggagtcggagaagcctgtggacagcctccacccgggggccgggacagccaagcacccgccgccggcagcttcgctggaagagaaacctgatgtaaagcaaaagtccagcaggaagaaagtggtcgttccacagatcatcatcacgcgagcgtcgaatgagacgctagtcagttgcagttccagcgggagtgaccagcagagaaccattcgggagccggaggactggggcccctaccggcggcacaggaaccccagtacagcagacgcctataattcacatctcaaagaataaacaagcacctttgcatggcactcgctactccctgcgataggcgtctcgggaacagccgcctcaccctgtgagaagccgaggccccttctccagtgctctcggggaggttgcaccaggcccaccccaccctgtgagaaactgcagcccccttctccagtgctttcggggagggtgcaccaggcccgccccaccttgtgagaagccgtggcccccttctccagtgctctcagggagggtgcaccaggcctgcccccgccgtgagaaactgcagtccccttctccagtgctctcggggagggtgcaccaggcccaccccaccctgtgagaacctgcagcccccttctccaatgctctcggggagggtacaccagggttgccccaccctgtgagaagccgccgcccccttctccagtgctctcgaggagggtgcaccagggctgccccaccctgtaagaagccgccgcccccttctccagtgctctccagcccgccccaccctgtgagaagccatggccccttctccagtgcttttggggagggtgcaccagggccaccccaccctgtgagaagccgtggcccccttctccagtgctttcggggagggtacaccaggcccgccccaccctgtgagaagccgtggcccccttctcccgtgctctcagggagggtgcaccaggcctgcccccgccttgagaaactgcagcccccttctccagtgctctgggggagggtgcaccaggcctgcccaccctgtgagaaactgcacccccttctccagtgctctcggggagggtgcaccaggcccgccccaccctgtgagaagccgcagcccgttctccattgccatttggtcctgccttccccagagctgctagcagctcggtcgaggcaagagtgactggctcagagagcgagctttgtggtattgataaatgaataaattagtatgttcatgttggaagtggctggctctgcagagtgatggacagcaggtggcatcttacattgtgatttgtggtgcacagttaaaacacttcccttcgtttcagaaggagacaatgtgaatacttggaaattatagtgaataagatgcctcccaaacttgaggaaaaggtcagattctaagagctaaacgttaagatgtaatgttccagaacaaagaggcccagagtcactgaacggggccccagggctcctagcttgagtgtaatctgagtcagcttatgaaaaggccccaaagaagaaagtggaatgtgtgctgggcacatgggacagccatggcactgagactttggaagtggccttgccagcgctgtcctgtctttctggcccacagatgagggctcctgattgtggaaggccacggaagggacctgaacacgatggcacgagacaagttatctcctgtgactgctcctctccagcaaccctcagctcaggctagactttccccctgtgttgagaatgccctgccctgtgtggaagcctgatgcatttagtgacagtgtgttagctttgttagtttctagtctggccagcaggctttccatgtgatctgccattggcttgcttcagtggccagtggagccaggggtgtccaccagagtcttggacacagacttctgaggtggcagcgggagggagcctgctccctgccacacacgtacaatttctaatccatacaggcctgggtagtatatacacacatacgcagagccttaggaattgtgaaaggccaatcaaaacttggggccctaatttcactctgcc

SEQ ID NO: 31376 - DNA, 3293 bp, Homo Sapiens
catgccagcctcgcgcagcctgcgctgacttccccgagacgcgccgcggtcggcacggagactttctgggctctggatggttcgtgcgctgctcaccctcgcccacccctgacgccgcggaccgcagctcctcagccccgcagccccgcagcccagcagccccgcagcggcgccgaggacagtgcagccgagttgcgtctccctcgcgcgagcagccattgtttgatgtcctgtgactgagaaaccaggctttaaactttatgcctttggagatggagcccaagatgagcaaactggcctttggctgtcagagaagttccacatcagatgatgactctggctgtgcattggaggagtacgcctgggtccccccgggcctgagaccagagcagatccagctctattttgcttgcttaccagaggaaaaagttccttacgttaacagccccggagagaagcatcggattaaacagcttttgtaccagttaccaccacatgataatgaggtacggtattgccagtctttgagtgaagaggagaaaaaagagttgcaggtgttcagtgctcagcggaagaaagaagcactgggaagaggaacaattaagcttctgtccagagcagtcatgcatgctgtgtgtgagcagtgtggtttgaagataaatggaggtgaagttgcagtgttcgcctcccgtgcgggccctggtgtgtgctggcacccatcctgttttgtctgtttcacgtgtaatgagctgctggtcgacctcatctatttttatcaggatggaaaaattcactgtggcaggcaccatgcagaactgctcaaaccacggtgctcagcatgtgacgagataatttttgctgatgaatgcacagaagctgagggtcgccattggcacatgaaacacttctgctgccttgagtgtgaaacggtcctgggaggacagaggtatatcatgaaggacggccgccccttctgctgtggctgttttgagtctctctatgcggagtactgtgaaacctgtggggaacatattggtgtggaccatgcacagatgacctatgacgggcagcactggcacgccacggaagcctgcttttcttgtgcccagtgtaaagcctctttgttgggatgtcccttccttcccaaacagggtcagatttactgctcaaaaacgtgcagtcttggtgaagacgtccatgcctctgattcttccgactctgcatttcagtcagctcgatcaagagactcccgaagaagtgtccgaatgggcaagagcagccggtcagcagatcagtgtagacagtctctcctcttatcgcctgctctgaactacaagtttcctggcctctcaggcaatgctgatgacaccctttctcgaaaattggatgatctgagtctctccagacaaggaacaagttttgccagtgaagaattttggaaaggcagagtagagcaggaaactccagaagaccctgaagaatgggctgatcatgaagattatatgacgcagctcctcctcaagtttggtgataaaagcctctttcagccacagcccaatgagatggatattcgagccagtgagcactggatatctgataacatggttaaaagtaagaccgagttaaagcaaaataaccagagccttgcaagtaaaaaataccagtctgatatgtactgggcacagtcacaagatggactgggcgattctgcttatggcagccacccaggccctgcaagcagtagaaggcttcaggaattggaactggaccatggggcttcagggtataatcatgatgaaacacagtggtatgaagattccctggagtgtctgtcagacctgaaaccagagcaaagtgttcgggattcgatggattctttggcattgtccaatatcacaggggcttcggtggatggagaaaacaagccaaggccatcattgtattctctgcaaaattttgaggagatggaaacagaagattgtgagaagatgagcaatatgggaactttgaactcttccatgctgcacaggagtgcagagtccttaaagagtctaagttcagagttgtgtccagagaaaatcctgcctgaagagaagccagtacatctgccagtgctcagaaggtccaagtctcaatccagaccccagcaggtcaagttctccgatgatgtcattgacaatgggaactatgacattgaaatccggcagcctccgatgagtgaaaggactcggagacgcgtctacaattttgaagagaggggatccaggtctcatcaccaccgccgccggagaagtagaaagtcccgctccgacaatgccctgaatcttgttacagaaagaaaatactctcccaaggacagactgcggctgtacacccccgataactatgagaaatttatacagaataaaagtgcccgggagatccaagcatacatccagaatgctgatctctacggacagtacgcccatgccactcccgattatggcctgcagaacccaggaatgaatcggtttctgggactctacggcgaggatgatgattcctggtgttcttcctcctcctcctcttccgactcggaagaagaaggatattttcttggacaaccaatccctcaaccccggccacagagatttgcctactatacagatgacctttctagtccaccatctgcacttcccacccctcagtttggtcagaggacaacaaaatccaagaagaaaaagggacacaagggcaaaaattgtattatttcttaaccaagtagtgatgcagagcatttgtttaaaacttagccattaaccgtctgaatcgtttccttttcttccgtaggaaagttgtgaaaatagtttaaagtgctttctttgcccatgtaaatgagaactcaactgctgtttacagtgtcagattaacatttgaaaggtgtgatttctccaatttaccctctttggatggtgccaggtggacgtgacatctcgtgcctgcccggtgcgggtgcgttacagatggacgtagctgccttggttttccagtcctcaagggaatactgaagatgctgactgaaggggattggatgttgattttagaagatggagaactccagccacctttgtaaagcactagtgtttgtcatttatgtaagtcaggtcggctcaggtcttgatagtccgtcttggtgtgaggcatgcctgtcacgatgacctagctaacactgtgcatcttattgtgaggccagcttgtcccctcgaaccctctttggccaggtaaacattgtattgtatcagcgccagctacag

SEQ ID NO: 31377 - DNA, 2072 bp, Homo Sapiens
acattccggccggcgctctggctctgtacctggacagggctgcggtaggccagcggtgggctggcggttgcgctcctcagatcggcggcctttcgggcggtggcttgcgtttgagcctcagaaagcgaggagcggcctccacggaagccaagctggccgaggttgcagtccatgagctgggaaaggaggcagtgctcttgggagaaacagcagaggcctcaagtttcgggctgaagccaacagagtcccaaccagtgggcgtatcccaagatgaagaattttggaatacatacgagggtctgcaagaacagctcagcaggaatactcataaagagactgagcctgtgtatgagagggctgtgcctactcaacagattctagcttttcctgagcaaacaaacaccaaagactggacagtgacacctgagcacgtcttgcctgagtcccagagcttgttgacatttgaagaagtggccatgtatttttcccaggaagaatgggagttattggatcccactcagaaggccctctacaatgatgtaatgcaggaaaactatgagactgtcatctctctagcattgtttgtgctccccaaacctaaagtgatctcctgtctagagcaaggggaagagccatgggttcaagtatccccggagtttaaggatagtgccggaaaatctcctacagggttaaagctcaaaaacgacactgaaaatcatcagcctgtgtctctttctgacttagaaatacaagcatcagcaggcgtcatatcaaaaaaggccaaagtaaaagttccccagaaaacagcaggcaaagaaaatcattttgatatgcacagagtgggaaaatggcaccaagattttccagtgaagaaaagaaagaaactttcaacctggaaacaagagctgctcaaacttatggatcgtcacaagaaagattgtgcaagagagaagccttttaaatgtcaggaatgtgggaaaaccttcagagttagctctgaccttattaagcaccaaagaattcacactgaagagaaaccctataaatgtcaacagtgtgataagaggtttagatggagttcagatcttaataagcacttaacaacacaccaaggaataaaaccatataaatgttcatggtgtgggaaaagcttcagtcaaaatacaaatttacatacacaccaaagaactcatacaggagaaaagcccttcacatgtcatgaatgtggaaaaaaattcagtcagaactcccaccttattaaacaccggagaacccacacaggtgagcagccatatacttgtagcatatgcaggagaaacttcagcaggcggtcaagccttcttagacaccagaaactccacctgtgaagagaagcttgtccagtgtcctcattctgaagacattcaccaaatggagcttggcactaaaatttatgtaaaagaaaaatcacaaaccttgaaaaattttacatcagaaaatgggataaacatacatttcacagaaaataatcaagacttgctctgcagccactcagtagtcttctgtggtcacagaagtaaacattgttggctttgtattgatctctccagtcatttttggacacatccaatagaaacattggcagcatggtcttccaaaacaaaaagcagtaacatgcatgtttaattgcataccattctcttcacagtagcaggcttaccaatttccatagtctcatgaggccgaaatgaattacaatgtaaagtgttccaggaaccaaattggattttctttcttttgtcattgggcacggtttgcaaagttggacatcacttgagttccttcttaaacttttcggcaacttctcttggatcctgttatcacagttttttactgtgatgaaatcttgttaaccaccactagggaatctccagatgaactattaatgcactgtcttatgcctctcattggtgatgtttggaaagtagaagacatctctaatggaatcatgggggaaacgggttggaatttgtagccatggaatatatattagatgtaaagaattttctgcaataaaagaaactagacttgtt

SEQ ID NO: 31378 - DNA, 7121 bp, Homo Sapiens
ggcccggcccgcggcggcggcaaaggggcggaggggttcgctgccagcaattgccaagctgctgcggtcgtggcgggatggtatagccgggcctgagggcgggcggcggggcgcgggcgggggcgaggcggccgggaagggccgacgccgcctgactggcttgggagcagcggcagcaagctgagggggcgtcgccgccgccggcccccggcgccgccgcgggaggccgcgcccgccatggcggcccgggcggtgctggacgagttcactgcgccagctgagaaggcggagctgctggagcagagccgcggccgtatcgagggcctgtttggcgtgagcctagccgtgctcggcgcgctaggggctgaggagccgctgcccgcgcgcatctggctgcagctctgcggggcgcaggaggcggtgcacagcgccaaggaatatattaaaggaatctgtgaacctgaactagaagaaagagaatgttaccccaaggacatgcactgcatttttgttggggcagagagcctgtttctgaaaagcttgattcaggatacttgtgctgacctctgcattctggacattggccttcttggcatcagaggaagtgctgaggctgtggtcatggctaggagtcacattcaacaatttgtaaagctctttgaaaataaagagaacctacccagtagtcagaaagaatcagaggtgaaaagggaattcaaacaatttgttgaagcccatgcagacaattacacaatggatttgttgattttgcccacttccttgaaaaaagaacttttgacactcacacaaggtgaggagaatctctttgaaacaggagatgatgaggttattgaaatgagagattctcaacaaacagagtttacacagaatgctgccacagggctgaatatttctagagatgaaactgttttgcaggaagaggcaagaaataaagctgggactcctgtttctgagcttacaaaacaaatggacacagtcctttctagctcaccagatgtgctttttgatccaataaatggtctaaccccagatgaagaggcactttccaatgagagaatttgtcagaaaaggagattttctgattctgaagaaaggcatacgaagaagcagttttctttggaaaatgttcaggagggggagattttacacgatgctaagacattggctggaaatgtaatagctgacctatctgattcttctgctgattctgaaaatttaagtccagatataaaagaaactactgaggaaatggaatacaacatcctcgtaaacttttttaaaaccatgggctactcccaagaaattgttgaaaaggtcattaaggtgtatggaccatctactgaaccattattgctcttagaggaaattgaaaaagaaaataaaagattccaagaagacagagaattttcagctggtacagtgtatccagagaccaacaaaaccaaaaataaaggtgtttatagcagcacaaatgagcttacaactgattccactccaaagaaaacacaggctcacacacagcaaaatatggtagaaaaattttctcagttaccattcaaagtggaagctaaaccatgtacctcaaattgtagaattaatactttcagaacagtgccaatagaacagaaacatgaagtctggggttcaaaccagaactacatttgtaacacagaccctgaaactgatggcctttcaccttctgttgcctctccaagtcccaaagaagtcaattttgtttcaaggggagcttcaagtcaccagcccagagttccactttttcctgaaaatggtttacaccagcagccagaacccttgcttccaaataatatgaaatctgcctgtgaaaaacgtttaggatgttgtagttctcctcattctaagccaaattgctcaaccctttctccaccaatgccactgccccagctgttaccttcggttactgatgcaaggtcggcaggaccttctgatcatattgattcctcagttactggggttcaaaggtttcgagatactctaaaaataccctacaagctggaattaaaaaatgaaccagggagaacggatttgaaacacattgttatagatgggagcaatgttgcaattacccatggtctgaaaaagttcttttcttgtcgtggaattgcaattgcagttgaatatttttggaagcttggcaacagaaacatcactgtatttgtccctcagtggagaacaaggcgtgatcctaatgtcacagaacagcacttcttaacccagctccaggagctcggaatattatctttaactcctgcccggatggtctttggagaaagaattgcttctcatgatgacaggtttctactacacttagcggacaaaactggtggcataattgtgacaaatgataatttcagagaatttgtgaatgagtcagtctcttggagagaaattattacaaaaaggctgctgcagtacacgttcgtgggggacatatttatggttcccgatgatcctctgggaagaagtggacctcgattagaggagtttcttcagaaggaagtctgtcttagagatatgcagcccctactcagtgccctgccaaatgtgggcatgtttgaccccagcttcagagtccctggcacccaggcagccagcaccagccaccagcctccgacccggattcagggagccccttcaagccactggctccctcagcagccccacttcccactgctgccagccctccccagtctccagcagaacctgcccatgccagctcagagatcttctgcagaaaccaacgagctgagggaagcccttctgaagatcttccctgactcagagcaaagactgaaaatagaccagatcttggtggcccacccatacatgaaagatctaaatgcgctttctgccatggtgttggattgaagattgtgctgagcgctgagcttgcgctcagggctggctgatcaaactcaagctcacacctgtacctgatgggaatgaacataatgtgaagaaacttatttcccagtgtaaacgcagttgtacagaaaaaaaatgttttgggtataaatctgggttttcaaaaccagcttttttctatatataaattatgctgctattacagatttaacattttctgttaaaggaaagtctacattttctgcctgttcagaactgtttaatagcagttactcttgagtgtatttacctttttatgttttttaaactattttccttaaagccgaaaatattgacaaatggatatggttagcctttataaataaataaaaaaaaaagtgttgctttcttaaggaaagcaagacgtcttaaagtatattttcttgagatgagtatgtcccatcactaccatgaagtgtgctcacccttccagcctcctctgccctcacccccggagttaaagtgggtaagagttggtttgttctgcagtctttggttggagtgttgtgaaagtggacccgcggtgccactagatggcacttggtgcctagccatggtgaatgaccagggcgaagttagtctcacagaataccagggctagaagacatcgtggagcccatggagtcccaccctccttcccccttccaccctgcgcaaaaggggacggcccagtgtgcacgccgtccggccatgcccacagccacagccacagctgaggagtggccgggcaggcagcaggctccccagccagggcttgacacgcccacagtcaggggcctccacatgcctggcctggctctggaagtcacgtcttagcttctgaacaccgtagcgggttatgaggaagtttaatgaagagcccggtcactgtggccatcttgtgtccccaactgcaggagacgccctgatgtggagtttgtacagctttgccaaaaaatggttttctattctcaaaagtgacccaagccaataaatagcattagtagcttctgtggggggatcccagagcccctgtatttattttccctgtgtttgtctctagtgtcctcctaaacagcctttcctgtgagtctttctcagaattgatatcttaatattgtctgttctaggtgttgcccaaattcagtgtcagtgaagttcttttcctgggcaatcttaacatctttactcttattgtctggaccttcaaagggctttgtattttacacctgcgcccccaggctgctcacagtcggcttgctgcctgtcctgcctgtccggatcttgtctcctagtcctgaggagcggaggctgagaactcagtgctggtttgtaaatggtgaggggacttgggggcatcccagagtgctccctccaggcctgcttcttggttttgtttgatcactgcgttcttcaagggatgaatccagagccctccatgaggccaagcttgtccttcaatcatgtttcctctcagatgcgtccgtgatgcctcctaatgtggaactggttgtccattgtttgggcctatggccaagtcacccagctgtggaagcagaggtagaagacgaggccagccaggagggcgacttcagtcacagctcccatgcctcagctttgtacctgttttcaaaagcacaactgaggtgtgcgggctggagctgtcttgcagtgattctggccttctggctcatggttcagtccagcagcctggctgacccactatttctcctctgcttcagaggaaacccaggaaatgcccttactgccaggctgagtctccacccatgctggttggtgctggctaggctgagggggccaccacttttcctggctagaagctacttgacctttgatgtttgagttctgtaagtcttcgtgttctgacttactgcttcagagggattggcctgtcccctttccctttctcggctatgggaaggaaggattgctcattggttgccttcatcagttacagcatgagacggaattcatcattccttccgaaacccctgatatttaatatttaatatttaaaaacccaaattatcaaaccattaagaactcattactggttctcagcctcctccagtactagcctcagtgtggctgctgcataagtatctgtagcctgtctacctcctgcagtggggccgctcgcctcttccctgtctactgctcaggctctcccacttcgtggcatccatgtaaagtaggtggcagggcagagatgtcactctcattcaacagggaggatgtctgttgctcagagaggttgtcctgaggggctgggtgattcctgggcctacattcttcccgaggctccaggccgctgtctctggaagtaaaagagccttgtctgaccttaatgcaagcagtctgtttgaacccctgtaggctgcattcaggagacagaaggtgtctgggccatcctgggcggccggtcagcgttgctaggcaggctcggctgtctggccgggacttgggcctgggtggcttttgagaccagtgaagaagggagagccggcctcatgccgatgcggcttgtggcacggctgggatgtgagggaggactcagatctacacacagaaacccctcttctccccgccctcccccagctcctacctgcctcccacgcctcaggtgtggctgcctgtgggaccatcccccaacccctttcctcgcacctccttgtcctcacccagttcctgcagtgtctctgacccacgcctcccgcctcctggccgacttgcccaggaggtgtctctggctcacctccgtctgttcatcaccttcctccccagtgtttccacttatcttggatgttttagattgaaacagcctgattcccggaagaatcctcttcattcattgctagtgcttcccctcacctcccactctccacttcccagtttgcaaatgtggctttcgcccaccaagtgaaagcggactgagagcagcccttggggacggcccggtgcctggctgcaaggccgcgctggggctctgtcttggtgcacatggcttgaccggactttccctgcttcccaccacttccctcactcccagacctccctcattctttttgtctcttctttttgcctaaagccagtccttaacaccctattcttcctctgcaggtggcttgcagacttttccccacctttggggctcgtggtggtggagagggcagctggtgttaagaatgtaggttaccgggcatgacccggcagatgcttgcccagtagttctggaggaaggcccgggaatctgcaaatgagcgcattccccaggcagttcccatgcaggtgatccacggaccacatgttgagaaactgcagtcacccttagggccacaccgtccctctcctcgctgtcccctctctgtagtgactggccctgaccttcaggagtgcactttccactctaccaggaagccctatgacatcctcaggctccccagacctgcagcttgcatggggcccctcccttcttccacacccaccctccgtatggtcccctgctctgccctcgtgctttgctggcccctgcccgctactcccactctcagacacccaggggtggtgggccctaactggctggcccctcccagcgctgccctctgccgtccagatgctgcagtgtggccagatttaccttccagtaacatacttctagtcacccctcctcctgcgaagtgatctgcagtggctgtttgaccagaccacaaagttcacatctcctgagcttagtgtccgtggctgtccacctcccagccatacttgactgtccccaaactctccctgcagccacatgtttcccatgacctgtgggctctgcagatggacctctctccgctagagatgcccttctcccaaatggcttccctcctggaaggcccagcctgagtcctcgtctcctttccagtgcttctgccagaagcatccccatgatgttgtgaccgcacagcactttgtgtctcgctttgagcacttgccactctggctggtgctgctgccactgattgtgtactgtcttgctgccctttctagactgtgagctcctcgtgggcagggaccgcctgtgttctctgtatttcccacggcgcctagcacagtgccttgcacttgataggtgcttaataaatgtctgctcaactgaaaaaaaaaaaaaaaaa

SEQ ID NO: 31379 - DNA, 3513 bp, Homo Sapiens
ggaggaggctgtgctgcaccagcacctcttgctccacatctccagagagcccagggccctgtggccgagtgtgtccagcccagtgtcatggggagcttccatatctcatggctccttgctgggccaagccctccagaaccccaaacccccaaagactgatgaatgccagagtggccaccttgcttatctgtggccccggccctggtgatcaccatggcagctgggaagggagccccgttgagcccatcggctgaaaacagatggcgacttagcgaacctgagctgggccggggctgcaagccagtgctgctcgagaagacgaaccgcctgggccctgaggctgctgtgggcagggcgggccgggatgtgggcagtgcggagctggcactgttggtagccccaggcaagccccgacctggcaagccgctgcccccgaagacacgtggagagcagaggcagagcgccttcacggagctgccgaggatgaaggaccggcaggtggatgctcaggcccaggagagggagcacgatgaccccacaggccaacctggtgccccacagctgacccagaacatccccagaggcccagctggcagcaaagtcttctctgtgtggcccagcggagcacgaagtgagcaaagaagcgcctttagcaaaccaaccaagcgaccagcagagaggcctgagctaacctcagtcttccctgcaggggaatctgcagatgccctgggggagctgtctggactcctcaacactacagacctcgcttgttggggtcgactttcaactcccaagcttttggttggtgatttgtggaacttgcaagcattgccacagaatgctccactctgtagcacttttctgggtgcccctacactgtggctggagcatacccaggcccaggtgcccccaccctcatcatcctccaccacttcgtgggccctcctgccacccaccctcacctccctgggcttgtccacccagaactggtgtgcaaagtgcaacctgtcctttcgcctaacgtccgacctggtctttcacatgcgatcccaccacaaaaaggagcatgcggggcctgacccacattctcagaagcggagagaagaggcccttgcctgccctgtgtgccaggagcacttccgggagcgccaccacctctcccggcacatgacttctcacagctagcaggtgaccgcagaatgacctgctgggtgcagcagccagcctttggcagaggggggctccctgggcctgcgttgagggggctgtcatggtcctttgcagagctgctgcttttggcattcatagataaacagctcaggcataatttgaaaaagccacacctgcatgatgtgttttgaaggaaatgaagtcctgaaataaagtgatgggctttgcaaatccagggtagaggccctaacaggcacagagagcaggggcaactcctggcacacatcatgggctttggaggcacacaagcctggattcgaatctgggctctttcacatactagctgtgaccctggacaaagagctttaacctgctgagtccccattttctcatctgtgaaatggagatgataacactgtgtcttaggttggcattcaggtcacatgaaaggtgtgtggaaagtggccagcattctgcctgcagaccctgagcactgagtcaacaaggtttgtgatgatgtctgtactagttagctattgttattaacaagatctccatggcagacaagctaaagcatctgcctaagtcgtgagtctgtgggttggctcaggttaagctgagcttggctgggcttggcagcaagtctcagatttgatcaagtcatattcgttttcttcttcggctggtgggctacccagagcgagcacgcttctctcgtggtcatgccaagaacacaggagggtgagtctaacaagcacacctcaagcctctgcttgggtcacattgccaatgtcctctcagcccatacaagtggcaggaccaggcccaatattaaggagtggaaaagtgtaggctgcccttggtgaagctgtgacaagggagtgaccatccatcccctccacaggagggtgaggaattgggacaggtaattccagccaatacctggtccatagttcttcacattgtgagtatatgaatacggggaaatagaaccccctccccaccacctacacacatgctgttttaccttccaagaataggacatgtgcaaaaactaggcttccagatcgtgaggctggggagcattctaggtaccatttattatctactgcgtttcggtcagtagctgttgtaggtacccgcatcagcccttgttcctaaggatgtgtggagcccaggctgtactctttgacattccacaggtcagtctgcgtgaaagccctttgtggggagtttccaagccagtgtcgtttttgcactggtttccacctcactgtcagatattgttcttttgatatgcagtttccagccctccaatgagtccccagcacagatctcaggcttgtggctgggaataagcccagctgagcaggtggggatctcagccagcctcccagactgcacctcttctattgctctcctctgtccaccgttccaggcagcagcactcccacctggctgctctgatgtcctcgctccctccattcctgcctctcaccatgcacgcatccattgtccacacacacacaaccagataatcttctgaaagtgtaactcagatgatgcctccaaccctgtggctgcccttcacacttacaggcctaaccccagcaggacctgccagctgcttcatgaacaagtccctgcctcatgttaattgcaagcactcatttcactctccctgtgtgccaggcaatagcataagcactggaagaatacagatgttatagtgagtcctacaatagccctggaaggcaagagctgtttcctttccatttctacaatgagtcaattgcagatgatgctataacacttccagtgtttctgacacttccctgaagctatacctgctaccttcatgggccgagcttgcccttatgaggcccacaggtggcagtgggcagaggggaccccgctataccacctcgctgctgttccactgtctgctcccgtgttctgaccacagctctggtgccgtttctcaagcctgggcttcattcaacattttctatctagctcttcatggtgctgctcctgctatggttccacagggcttcttctcgcaggtcagctccttagagaggtctcccagattccccgtaaagcagccctgcagcctctgcctctctcagccgcatcaccctgttgcttccttcacagcatgtctcaccatctgcaaccatctttctgtttgtcgtcttgttgatttgctgcctccacactgtcagctccttgggaacagagattggtttgtttactgtgcatccctggtgcccagaacagggcatggcatattgttggtgcataataaatattgtggaaataaaaaaaaaaaaaaaaaaa

SEQ ID NO: 31380 - DNA, 4097 bp, Homo Sapiens
gtggcccagaggcgcgagggccggcggagtttcttcagaggaactaccgccctgggaggaagcgtctgtttagtttcaacacagacgactgggcttgggagcctacgaggttgcagtctggagggcgccaacagcagctaccagggctgcttttcctgaacacgctgcaagcacgtcaaggtagtcggagtcccctaacaatggataaattcgtcattcgaacgcctagaatccagaatagccctcagaagaaagattctggaggaaaggtttacaagcaggccacgattgaatctctgaagagagttgtggttgtagaagacataaaaagatggaaaactatgctggagcttcctgatcaaaccaaagagaatcttgttgaagccttacaagaattaaagaagaaaataccctccagggaagtgttaaaatcaacaaggataggtcacactgtgaacaagatgcgtaaacactcagattcagaagtggcttctcttgccagagaagtttacactgagtggaaaactttcactgaaaaacattcaaatagaccttctattgaagttagaagtgatcccaaaaccgagtcgttgaggaaaaatgctcagaaattactctcagaagccttggaattaaagatggatcacctactggttgaaaatattgaacgggaaacgtttcatctctgctcccgcctcattaatgggccgtaccggcggacggtgagagccctggtcttcacattaaagcaccgagctgaaatccgggctcaggtgaagagcggctcgctgccagtcggcacgtttgtacagacccacaaaaagtgacctgaggacggttccagccctgggccaggcagagaggaaaatgggcctgtctctgccgttcaaagacgcttttgagtttgggtgatggctgatgctggctgtgctagattttcccatggtgccgttcctttgcagacagaggattcggagagccctaggagacaggcctgcaggaatgtgcttcattagctgcagtgcgctggtgctgcctaacagaacgcacactggctgtcactaggaagcgccatacggttgctatcacccaacatggtgaaagggtgatggatttcactgtgaatatgccaaggacacctctaaacttcccccatgtcagtcagatgaagttactactatatttcaccaccctgcaggtaactgaaactcaattaccgctgccgctcactcggttccatccccctgagtttagatagctctggtgcctctcagaactcccctgtctgttctctttgctctatcccaggggtgagcctgcgagagccagccaactaccccttcttcccagagctcacttatctgaacgtttcagctctccctggaagaccttctgcgttggtctccagagcccccatgctggggctactaatgaggaactggcccgaagcctcccacacctcagggtttatttgaatacgctggcgctctcagtttagggctctgtagaagatacataatgaaatttctcttgaaatgaattactgcagtagaaaaaagtacatacatatatatgttaaaatgaaatatctctacacaggcctgttttaacaattacgtaaataatacttgtttttttaaaagtaatagtaagctgggaacttttttttctaaaacaaaaggtggagttcgttcactgaaaagtgttttgagttgagaaagggtacagttggtgaaatttaaaaatgatggaacaaggatttgaggaatgtagaagactcaaggaagtggggattagattaggggagactggagcacgtttgtaatctgaaaggaaagagctggtagaaggggagagatttaaaatccaaaaaaaaggaagatgagttgaaaagcaaggggagaagggacgggactaacattattgcctaccttctaaatactaggcacttttcctaagacagtttattaacctttacctggatctttatatagttttgtaaaaatattgcttacttctctcacccgttgtattaagtaggtattgttgttttcattttttagatttattcgtttatttagcaaccatttcctgagcatccattctgtggggtaggtgtatactgagcagtagttacaaatgggagcctgaggctcactgaacagaaacatcaccttcaatttcctactgctagtaactattggagctagaataataataatcgagcgtttaccctgggcccagcactgtggtaaccattttacaaaaagaaaatacccagttaaacatgagaaaagtgaggctcagaaaggtatagtaacttactcaaggtcacgcagatagtgaatgacagatctaagattcaaaatccgggtctatttgattgtatatggttgccttggatgatttcatctactctcatgttttcaagcatcatttacatgctgatgacattccagtttgtatcgtcagcccagacctgtcccctgactttcagatgatatttcctagatgccccatagacatctcagatataacatgtcttctttccattggcagtaccagcaagccagacactccagctaggaactcaaggagtcagcctagaccccacatctcccaccctcagccaaccaagtcctggtggtttgattaggttggtgcaaaagtaattgtggtttttgccattacttctaatatattacttctttgcatttgctgttccagttgcaatgctctttccccagacatctgcatgttcttgtcctcacttgctttaggtctctctttcccttatcaaaaaggcttttgctgactatcctaaatacaatagcactccctcccaactattctttaatgctgtgcctagctttatttttcttcagaatatttattactctttaacatagttatttctttattgtctatctccccactcccagaatgtaagcttcatgaaagcagagtctctgttctgttccctgttatatctccagcatctggaacagagcctgggacaagctaggtctccataactatttattggatagttgagtgactggttgtggatgtacagtataagcatctaattcaatcagggagtgcttcctggaggagctgatacctgtgttcagtcttaaagggcaggagtttggataggggaatgttagttaatagaatgaaaatttcaaaattaaagggcaggagtaattaattgggtggttgagatgcatgcctggcagagcaagcagagtatggaaaaacccagaagtggagatatctggaaggtgattggtatggctggagtagaggacactggcaggagagtagctggagatgaggcaggagaggaaggcaaggaccaggatcaggtttgaagggtcttgagcatcaggtgaaggcgttagactgatttgaagcaggaactggtcacttttgtgttaataggctatgtggaagagaagctggggtagggagacaggaagtagcaagcttcatgtttaaagaaccaaagagttctgctaacttaggaacccagagtaagttgaaaacaaattgctctctggctgaaagccttcagtggtgatagttggaaagtagaatgattgcagagatgtgctttggagatttggaaagcaggctgtgttatttgtggctgttttctccttgatgcatgtgcagaatttccatgaacgctaatggagctattctgagcatttgctgaagggaaggaagcttgcagacatccctcccaatcttgcccacacactgagaagtaactcggagctacagtctgttaaaaatgaaaaggttgaggccgggtgcattggttcatgcctataatcccagcgctttgggaggtcgaggcaggcagatcacctgaggtcaggagtttgaaaccagcctggccaacatggcgaaaccctgtctgtactaaaaatacaaaaattagccagatatgatggcaggcgcctgtaatcccagctacttggaaggctgaggtatgagaatcgcttgaacctgggagatggaggctgcagtaagccaagattgtaccactgcactccagcctgggcaacagagtgagactctgtctc

SEQ ID NO: 31381 - DNA, 2245 bp, Homo Sapiens
attcattcaacaagtttttttttttgagacggagtctcactctgtcacccaggctggagtgcagtggcgcaatctccactcactgcagcctccgcctctggggttcaagcgatcctcccacctcagcctcccaagtagctgggattacaggtgcacaccaccatgcccggcaaatgtttgtatttttagtagagacagggtttcattatgttggccagactggtctcaaacttctgacctcaagtgatccgcccgcctcagcctcccaaagtgctgggattacaggcgtgagccaccgcgcccagcctcaacaagtatttattagcaggtgttcggatcgggcagagacatggtcccctttccctgcagataggtgaagaaaagcaaaatgatcaacatggaatttgcaagtaaccaatgaccgtcagattccatttggagaaggcaggtgtctctaaggccagggctcaggggaaactgaggcaggaagccctggccgctgctgggatggggctcggggcctgggatggcctgtaatcagctttttcttcccggcagcgcccgcaagcgtcctattccatactaccggcccagcccctcttcctcctccagctgcttgagcagcgactactcgacccggagccacagccgcagccccagccccggccacagccacgggagctacagcagtcgcagccatgggacccgcagccggacacgcagcccctcgaggacccccagtcccagctaccacagccggagcagctctgagagcgggggcttctgagcccagacagactcagcttggtgcccccctggcactgggagaggcgaggggcgggccccaggaccccagtggggagggggctatatctccttgcccccaaggctacaaagaggtctcagggccagtgcacgggcagatgggaccggggaagactttgagggtgggcatccagtggacaaggagaagccagatgtgctgcttctacgggtgtcctctcccacctcctgtccacccactgtgcccggggaacaaagagccgttacgaacacaggaatctccccatcccccttcctgctgatgccaactcaccaggcttgggactgctgccggtggatggtaccagagtccatgatctgctctgtcacttcaccttagctcagtgcagccagggacaccttgcaaggtgccagccctgggagcccctcttccgcactacacagctccctccactcctctcttatcactgggcagacgaggaggtggtacagcacatgggtttggagctagacagaaggaagaacagcctaacccttggtgcacccccatccaagctggggagctgcatccttttgagctggctgcaggaggaccctggctgagggctggtggctggccccacagcctcccccaagctcctccactgacccaggagtgcccagacgggtggcccccaaaatcccagcctggggagctaggcacctcactcttggtctgacctctccaggccaggctctcctcaccccatgccctgggccaaggtcctaccagccatgactactgcatgacaagaggtggggggtacagacctcaggtacatttgaccctgaggttaaaaggggttcaggtcaagaggtgggagaggaaaggggtagatgggaggtggaatctgtaggaaagagaaaaagcaaagtcgttcactgactgagtagcccccagggagtggagacgggtccctggggagggagcagctgacaggtcagcagtgcccccagccccacccaagaggagggcagcgtgtgcctgtggtctgggacgtgggctggatggcagcccagggtcacaggcataggataacatgtgctttggacctgacaagggagtaccttgggggtctgatggggtcatggccagccgagcctctgtagagatggaggctacagccctcagaagggaggggaggaaagagactgagggccctggcctggggcgtcgatggggaagcggtggcccccagtcctcttctgctgctcccagccccctcctcctggggccctcagggatctcatgaagtcttccttggcccaaccaggcagatgccccgggctccagtggggggaggggtctggggtctggtccgggttccccgctttctctatgtcccccctccctctttctccgcagtgcggataaaaattggactcgaataaaacccttggtgcccggatggtaggtggtgag

SEQ ID NO: 31382 - DNA, 5879 bp, Homo Sapiens
gtgagaaggcggcggcggcggcggagtagcagccggacgagacgtcccagcggctcaggcgctgcccagcgccggccctggcagggagcctggtggggtggcggagggggagactgtgccgtggagggcctcgccatgtcctgctgcccgacttccttgtgaaacctcctagtagaaaaagttcttgggacaaacttcatttgacttcaccataagggaaagaagagagccttgttggacactgaagaagggacggggatttctcctcctaatctgggcctcttgtcatggatgaagagactcggcacagccttgagtgcatccaggccaatcagatctttcccaggaagcagctgatccgggaggatgagaatcttcaggttcctttccttgaacttcatggagagagcacagagtttgtgggccgtgccgaggatgccatcattgccctttccaattacagacttcacatcaagttcaaggagtctcttgttaatgttccattacagcttatagaaagtgttgaatgccgagatatatttcagcttcatttgacttgcaaagactgcaaagttatcaggtgtcagttttcaacctttgagcagtgtcaagagtggctgaagagactgaacaacgcaatccgaccacctgctaaaatagaagatctcttctcatttgcataccatgcttggtgcatggaggtctatgccagtgaaaaagagcaacatggagacctgtgcagaccaggggagcatgtaacttcaaggtttaaaaacgaggtggagaggatgggttttgatatgaacaacgcctggaggatttccaacatcaatgagaagtacaaattatgtggtagctatcctcaagagctcatagtgcctgcctggatcactgacaaagaactggaaagtgtatcaagtttcaggtcctggaagcgcatccctgccgtcatctacaggcaccagagcaatggagctgtcattgcccgctgtggacagccagaggttagctggtggggctggcgaaatgcagatgatgagcatctggtacagtcagtagccaaagcttgtgcctctgactcccgatcgagtggcagcaagctgtcaactaggaacacttctcgagactttcccaatgggggagacctttctgacgtggagttcgattcttctctgtcaaatgcttcaggagcagagagtttagccatccaaccgcagaagcttttgatcttggatgcacgctcctatgcagctgctgtggcaaaccgagccaaaggaggaggctgcgaatgcccagagtattacccaaactgtgaagttgtgtttatggggatggcaaacattcattctattcggaggagttttcagtctctgcggttgctgtgcactcagatgccagatccgggaaattggctatcagctcttgaaagcacaaaatggctccatcacttgtctgtgcttctgaaatcagcgcttctggtagtgcatgctgtggatcaggatcagcggccggtgctagtacactgctcagatggctgggaccgcaccccccagattgtggcattggctaagctcttgctggacccttattaccgaaccatagagggtttccaggtcctcgtggaaatggagtggctggattttggccataaatttgctgaccggtgtggtcatggggagaactcggatgatctgaatgaacgttgcccagtgtttctgcagtggcttgactgtgttcatcagcttcagaggcaatttccttgctcttttgagttcaatgaagcattccttgtgaaactggtgcagcatacctattcctgcctgtttggaacattcctgtgcaacaacgccaaggagagaggggaaaagcatactcaggaacggacatgttccgtgtggtcacttcttcgggcaggcaacaaggctttcaaaaacctactgtattcctctcagtcagaagccgtgctgtaccctgtgtgccatgtgcgtaacctgatgctgtggagtgcagtgtacctgccctgcccatccccaaccacccctgtggacgacagctgtgcaccatacccagccccaggcaccagccctgatgatccccccctgagccggctaccaaagactagatcatacgacaatctgaccacagcctgtgacaacacagtgcctctggccagccggcgctgcagcgaccccagcctgaacgagaagtggcaggagcaccggcgctcactagagctgagcagcctggctggccctggagaggatcccctttctgccgacagcctagggaagcccaccagagtgccggggggtgccgagctttctgttgcagccggagtagctgaggggcagatggagaacatcttgcaggaggccaccaaagaggagagtggagtagaggaacctgcccacagggcaggcattgagatacaggagggtaaagaggaccctctcttagaaaaggagagcaggaggaagacacctgaggcctcagccattggacttcaccaagacccagaactgggtgatgctgctctgaggagccatctggatatgagctggcctctgttctcacagggcatttctgaacagcagagtgggctcagtgttctcctcagttctctccaggtcccccccaggggagaggattccctggaggtccctgtggagcagtttcgaatagaagagattgcagagggtagggaggaagcagttcttccaatcccagtagatgcaaaagttggctatggtacctcacagtcatgttctctgctaccttcccaagtcccttttgagaccagaggaccaaacgtggacagttctacagacatgttagtggaagataaggtgaagtcagtaagtgggccccaaggtcatcatagatcttgccttgtaaatagtggcaaggacaggcttcctcagaccatggaacccagcccttcagagacaagcctggtcgagaggccccaagtggggtctgtggtgcataggacttcccttggcagcactctcagcctgacacgttccccttgtgccttgcctttagccgaatgtaaagaggggcttgtgtgcaatggtgccccagagactgaaaacagggcctcagagcagcccccaggtcttagcaccctccagatgtaccccacacccaatgggcattgcgccaatggggaggctggtaggagcaaggactcactgagccgtcagctgtctgctatgagctgcagctctgcccacttacactcaaggaacttgcaccacaagtggctgcatagccactcaggaaggccatctgcaaccagcagccccgaccagccttcccgcagccacctggacgatgatggcatgtcagtgtacacagacacgatccaacagcgcctgcgtcagattgagtcaggccaccagcaggaagtagaaactttgaagaaacaagtccaggagctgaagagtcgcctggagagccagtacctgaccagctccctacactttaatggagactttggggatgaggtgatgacccgttggcttcctgaccacctggccgcccactgctatgcgtgcgacagtgccttctggcttgccagcaggaagcaccactgcagggacactgaccgtgttgatcaaacgtggaattgtgggaacgtattctgctccagttgttgtaaccagaaggttccagttcccagccagcagctctttgaacccagtcgagtatgcaagtcttgctatagcagcctacatcccacaagctccagcattgaccttgaactggataagcccattgctgccacttccaactgaagctcagtgacctgggtgggcagtggccaagctgctgttcctatgacaggcccactcaacctgggcagaccgagaggcccgtgcactttggaatgggagcgtggaaccacctgtacagagtgacagatttgggatgcaccactggattgtagattgatttttctttcctgtccccctactccctccctaccttttccatcctcctcctctgccttcaaaaaaggaaactttcccttggttgtcttaattttttttttttttgatggaagaccaagggttgccaggcccactgtaactgccgagctgcctgctgtcacgtgacactgagggatggcttgtttcttccgggtgggaggatggtggtcagagccaggagtatggagatctgagaccgtgagcagggaagaaagccagtgctaacatgcaaccattcctcacgccaccgccacatcagagctggttgggaaccctttgctgctggggaggctggaagcatattccccaagagcactgccctgggcatcatctccctcctgcgaggagctgagccagtcccctcacagatggataaatgaggctgatgtttggagggagaggcacacggtaaatggcatccccttaggcgcctctttgggaaaggaaagtggatgctcctttgaggcaggcgaggggctgggagtgggtagccgtcatgttgtcccccgtgggatcccatttttaacttgacccagattgtcttgggctccttttactttcagggggctgctttcctgggccaggctgtgtagcacttcccaccctcaggcatgagtacagactggtcaaaatgtttatgcagtcaaggccaaagcctgccctgagcccagacacacctgggtccccattctggggcctggtcccctaaacaatctcttcctcagccagcacagggaaatccagactcagggttccagaaatcccccgttcccaaaccaaaccaatcatggatcttccctttaaggggtagaatcagcctttagagttacaagcccctggaaaagggagcaggtcccatacaatcagcctttctcctcttctcttcttgggacaggaataactgctgagcagtccccctttgccactcctggctgtctgagtgggcacttgtctggctgctggccagcagtgaagggccacttggtgacttcgtagggttccttagagaagtgacatggccttgaggagattcagggcacctttcctcagtgagctttgatatggtccaaaaacagccttaaatcaagaatatttgtggaggtaggtgtggggaaggttggagaagagttaggtttgtgctttgtaatcttggcatccatgttttgtgcctgccctccctcttggggaggccatgcttgactctgctgaaagctgctaactggtgacagggtggatcatggtgaggactaggggtaaggtcagggaatgcttaagctctggccctgccctgtattcctcttccccttggtagcagttccctgaccaagggcaaggtgtgtctcaggaaggtggttctgtgcatgcctgggtgtggttaaggcgtggcccagaaggcttccctggtgctctcagtccaggcaaagcccagagcatctgagcacgtctctgacttccagtggcaacacagtttgaacgtggtgaaacagggtgtagttcttttccacattctgtgtcatctagtcgtgcaggtagggaaaaagttggtctaattgaagattgtgcatttcctagtgacaggtgccaagaggttatgatacgggtttcttgggtctgatgtacagtgtgaataaatgcttgcagctcttagctcttttttgatcgatgaagcacttttttattaatattttcctttgttaaaggaggaaccgtaactctccatagctgtacatataacccttttctcctaaagaggagtcagtcagtgctcctatatttttcattttttgtcaaagcaagaagtaaatactttagaattgttaaatatataaataaagcaaataaagttgagtgttccacatggtagcatttgctaacacttcctaa

SEQ ID NO: 31383 - DNA, 5852 bp, Homo Sapiens
gtgagaaggcggcggcggcggcggagtagcagccggacgagacgtcccagcggctcaggcgctgcccagcgccggccctggcagggagcctggtggggtggcggagggggagactgtgccgtggagggcctcgccatgtcctgctgcccgacttccttgtgaaacctcctagtagaaaaagttcttgggacaaacttcatttgacttcaccataagggaaagaagagagccttgttggacactgaagaagggacggggatttctcctcctaatctgggcctcttgtcatggatgaagagactcggcacagccttgagtgcatccaggccaatcagatctttcccaggaagcagctgatccgggaggatgagaatcttcaggttcctttccttgaacttcatggagagagcacagagtttgtgggccgtgccgaggatgccatcattgccctttccaattacagacttcacatcaagttcaaggagtctcttgttaatgttccattacagcttatagaaagtgttgaatgccgagatatatttcagcttcatttgacttgcaaagactgcaaagttatcaggtgtcagttttcaacctttgagcagtgtcaagagtggctgaagagactgaacaacgcaatccgaccacctgctaaaatagaagatctcttctcatttgcataccatgcttggtgcatggaggtctatgccagtgaaaaagagcaacatggagacctgtgcagaccaggggagcatgtaacttcaaggtttaaaaacgaggtggagaggatgggttttgatatgaacaacgcctggaggatttccaacatcaatgagaagtacaaattatgtggtagctatcctcaagagctcatagtgcctgcctggatcactgacaaagaactggaaagtgtatcaagtttcaggtcctggaagcgcatccctgccgtcatctacaggcaccagagcaatggagctgtcattgcccgctgtggacagccagaggttagctggtggggctggcgaaatgcagatgatgagcatctggtacagtcagtagccaaagcttgtgcctctgactcccgatcgagtggcagcaagctgtcaactaggaacacttctcgagactttcccaatgggggagacctttctgacgtggagttcgattcttctctgtcaaatgcttcaggagcagagagtttagccatccaaccgcagaagcttttgatcttggatgcacgctcctatgcagctgctgtggcaaaccgagccaaaggaggaggctgcgaatgcccagagtattacccaaactgtgaagttgtgtttatggggatggcaaacattcattctattcggaggagttttcagtctctgcggttgctgtgcactcagatgccagatccgggaaattggctatcagctcttgaaagcacaaaatggctccatcacttgtctgtgcttctgaaatcagcgcttctggtagtgcatgctgtggatcaggatcagcggccggtgctagtacactgctcagatggctgggaccgcaccccccagattgtggcattggctaagctcttgctggacccttattaccgaaccatagagggtttccaggtcctcgtggaaatggagtggctggattttggccataaatttgctgaccggtgtggtcatggggagaactcggatgatctgaatgaacgttgcccagtgtttctgcagtggcttgactgtgttcatcagcttcagaggcaatttccttgctcttttgagttcaatgaagcattccttgtgaaactggtgcagcatacctattcctgcctgtttggaacattcctgtgcaacaacgccaaggagagaggggaaaagcatactcaggaacggacatgttccgtgtggtcacttcttcgggcaggcaacaaggctttcaaaaacctactgtattcctctcagtcagaagccgtgctgtaccctgtgtgccatgtgcgtaacctgatgctgtggagtgcagtgtacctgccctgcccatccccaaccacccctgtggacgacagctgtgcaccatacccagccccaggcaccagccctgatgatccccccctgagccggctaccaaagactagatcatacgacaatctgaccacagcctgtgacaacacagtgcctctggccagccggcgctgcagcgaccccagcctgaacgagaagtggcaggagcaccggcgctcactagagctgagcagcctggctggccctggagaggatcccctttctgccgacagcctagggaagcccaccagagtgccggggggtgccgagctttctgttgcagccggagtagctgaggggcagatggagaacatcttgcaggaggccaccaaagaggagagtggagtagaggaacctgcccacagggcaggcattgagatacaggagggtaaagaggaccctctcttagaaaaggagagcaggaggaagacacctgaggcctcagccattggacttcaccaagacccagaactgggtgatgctgctctgaggagccatctggatatgagctggcctctgttctcacagggcatttctgaacagcagagtgggctcagtgttctcctcagttctctccaggtcccccccaggggagaggattccctggaggtccctgtggagcagtttcgaatagaagagattgcagagggtagggaggaagcagttcttccaatcccagtagatgcaaaagttggctatggtacctcacagtcatgttctctgctaccttcccaagtcccttttgagaccagaggaccaaacgtggacagttctacagacatgttagtggaagataaggtgaagtcagtaagtgggccccaaggtcatcatagatcttgccttgtaaatagtggcaaggacaggcttcctcagaccatggaacccagcccttcagagacaagcctggtcgagaggccccaagtggggtctgtggtgcataggacttcccttggcagcactctcagcctgacacgttccccttgtgccttgcctttagccgaatgtaaagaggggcttgtgtgcaatggtgccccagagactgaaaacagggcctcagagcagcccccaggtcttagcaccctccagatgtaccccacacccaatgggcattgcgccaatggggaggctggtaggagcaaggactcactgagccgtcagctgtctgctatgagctgcagctctgcccacttacactcaaggaacttgcaccacaagtggctgcatagccactcaggaaggccatctgcaaccagcagccccgaccagccttcccgcagccacctggacgatgatggcatgtcagtgtacacagacacgatccaacagcgcctgcgtcagattgagtcaggccaccagcaggaagtagaaactttgaagaaacaagtccaggagctgaagagtcgcctggagagccagtacctgaccagctccctacactttaatggagactttggggatgaggtgatgacccgttggcttcctgaccacctggccgcccactgctatgcgtgcgacagtgccttctggcttgccagcaggaagcaccactgcaggaattgtgggaacgtattctgctccagttgttgtaaccagaaggttccagttcccagccagcagctctttgaacccagtcgagtatgcaagtcttgctatagcagcctacatcccacaagctccagcattgaccttgaactggataagcccattgctgccacttccaactgaagctcagtgacctgggtgggcagtggccaagctgctgttcctatgacaggcccactcaacctgggcagaccgagaggcccgtgcactttggaatgggagcgtggaaccacctgtacagagtgacagatttgggatgcaccactggattgtagattgatttttctttcctgtccccctactccctccctaccttttccatcctcctcctctgccttcaaaaaaggaaactttcccttggttgtcttaattttttttttttttgatggaagaccaagggttgccaggcccactgtaactgccgagctgcctgctgtcacgtgacactgagggatggcttgtttcttccgggtgggaggatggtggtcagagccaggagtatggagatctgagaccgtgagcagggaagaaagccagtgctaacatgcaaccattcctcacgccaccgccacatcagagctggttgggaaccctttgctgctggggaggctggaagcatattccccaagagcactgccctgggcatcatctccctcctgcgaggagctgagccagtcccctcacagatggataaatgaggctgatgtttggagggagaggcacacggtaaatggcatccccttaggcgcctctttgggaaaggaaagtggatgctcctttgaggcaggcgaggggctgggagtgggtagccgtcatgttgtcccccgtgggatcccatttttaacttgacccagattgtcttgggctccttttactttcagggggctgctttcctgggccaggctgtgtagcacttcccaccctcaggcatgagtacagactggtcaaaatgtttatgcagtcaaggccaaagcctgccctgagcccagacacacctgggtccccattctggggcctggtcccctaaacaatctcttcctcagccagcacagggaaatccagactcagggttccagaaatcccccgttcccaaaccaaaccaatcatggatcttccctttaaggggtagaatcagcctttagagttacaagcccctggaaaagggagcaggtcccatacaatcagcctttctcctcttctcttcttgggacaggaataactgctgagcagtccccctttgccactcctggctgtctgagtgggcacttgtctggctgctggccagcagtgaagggccacttggtgacttcgtagggttccttagagaagtgacatggccttgaggagattcagggcacctttcctcagtgagctttgatatggtccaaaaacagccttaaatcaagaatatttgtggaggtaggtgtggggaaggttggagaagagttaggtttgtgctttgtaatcttggcatccatgttttgtgcctgccctccctcttggggaggccatgcttgactctgctgaaagctgctaactggtgacagggtggatcatggtgaggactaggggtaaggtcagggaatgcttaagctctggccctgccctgtattcctcttccccttggtagcagttccctgaccaagggcaaggtgtgtctcaggaaggtggttctgtgcatgcctgggtgtggttaaggcgtggcccagaaggcttccctggtgctctcagtccaggcaaagcccagagcatctgagcacgtctctgacttccagtggcaacacagtttgaacgtggtgaaacagggtgtagttcttttccacattctgtgtcatctagtcgtgcaggtagggaaaaagttggtctaattgaagattgtgcatttcctagtgacaggtgccaagaggttatgatacgggtttcttgggtctgatgtacagtgtgaataaatgcttgcagctcttagctcttttttgatcgatgaagcacttttttattaatattttcctttgttaaaggaggaaccgtaactctccatagctgtacatataacccttttctcctaaagaggagtcagtcagtgctcctatatttttcattttttgtcaaagcaagaagtaaatactttagaattgttaaatatataaataaagcaaataaagttgagtgttccacatggtagcatttgctaacacttcctaa

SEQ ID NO: 31384 - DNA, 1959 bp, Homo Sapiens
atcacttggctcttctctgatatgaactgggcagcatctaaatgtatctttcttgattttgttgtctctttgcatagagcatatcttgtgaaaacagaaatatccatgtaatggttttttcttgtagtgaccgctcgaaattgcttgagcaacatagagataatgggcaggggtccctgtgtgaagcacctagaggctggaaagctgatggcaaagctggaggggtgaggcagggagaggataaacacagtggaaatgcaggaggaaagctgtgctctgtggtggcctaattacaaggacctgccctacagccagaatcagccagcaaatgcttttgtaaaggaactaaaagaaagggaaaagaggaagtaaacaaaaggtcccttttcagagagggaaccagtgggagacttaagagcaaggaacaacccatttcgtcgttatggtaagtggagattattccttgggcctgaatgacttgaatgtttccccgcctgagctaacagtccatgtgggtgattcagctctgatgggatgtgttttccagagcacagaagacaaatgtatattcaagatagactggactctgtcaccaggagagcacgccaaggacgaatatgtgctatactattactccaatctcagtgtgcctattgggcgcttccagaaccgcgtacacttgatgggggacaacttatgcaatgatggctctctcctgctccaagatgtgcaagaggctgaccagggaacctatatctgtgaaatccgcctcaaaggggagagccaggtgttcaagaaggcggtggtactgcatgtgcttccagaggagcccaaagagctcatggtccatgtgggtggattgattcagatgggatgtgttttccagagcacagaagtgaaacacgtgaccaaggtagaatggatattttcaggacggcgcgcaaaggaggagattgtatttcgttactaccacaaactcaggatgtctgcggagtactcccagagctggggccacttccagaatcgtgtgaacctggtgggggacattttccgcaatgacggttccatcatgcttcaaggagtgagggagtcagatggaggaaactacacctgcagtatccacctagggaacctggtgttcaagaaaaccattgtgctgcatgtcagcccggaagagcctcgaacactggtgaccccggcagccctgaggcctctggtcttgggtggtaatcagttggtgatcattgtgggaattgtctgtgccacaatcctgctgctccctgttctgatattgatcgtgaagaagacctgtggaaataagagttcagtgaattctacagtcttggtgaagaacacgaagaagactaatccagagataaaagaaaaaccctgccattttgaaagatgtgaaggggagaaacacatttactccccaataattgtacgggaggtgatcgaggaagaagaaccaagtgaaaaatcagaggccacctacatgaccatgcacccagtttggccttctctgaggtcagatcggaacaactcacttgaaaaaaagtcaggtgggggaatgccaaaaacacagcaagccttttgagaagaatggagagtcccttcatctcagcagcggtggagactctctcctgtgtgtgtcctgggccactctaccagtgatttcagactcccgctctcccagctgtcctcctgtctcattgtttggtcaatacactgaagatggagaatttggagcctggcagagagactggacagctctggaggaacaggcctgctgaggggaggggagcatggacttggcctctggagtgggacactggccctgggaaccaggctgagctgagtggcctcaaaccccccgttggatcagaccctcctgtgggcagggttcttagtggatgagttactgggaagaatcagagataaaaaccaacccaaatcatt

SEQ ID NO: 31385 - DNA, 4072 bp, Homo Sapiens
catggccgccgctatcaccgacatggccgacctggaggagctctcccgcctgagccctctgccccccggcagcccgggttcggcggcgcggggccgggctgagccccccgaggaggaggaggaagaggaggaggaggaagaggaggcggaggccgaggcggtggcggcgctgctgctgaacggcggcagcggtgggggcggcggaggcggcggcggaggagtggggggcggcgaggcagagacgatgtcggagccgagccccgagagcgccagccaggccggggaggacgaagacgaggaggaggacgacgaggaggaggaagatgagagcagcagcagcggcgggggtgaggaggagagtagcgccgagagcctggtgggcagcagcggcgggagcagcagcgacgagacccgctcgttgagccccggcgccgccagcagcagcagcggggatggggacggcaaggagggcctggaggagcccaagggaccgcggggcagccagggcggcggcgggggcggcagcagtagcagcagcgtagtctccagcggcggcgacgagggctacgggactgggggaggcggaagcagcgcgacctccgggggccggcggggcagcttggagatgtcgtcggatggggaacccctgagccgcatggactcggaggacagcataagcagtactataatggatgtagacagcacaatttccagtgggcgttcaactccagcaatgatgaatggacaaggaagcactacttcttcaagcaaaaatattgcctataattgttgttgggaccagtgccaggcttgcttcaactctagcccagatctggcagatcacatccgttccatacatgtagatggtcagcgaggaggggtatttgtttgcttatggaaaggttgtaaagtatataacactccatctaccagtcaaagttggttacaaaggcatatgctgacacacagtggagacaaacctttcaagtgtgttgttggtggctgcaatgccagctttgcttctcagggagggctagctcgtcatgtacccacacacttcagtcagcagaactcctcaaaagtttctagccagccaaaggccaaagaagaatctccttctaaagctggaatgaacaaaaggaggaaattaaagaacaaaagacgacgctcattaccacggccacatgatttcttcgatgcacaaacactggatgcgataagacatcgagccatatgctttaacctctcagctcatatagaaagtttagggaagggacacagtgttgtttttcatagtactgtaatagctaagagaaaagaagattctgggaagatcaaacttttgcttcattggatgcctgaagacattctgcctgatgtgtgggtgaatgaaagtgaacgacatcagttaaaaactaaagtagttcatttatcaaagctacccaaagatactgccttgcttttggacccaaacatatacagaacaatgccgcagaagaggttgaagaggtaaaaaataaataaatacataaaaagcaaacaagcggggacacctgcagtcttagtcactgacaatgggtttagggaaagttgcacattagagtcaaccccttcttttttttttttttttttttaaatccagtatttaggataatatttatgcttagtgtaaacattctgtgaatgaagtagactcttcggtggaatatattaatatattactgtatatccacattttcatggaatggtactgtgggagactgagcaaacactcttttggcaacttagtagaacagcttcttaaaggctttgcatgcttgctgctttaagctgcttttttttttcttttcttccctttagtgatttcagtagtttatattggaaagaaaaacaattacaacatgtgcccttacaaataccaaaagcactgtaaggatatttgtcttgacagtgtttattgatttgaagtcatattaggaaatatttagacaatgaaaattatcaagagataatttacctttcaattatgataaatagatgtgattggttgccatttgtgttcttttgcagaactctgataagaaaagtgttcaatttgtatttaagcaaacagtgaacgacgtttgcaatcaactaaaaattcgtctatcgaattagggctgaaaattactgttaaagagtgttgcagtatgtctggtggctcccttttcaggactagggctttctcatggagtacagtatgttaatatttacctatataactaatctgttaacggtttttgaaaaacctttcaaattatttgaataatcttcatattttcatttaacctatatgactctaattttttttctgaggaaatcatttggtttttgagttgttttttcttaatgtaagaaaaattgtattttttttacaagtatcttcaaactgaatcttttatgcaccaaagttggtcttgaaaaggaaaataaaatcactttcttgcttggtaagcaagaagccatatcgattttttttaacttacagaaatggaaatatgtgtaacttgttagtattgtattaaacaaatgttgcatagagataatagaacattgcttgtaaataattcagcagatttgtaatatatttttatattttgaaatgtactgtagatgttttctagaggcatgaaagttaaatgtatatattatggtagaaataatattgaaggatattgtacttcactagtgctgccagaggaattgttaataaaagcaccttctttaacaataaatgtctttcacagacttaagggactatgtactactgttaatatctctaagaacaaaacacattgaacatccttccagaaagtctttgagggaggacctatacccataatagaattatggcactcatttctgacagtgatcaagaaatcagttatttccttactgttggaaggacattgtaaagtatgtggttatatgcagtgaaactgcagaaaatactcctggttgaggagttttcactttactacagtgatataaaaaccagcagtttttacactaaattttttaaagaaatattagacaaaaatatagaattaaaacctttggttccaaaatgggaaaggttccacgatacataaatcatttctcatttgctttaaaaaatttaaaagtgtaaaaattatgagagactttattcgttaacaatgggggtaaagagctatatacatgaaaatgagtcttataaaattaagtgaagtgcaaataaaagcactgctactataagacattctggaatggttgtttaataagggtattatccatttgatctatagcaatgtgattttatttttaaaaagaaaagcagtgtgttttctttttttgttgttttcttttgcttaagcacttcatcaattgctttattctgtatctgcgaagtaatctgcaatctcttttgttctttttaaaatttgatttgttataaaattgccaaatagaagtgtttcagatacatagtttgtacctgtatttttattttattgcctcatgttcttgtaagtcattcttaattgaccaatgattgtagaccttgcttgagtattttttctaataaaacaaagcaaatcacatttagcttcaaattgtaacaattcaattgaattttaaaatgacacctgaaaagatacatctgatattttctatatagagcacagtaaataagttttttcattgtgtagaaatacttagatgtcaaaaccagatttcgtgatccttgattaacttctgagtactcaatcaatcataatccttttgctgcttatctgatgttggtttgatactgttaacacaccaaaaagaatatggaattgaaatgagctagctttataacttgtatgtatacatatatacacataacatccaattatgactgggtaataagtgtgaaaattttaatttgtggttttcatttattaatgtctgcccatctgtattgttgctcctaccttcaaatatgacacctgaaataataagtctgttgtccagaatttaaaaaaaaaaaaaaaaaaaaaaaaaaaaaaaa

SEQ ID NO: 31386 - DNA, 1354 bp, Homo Sapiens
aatttggcacgaggctttgcagtggatgcccttggcagggtgagcccacaaggagcaatggagcagggcagcggccgcttggaggacttccctgtcaatgtgttctccgtcactccttacacacccagcaccgctgacatccaggtgtccgatgatgacaaggcgggggccaccttgctcttctcaggcatctttctgggactggtggggatcacattcactgtcatgggctggatcaaataccaaggtgtctcccactttgaatggacccagctccttgggcccgtcctgctgtcagttggggtgacattcatcctgattgctgtgtgcaagttcaaaatgctctcctgccagttgtgcaaagaaagtgaggaaagggtcccggactcggaacagacaccaggaggaccatcatttgttttcactggcatcaaccaacccatcaccttccatggggccactgtggtgcagtacatccctcctccttatggttctccagagcctatggggataaataccagctacctgcagtctgtggtgagcccctgcggcctcataacctctggaggggcagcagccgccatgtcaagtcctcctcaatactacaccatctaccctcaagataactctgcatttgtggttgatgagggctgcctttctttcacggacggtggaaatcacaggcccaatcctgatgttgaccagctagaagagacacagctggaagaggaggcctgtgcctgcttctctcctcccccttatgaagaaatatactctctccctcgctagaggctattctgatataataacacaatgctcagctcagggagcaagtgtttccgtcattgttacctgacaaccgtggtgttctatgttgtaaccttcagaagttacagcagcgcccaggcagcctgacagagatcattcaaggggggaaaggggaagtgggaggtgcaatttctcagattggtaaaaattaggctgggctggggaaattctcctccggaacagtttcaaattccctcgggtaagaaatctcctgtataaggttcaggagcaggaatttcactttttcatccaccaccctcccccttctctgtaggaaggcattggtggctcaattttaaccccagcagccaatggaaaaatcacgacttctgagactttgggagtttccacagaggtgagagtcgggtgggaaggaagcagggaagagaaagcaggcccagctggagatttcctggtggctgtccttggccccaaagcagactcactaatcccaaacaactcagctgccatctggcctctctgaggactctgggtaccttaaagactaaaaaaaaaaaaaaaaaaa

SEQ ID NO: 31387 - DNA, 1395 bp, Homo Sapiens
gcgcgcatagcgcccacgcacgcgcactggggtgtccgccgggcatcgctctgtccagttattccagtttctctgggagcagccgagttgaccccacggtctgagatgtccaagctgcccgcagacagcagtgtcccgcagacaggcgcggcgaatggtgacagagacgtcccgcaggcggaggtaggccgcgggaggcgggagccggccccggcacagcctgaggaggccggggaaggcgcgatggcggcggccaggggaggcccggtgccggcggccagggaaggtcggatggcggcggccagggcagccccggcggcggcagccaggggagccccggtggcagcggcggcgttggccagggcagccgcggcgggcagggaaagcccggcggcggcggcggccagggaagcccggatggcggaggtcgcccgcttgctgggggagccagtggacgaagagggtcccgagggcaggcccaggtccagacacgggaacggaggcctggctgcgttgccctatctccgtctccgccacccacttagcgttttaggcatcaattaccagcagtttctccgccactatctggaaaattacccgattgctcccggcagaatacaagagcttgaagaacgccgcaggcgattcgtggaagcctgcagagcaagggaagcagcgtttgatgccgaatatcagcgaaatcctcacagggtggacctcgatattttaacctttacgatagctctgactgcctctgaagttatcaaccctctgatagaagaacttggttgcgataagtttatcaatagagaatagttatgtggtgacactacttcaagagaacctctgcattccagtcataccaatcctgcaacttgattttcagaagtcaagagtatatcgcgataagacagtgcacaggtggaggggaaaaaaagggggagggggaagcttatcttgaaaaagcatcacagaagtagaaaaaaatgtcgaaagcattataactgtaacgttctttgagtttgtgattgatccacatttttccccctgcattatggaaaatgtctctcagcattgctttattacaaagtaaaggatggttttataaaattgagactgatgaaacatcaatactagagcccatgaggatgaaagaaattatcaaatagtgctgaacagaataagatgttaacgctgagttattaggactggaaggctatgaaaagaacttgaaattgtcggaatatgtgctctcttcatgtcatattcaatagaagtttctagtttaagattgattttgtgttttcttaggcatttcaagtgacaagcaaagtaaatgtatatattatgtgataaatcatgttttcaagaacgtcaaaaaaaaaaaaaaaaaaa

SEQ ID NO: 31388 - DNA, 1230 bp, Homo Sapiens
gtaaaagcaaaagcaacagctcaagcagcctccttggagaaaacctgaaaattcaacttgttcaagagaaggtcttgtacgtgcctaagttctagagcctcctgacgtgagcatggctgagagtgaggaccgctccctgaggatcgttctggtagggaaaactggaagtgggaaaagtgcaacagcgaacaccatccttggagaggaaatctttgattctagaattgctgcccaagctgttaccaagaactgtcaaaaagcatcccgggaatggcaggggagagaccttcttgttgtagacactccagggctctttgacaccaaggagagcctggacaccacctgcaaggaaatcagccgctgcatcatctcctcctgcccagggccccatgctattgtcctagttctgctgctgggccgctacacagaggaggagcagaaaaccgttgcattgatcaaggctgtctttgggaagtcagccatgaagcacatggtcatcttgttcactcgcaaagaagagttggagggccagagcttccatgacttcatagcagatgcggatgtgggcctaaaaagcatcgtcaaggagtgcgggaaccgctgctgtgcctttagcaacagcaagaaaaccagtaaggcagagaaggaaagtcaagtgcaggagttggtggagctgatagagaaaatggtgcagtgcaacgaaggggcttacttttctgatgacatatacaaggacacagaggaaaggctgaaacaacgggaagaggttttgaggaaaatctacactgaccaattaaatgaagaaattaaactagtagaagaggataagcataaatcagaggaagaaaaggagaaagaaattaaattactaaaattaaaatatgatgaaaaaataaaaaatataagggaagaagctgagagaaatatatttaaagatgtttttaataggatttggaagatgctttcagaaatatggcataggtttttgtcgaaatgtaagttttattcttcctaatttactgtgatttgttaatggatgaattgtattttgcaaagatagttagagaaatacctccttccccttagctttattaaggtatcattgataaataaaaataaaatatgtttaatgtatataatgtgatttttaaatatatatatatatatacacacattgtgaaataatgaaataaaggtaattaacacatctaaaaaaaaaaaaaaaaaaaa

SEQ ID NO: 31389 - DNA, 5499 bp, Homo Sapiens; identical to SEQ ID NO: 22575

SEQ ID NO: 31390 - DNA, 3101 bp, Homo Sapiens
ccacgcgtccgggtgatgatgccactggcagaagcaggcgccctggcccaaggaggaggcccttcagcaacggagtgggcctgcattctgcggagggtgagactgaggtggctgcagtcaaaggagaagggggcaggggtttgttgaggctgtgaccgtgggaaagcgcttctccagggcttccctcagcttcaaggagaaagagttcagaggccctgaggggatgaagggacttgtgaaggggcttcagggggatgggttggggggaaggaggttcctattcttactccccttctgcctatgctcccccaatgttcctgtctctcccctcccccaccttggccccctctttggcccctgtggccaaagttgttgaggaaggagggagtagatggagggctcttttcaccagaagacccccaggcacaagcagcccaccttactgatggtcagagcatccagaagaagtggcaagacttcagctgtcctcaaagcaggaagacagagtgtttctggcagaaagaacagcacaagcaaagatctggtaaccctaggtgcctccagtttgagggaggagagaggacaccccctccaccccagacataggaaagcagtccacctgcgcaccaggggcaggacacgtggctgggtgcagacgctggcccggatgtcgcggaggactcgcgggccggtagagcgcgcggcggcggcggcggcggcggcggcggcgggaggagacgcaggtcacgcccccttcccaccacctcccgccgccgacggggcgcgcgcgccgaggagcccgggacaggtgactcctagaggactgcgtctgcgcctcccccggcgggagtcccttcttcgcggcctctgccgccccctgcgtcccctcctgggcttccgagagtctgactcagccaagccggcatcgcttcgcctcctacaacacaccccgagcgcgagaagaaattacaggattgcaggggcacggctaatgcgctctaattacccaccgccgctgtcatccgcggcgctccgcggcgctgggccaacgcgccgtaattaagacgccgctccccggtcccggaaccctcccttcgccaccctccacccacccacctcgcggtccccaggaccactggctgccaactcctgccgccctctgggactgcccctcagtcccaggagagctatgaggcctcactgggggcagaacttggggagaccgaagccggcccttccactcccctaaacctacagtcctggaaggtctctgctggaagagactgggagagtggggaggggccagggacctatttcgttgacagaaacagtgaggtctattggaaagttagccttcagtgggaggagtggcaaaggcacgcagggcagcagtacccccgtttggcacttgaggcacggagaagggaagggaagtccgcccagccagaactcccagacccgctcgtttaacagtggctttatgagcagcacgacggactccctcccctggcggggaaattaccttcctgcgaagaaaggtgacatccccgccacagacacggaggccccgcctgctggccagctgtggccgccataggggagctggtgaggagtgaggtggctctggcctcccatgtcaggtagggtgagagaggccctgaagatagaagccaggcccgaaggccagaattaaaggggtagcttggccatcagctccttcccccaaaaccaggctcagagctctcctctatcagcaattctttcctgaggtccagggtgttgcaaactcatggccttgggccacgttttaccttcagtgaggttttgtttggcttgcaatgagtacatgggttttaggttgaatgtgagagtctgcagacaatgtgggttctccgactgccctcccagtgaaggtggacctctgatttagaccggcccgctgggcccgtgcctacatccttttcctcagcgtcaggatcttagtccccatgattgctgcccctttgtggtctgcatgtttcttggtaagggtgcccagtcaagtgtctctgggagccccctcttctctgtcatcgtcaggctccccacttgcagtggccgtggtggctgcacatgctcccggatacccctccagcactcccttttgtcatcttgagtttcagtccgtgacttgggtggcaccctatcttctccatcagggatggtagctatttttctgccatgagactagaggttgcttgagaacaggaaattggatctctcccttcaggctgggatttcactaagggctggagaaggggggaatatgggaggattatctcctatcacagggagcgctctgagggcaaggctgtgtctccgattcagactgacggttccctgaggatggggctgtttctcccctccgactggggctccctgaggatggggctgtttctcccctccgactggggctccctgaggacagggctgtgtctcccctcagcctggggctccctgagtcagggctgtgtctcccctcagactggggctccctgaggacggggctgtgtctgcctcagactgggaatccctgaagatggggccgtgtctccctcaaagtggggctccctcaggacagcgttgtgtctcccctcagactgcggctccctgaggacggggctgtgtctccctcagactggggctccctgaagaaagggctgcttctccctcagactggagctccctgaagatggggctgtgtccccctcagactggggctgcctgaggatgaggctgcatctcccctcagactggagctccctgagggcagggctgtctccccccttcagactggggcctcccccaaaggacagggactgtgtctcccctgggactaggttctttgtgtcttctgcatcagacagattcccatgaggacagggctgtctccccctccatctggagctccctgaaggcaatggcctctcccctcaaatgggacatttgcaccccaccccaccctctggctccccatggcgcccaggcattcctcccaggacaccatttgtcacgctttgatgaatgaaacttactaagaataactcaaaaaaaaaaaaaaa

SEQ ID NO: 31391 - DNA, 1514 bp, Homo Sapiens
cggaggcgggggagctggaccagcagccgcctggagcgtccgagtcaccgtcgccggggctcccgcgctccccagaacggtgggacgcggggctcggcagccgccagcggaacatggcgccctggacgctgtggcgctgctgccagcgcgtcgtgggctgggtgccggtgctcttcatcaccttcgtggtcgtctggtcctactacgcgtacgtggtggagctctgcgtgtttactatttttggaaatgaagaaaatggaaagaccgttgtttaccttgtggctttccatctgttctttgttatgtttgtatggtcctattggatgacaattttcacatctcccgcttccccctccaaagagttctacttgtccaattctgaaaaggaacgttatgaaaaagaattcagccaagaaagacaacaagaaattttgagaagagcagcaagagctttacctatctataccacatcagcttcaaaaactatcagatattgtgaaaaatgtcagctgattaaacctgatcgggcgcatcactgctcagcctgtgactcatgtattcttaagatggatcatcactgtccttgggtgaataactgtgtgggattttctaattacaaattcttcctgctgtttttattgtattccctattatattgccttttcgtggctgcaacagttttagagtactttataaaattttggacgaatgaactgacagatacacgtgcaaaattccacgtactttttcttttctttgtgtctgcaatgttcttcatcagcgtcctctcacttttcagctaccactgctggctagttggaaaaaatagaacaacaatagaatcattccgcgcacccacgttttcatacggacctgatggaaatggtttctctcttggatgcagtaaaaattggagacaagtctttggtgatgaaaagaaatattggctacttccaatattttcaagcttgggtgatggttgcagttttccaactcgccttgtggggatggatccagaacaagcttctgttacaaaccagaatgagtatgccagaagtggctcaaatcaaccttttcctatcaaaccacttagtgaatcaaaaaaccgcttgttggacagtgaatctcagtggctggagaatggagctgaagaaggcatcgtcaaatcaggtgtatgaaaacattatagactggtattttcaattttcatttgcaagaaaatgatcagtggaatgaaataactgaagtataacagaagatatattttttaaaacggaaagcctttgtacagttcctgggattcacagaagcactactccagagcagaatgatgccttaatcttaagtgtccatttgtgcagcattgacttagagctacaaaagtgacttaatgttattctggaaataatacttacctgttatgagttgctataatatgagctgtcatcacattttaaaaaaaaaaaaaaaaaaaaaaaaaaaaaaaaaaaaaaaaaaaaaaaaaaaaaaaaaaa

SEQ ID NO: 31392 - DNA, 3657 bp, Homo Sapiens
ggcagggtgactggggtcccatgacagctgctgtgaccccagcaccttcctcaggatgtgggggcctggcagagggctgggcccacagttggggctacttcctgtgctgaaggaagtcctcttgccattcctgctgccctgccgctgcctccctgggaacccatgtgtccttgtggcccctctgagcagccccctcctccttcagggcaggaactgctgccacaacctcaggctgggcaccaaacacccgtgcccgccaatgcggcccagcccccggagagtcaggcccacagagcatgcccatgtgggccggcggtgtggggagccctcggcggggcatggcccctgcgtccacagatgacctctttgcccgcaagctgcgccagccagcaaggcccccgctgacaccgcacaccttcgagccgaggccagtccggggcccactcctgcgcagcggcagcgatgcaggcgaggccaggccccccacgccagccagcccccgtgcccgtgcccacagccacgaagaggccagccgacctgcagccacttccacccggctcttcactgacccgctggcactgctggggctgccagcagaggaaccagagcctgccttcccaccagtgcttgagcctcgatggtttgcccactatgacgtgcaaagcctgctctttgattgggctccgaggtctcaggggatggggagccactcagaggccagctctgggaccctggcttcagccgaggaccaggctgccagctcggacctgctgcatggggcacctggctttgtgtgtgagctcgggggtgagggtgagctaggcctgggtggaccagcatccccacctgtgccccctgcactgcccaacgcggccgtgtccatcctggaggagccacagaaccgaacctcggcctacagcctggagcacgcagacctgggtgctggctactaccgcaaatacttctatggcaaagaacatcagaacttcttcgggatggacgagtcgctgggcccggtggcagtgagcctgcggcgggaggagaaggagggcagcggagggggcaccctgcacagctaccgcgtcatcgtgcggaccacgcagctccggacactccgtggcaccatctcggaggacgcgctgccgccggggcccccacggggtctgtccccaaggaaacttctggagcacgtggcgccgcagctgagccccagctgcctgcgcctgggctcagcttcacccaaggtaccacggacgctgctcacactggatgagcaagtggtgagcttccaacgcaaggtgggcatcctgtactgccgggcgggccagggctcggaggaggagatgtacaacaaccaggaggcgggaccggccttcatgcagtttctcaccttgctgggcgatgtggtgcggctcaaaggctttgagagttaccgggcccagctagacaccaaaacggattccacaggcacgcactccctctacaccacataccaggaccacgagatcatgttccacgtgtccacgatgctgccttacacccctaataaccagcagcagctcctccggaagcgccacattggcaacgacattgtgaccatcgtgttccaggagcctggcagcaagcccttctgccccaccaccatccgctcgcacttccagcacgtgttcctagtggtgcgggcacacacaccctgcacgccacacaccacctacagggtggccgtgagccgcacccaggacacccctgccttcgggccagctctgcctgctggcggaggccccttcgcagccaacgccgacttccgggccttcctgctggccaaagcgctgaatggtgagcaggcggccggccacgcgcgccagttccacgccatggccacgcgcacccgccagcagtacctgcaagacctggccaccaacgaggtgaccactacgtcgctggactcggcttcacgcttcggcctgccctccctgggtgggaggcgccgggcggcccctcggggcccaggcgccgagctgcaggcagcgggctcactggtgtggggagtgcgcgcggcgcccggggcgcgggtcgccgccggggctcaggcgagcggccccgaaggcatcgaggtgccctgcctgctgggcatctcggccgaggctctggtgctggtggcgccgcgcgacggccgcgtagtgttcaattgcgcctgtcgcgacgtgctggcctggaccttctccgagcagcagctggacctgtaccacggccgcggggaggcgatcacgctgcgcttcgacgggtcccccggccaagccgtgggcgaggtggtggcgcgcctgcagctggtgagccgtggctgcgagacccgcgagctggcgctgccccgcgacggtcaaggccgcctgggcttcgaggtggacgccgagggattcgtcacgcacgtggagcgcttcacattcgccgagacggcggggctgcggcccggggcgcgcctcctgcgcgtgtgcggccagactctgcccagcctccggcccgaggccgctgcccagctcctgcgctcggcgcccaaggtctgcgtcaccgtcctgccccccgacgagagcggccggccccacaggagtttttcggagctgtacacgctgtcgctgcaggagcctagccggcggggggccccagatcctgtgcaggatgaggtccagggggtgaccctgctgcccaccacaaagcagctgctgcacctgtgcctgcaagatggtggcagtcctccagggcctggggatctggccgaggagaggactgagttcctgcacagccagaactcgctgtcaccacgcagctctctgtcggatgaggccccagtcctgcccaacaccaccccggacctcctcctggccaccacagccaagccatcagtacccagtgctgacagtgagacacccctgacccaggacaggccaggcagtcccagtggctctgaggacaagggcaacccggcgccggagctgagggcctcctttctgccacgtaccttgtctctgcggaactccatcagcaggatcatgtcggaggcgggcagtgggaccctggaggacgagtggcaggccatctcggagattgcctctacttgcaacaccattctggagtcgctgtcccgagagggacagcccatcccagagagtggagaccctaagggaactccaaaatctgatgctgagccagagcctgggaacctctcagagaaggtctctcacttggagtccatgctcaggaagctgcaggaggacctgcagaaggagaaggcggacagggcggccctggaggaggaggtgcggagcctgagacacaacaaccggcggctgcaggcggagtctgagagtgcagccacacgcctcctcctggcctccaagcagctgggctcacccaccgccgacctggcctgagccgtctggaaccacctgggcccctgagggcactgtggtcacactgggccctcctcaggaactctccctgcgcagaggcgtgtcttagcactgcccccctccctagccccttatttggtggcggaagtggcctccaccccttccctgtttgtaaatattctgtggagaaaagaggacttcagggagtaaaaaagccactgatgaaaaaaaaaaaaaaaaaaaaaaaaaaaaa

SEQ ID NO: 31393 - DNA, 3380 bp, Homo Sapiens; identical to SEQ ID NO: 27667

SEQ ID NO: 31394 - DNA, 3192 bp, Homo Sapiens
acttccggtaggagcctcgcaggaatggtctccgggtagaggcaggtaaggatgtcccgggccggtggagaaggaagagctgggcgtgtggcttcgcttggaatccgaatcagagcttggaccagagccttccctgagaatgctgaagcaacaccttctttggattgagtttcttccagagggaacgaagaagaggattaaataatacattcaattctaaaataagacatggcccatgagttggtgatgttcagagatgtggctatagatgtctctcaggaggaatgggaatgcctgaacccagcgcagaggaatttgtacaaggaggtgatgttggagaattatagcaacttggtgtcacttggactttctgtttctaagccagccgtaatctcctcattggagcaagggaaggagccctggatggttgtgagggaagagacaggaagatggtgcccaggtacatggaaaacttggggatttcacaataatttcttggacaataatgaggctacagacataaatgcagacttggcatccagagatgagccccagaagttatctccaaaaagggatatttatgaaacagaattatcccagtgggttaacatggaagaatttaaaagccatagtcctgagagatcaattttcagcgctatctgggaaggcaactgtcattttgagcaacatcagggacaagaggagggttattttagacaacttatgattaaccatgaaaacatgcccatttttagccaacatactttactcactcaagaattttatgatagagagaaaatctctgaatgtaaaaagtgtagaaaaatcttcagttaccatttattttttagtcaccacaaaagaactcattctaaagaactttctgaatgtaaagaatgcacagaaattgttaatacaccatgcctttttaaacaacagacaattcaaaatggtgacaaatgcaatgagtgtaaagaatgttggaaggcctttgttcattgctcacaacttaaacatctaagaattcataatggtgaaaaacgctatgaatgtaacgaatgtgggaaggcctttaattatggctcagaacttactctacatcaaagaattcacactggtgagaaaccttatgaatgtaaagaatgtgggaaggcctttagacagcgatcacagcttactcaacatcagagacttcatactggtgaaaaaccctatgaatgtaagcaatgtgggaaggcttttattcgtggctttcaacttactgaacacctgcgactccatactggagagaaaccttatgaatgtaaagaatgtggaaagacttttaggcatcgctcacatcttactatacatcagagaattcatactggtgagaaaccctatgaatgtcgggaatgtgggaaggcctttagctatcactcaagcttctcacaccatcagaaaattcattctggcaagaaaccttatgaatgtcatgaatgtgggaaggctttttgtgatggcttacaactaaccctacatcagaggattcatactggtgagaaaccctatgagtgtaaggaatgtgggaagacttttagacagtgttcacacctcaaaagacatcagagaattcatactggtgagaaacctcatgaatgcatgatatgtggtaaggcctttagacttcattcacaccttattcaacatcaaagaattcatactggtgagaaaccctatgaatgtaaggaatgtgggaaggcctttagctatcattcaagcttctcacaccatcagagaattcattctggaaagaaaccttatcaatgcgggaaggcgtttaatcatagattacaacttaacttacatcagactcttcatactggcgagaagccagtcaggtttcctctcctccctccccatcctagtctagcatcatgaaatttgttgatggaaatatacattgtctttgttttatttaaggaaaaagttggtaagccaccagtttcattagtatttatttatttaaataatccttgaaaatcaaatgtttttaagtgagaaagtggataactaaagtgtaaattttggtctcattttaatgctgtttctgagttattgtattaaccattattgagaataaatttttttattgagaataaattttctaaaattacatgtttcactgaaaccagtgaaatatttcactgaaacagtgaaataaaatgaaaacaatttcctcccttccctcaaatctctgagataaccagtatgtgtatttcttcttcctttatgctcaaacaacctgtacacagaaagcattttttgcatgtgtttggaggagcttttacccccatacagacatttgacagcgtcttgtccttttcataataatcatgaatacttttccaggtcagtacgtaaagatgtaacccattctttgtaaggttcagaatatttctagaatggaatgtatgtccgtattttgggccattacctactacagacattgaagttgtttctaatgttcacctagaactctaattttaccttcttttgtttctattgtgcagattcccaacagtgggattaaagagtatctggcgtatatattttgacattacatttattttttaaaatcttctaaattttttgtttaataaaagcacacattataaaaattcaaaaattaccaaaaatgtgaaaattaattctcccctaacatccagttctgtagccactcactttccacagatgcaacaactgctatcagtttccttttattctaacgggaatatttcatgtaaatttcataaattctttggataaaagtaggttattcataatatgtgatttattacacattctcattattagtccacatttggcctacttcattttttttttttttgagacacacccaggctggagtccagtggtgcgatcttggctcactgcaacctccgccacccaggttaaaaattcttctgcctcagcctcctgagtggctgggactacaggcatgcgcagccactatgcccggccaataagctatatttattcttatttgatgtggatgaaaattatcaaaattggccgggcttggtggctcatgcctgtaatcccagcactttgggaggccgaggcgggcggatcacgaggtcaggagatcgagaccatcctggctaacatggtgaaaccccgtctctacta

SEQ ID NO: 31395 - DNA, 2647 bp, Homo Sapiens
gatgacgtcacagggcgttcccgcccgggactaagccggggagcgcatcccggctactgcgggtcctgggtcttcacctgcggagccttacggcagctgagcggtgggaggcgagtccggggctccctgatcttccgtaggctcccagaggcgcctggcctccgcagagctgcaaaggcggcagggcttggtggtcgggctgtgtgttcttccgtttcttccttgtcgctcttgggtcgggccccaggagccagggatcggcgggagttgagagctggggcaggagccccagccgggaggccgaccgggtggactgggcggtgacagcagcgcttccttcccgcagggacctgagccgcggcgctaggatgggaaacagtgcgctccgcgctcatgtggaaacggcgcagaaaactggtgtctttcagcttaaggaccgagggctgaccgagttccccgcagacttgcagaagctgacgagcaatctcaggaccatcgacttgtccaacaacaagatcgaaagcctaccgcctttgctgataggaaagttcactctgctgaagagcctctccctgaacaacaacaaactgactgttctgcctgatgagatatgcaatctgaaaaaactagagacgctaagcctaaacaacaatcaccttagagagctgccgtctacctttgggcaactctctgccctcaagaccctgagcctctctgggaaccaactgggagcattacctccccaactttgtagcctacggcacctggatgtgatggatctctctaagaaccagattcgaagtatacctgactcagtgggagagctgcaagtcatcgaactcaacctcaaccagaatcagatatctcagatctcagtgaagatatcttgctgtccacgccttaaaattcttcgcctggaagagaattgtcttgagctcagcatgcttccccagagcatcctcagtgattcccagatctgtctgcttgctgtggaaggcaatctttttgaaataaagaaacttcgagaactggaaggctatgataagtacatggagaggttcacagccaccaagaagaattttgcgtgaagttctccaggactatggaaaccttacaggatactgacttagaacctctgttggaatgtggctgagtcaaagcctcctgttgttgttaggggtatctacagtaaggagatgatacttcaggagattatatttcactcaatgatcttttctcatttcagggctcttctcaaataagctaaaagaaaaaggatcaggagacaggaaaagtcttccgttttgagtcatgagtagggcaatagacaaggttctcttcaaaaccatcattagtttggctttaagaaaccagtagctagctgctatttatatggtgagggggtgctgcctggtaacagaatagctccacaccacagcttgagattttgtttagtttcactgtgtgagctttcataaagtctgttgccattccatctctgtgttaacacttcgtatttttatgaaattcagataatttgtgagaggctggcatggatctaaggatttattatttttattctagtccatcagttcagtcgcagtttttatactaggactttaggatgtacataaatgtgtgactgtttgtcttgattaaaagtgcactttggcctgggcatggtggctcatgcctataatcccagcactttgggaggccaaggcgggtggctcacttgaggctaggagttcaagactagcgtggccaacgtgaggaaaccctgtctctactaaaaatacaaaaattagctgggtgtgttggtgcatgcttataatcccagctacttgggaggctgaggcaggagaatcgcttgaacccaggaggtggaggttgcagtgagccgagattatgccactgtactccagcgtgggtgacagagtgagactctgtctcaaattaaaaaaataaaaaataattttttttttttaaagtacgctttgttggctgggcacggcgactcacgcctgtaatcccagcacattgggaggccaaggcaggcagatcacgaggttaggagttcgagaccagcctggccaacatggtgaaaccctgtctctactgaaaatacaaaaattagctgggcgtggtggtgggtacctgtaatcccagctacttgggaggctgaggcaggagaattgcttgaacccaggaggcagaggttgcagtgagccgagatcatgccattgcactccgactctgggcaacagagcaagactctgtctcgggggaaacaaaaaaaaagtgtgctttgtcaagagaagcaccagcagacctctaagaactgctctctaaggctgcggtagcaaattatctactattgcaggtgccttattggtagagggctctgaagagccaaaactgtatatgcaacacttgtaagataaaagggactttaataatcaagattttcttgaagatttgttagaaataatgtcttatttctggtaacctttccctttttgtatttataactctactaaccaaattacctatcaataaaccattactataatattttaaaacaacctatgtttatcaagcttactctctgagtgacagaatatactaaataaagaattttttaatg

SEQ ID NO: 31396 - DNA, 3250 bp, Homo Sapiens; identical to SEQ ID NO: 26254

SEQ ID NO: 31397 - DNA, 1723 bp, Homo Sapiens
agctgaatagaatctgaccattggctttcacctggccaggaccttctatgtagctctccttttgtggcccatgtgctgcatcctctgccctcagtgtgcaactggcccccaacgcaatgtgtgtttgtcaaaccatggaagtggggcagtatggcaagaatgcaagtcgggctggagaccggggagtcctcctggagcccttcatccaccaagtaggcggacacagcagcatgatgcgttacgacgatcacactgtgtgcaagcccctcatctcccgggaacagcgcttttacgagtccctccctcccgaaatgaaggagttcacccctgaatacaaaggcgtggtatctgtctgttttgagggggacagtgatggttacatcaacttagtggcctatccttatgtggaaagtgagactgtggaacaggatgacacaacagaacgggagcaacctcggcgcaaacactcccgccggagcctgcaccggtcaggcagtggcagtgaccacaaggaggagaaagccagcctgtcccttgagacctctgagagctcacaggaggcaaagagtccgaaggtggagctgcacagccactcagaggtccctttccagatgctagatggcaacagtggcttgagttctgagaagatcagccacaacccctggagcctgcgttgtcacaagcagcagctgagccgcatgcgctccgagtccaaggaccgaaagctctacaagttcctcctgcttgagaacgtggtgcaccacttcaagtacccctgcgtgttggacctgaagatgggcacgcggcagcatggcgatgacgcgtcagctgagaaggcagcccggcagatgcggaaatgcgagcagagcacatcagccacgctgggcgtcagggtctgcggcatgcaggtgtaccagctggacacagggcattacctctgcaggaacaagtactatggccgtgggctctccattgaaggcttccgcaatgccctctatcaatatctgcacaatggcctggacctgcgacgtgacctgtttgagcctatcctgagcaaactgcggggcctgaaagctgtgctggagcggcaggcctcttaccgcttctactccagttccctgcttgtcatctatgatggcaaggagtgccgggctgagtcctgcctggaccgccggtctgagatgcgtctcaagcacctggacatggtgctccctgaggtggcgtcatcctgtggccccagcaccagccccagcaacaccagccccgaggcgggtccctcctctcagcccaaggtggatgtccgcatgattgactttgcacacagcacattcaagggcttccgggatgaccccaccgtgcatgatgggccagacagaggctacgtgtttggcctggagaacctcatcagcatcatggaacagatgcgggacgagaaccagtaggccctgttctgggcccccagaaccccttcctctccactgcaggcagggaccattgttctgaacttgccgtgaggacacacagacttgcttttaaagggttatatttctctttggtgtaaactaaaagaaatgtttttagctgtagcctggaatccatatatataaagtgaaggagggcagaccacacgccctctcagccaggctcctcaaaaaaaaaaaaaaaaaaaaaaaaaaaaaaaaaaaaaaaaaaaaaaaaaaaaaaaaaaaaaaaaaaaaaaaaa

SEQ ID NO: 31398 - DNA, 2627 bp, Homo Sapiens
gtcgctcttcggacctcaaggttccccttaacacagagcgccccgcagtcttcgcggaaagcgttcggggtaggcgatggctgcgacgcgtgcagggccccgcgcccgcgagatcttcacctcgctggagtacggaccggtgccggagagccacgcatgcgcactggcctggctggacacccaggaccggtgcttgggccactatgtgaatgggaagtggttaaagcctgaacacagaaattcagtgccttgccaggatcccatcacaggagagaacttggccagttgcctgcaggcacaggccgaggatgtggctgcagccgtggaggcagccaggatggcatttaagggctggagtgcgcaccccggcgtcgtccgggcccagcacctgaccaggctggccgaggtgatccagaagcaccagcggctgctgtggaccctggaatccctggtgactgggcgggctgttcgagaggttcgagacggggacgtccagctggcccagcagctgctccactaccatgcaatccaggcatccacccaggaggaggcactggcaggctgggagcccatgggagtaattggcctcatcctgccacccacattctccttccttgagatgatgtggaggatttgccctgccctggctgtgggctgcaccgtggtggccctcgtgcccccggcctccccggcgcccctcctcctggcccagctggcgggggagctgggccccttcccgggaatcctgaatgtcgtcagtggccctgcgtccctggtgcccatcctggcctcccagcctggaatccggaaggtggccttctgcggagccccggaggaagggcgtgcccttcgacggagcctggcgggtgagtgtgcggagctgggcctggcgctggggacggagtcgctgctgctgctgacggacacggcggacgtagactcggccgtggagggtgtcgtggacgccgcctggtccgaccgcggcccgggtggcctcaggctcctcatccaggagtctgtgtgggatgaagccatgagacggctgcaggagcggatggggcggcttcggagtggccgagggctggatggggccgtggacatgggggcccggggggctgccgcatgtgacctggtccagcgctttgtgcgtgaggcccagagccagggtgcacaggtgttccaggctggtgatgtgccttcggaacgcccattctatcccccaaccttggtctccaacctgcccccagcctccccatgtgcccaggtggaggtgccgtggcctgtggtcgtggcctcccccttccgcacagccaaggaggcactgttggtggccaacgggacgccccgcgggggcagcgccagtgtgtggagcgagaggctggggcaggcgctggagctgggctatgggctccaagtgggcactgtctggatcaacgcccacggcctcagagacccttcggtgcccacaggcggctgcaaggagagtgggtgttcctggcacgggggcccagacgggctgtatgagtatctgcggccctcagggacccctgcccggctgtcctgcctctccaagaacctgaactatgacacctttggcctcgctgttccctcaaccctgccggctgggcctgaaatagggcccagcccagcacccccctatgggctcttcgttgggggccgtttccaggctcctggggcccgaagctccaggcccatccgggattcgtctggcaacctccatggctacgtggctgagggtggagccaaggacatccgaggtgctgtggaggccgctcaccaggctttccctggctgggcgggccagtccccaggagcccgggcagccctgctgtgggccctggcggctgcactggagcgccggaagtctaccctggcctcgaggctggagaggcagggagcggagctcaaggctgcggaggcggaggtggagctgagcgcaagacgacttcgggcgtggggggcccgggtgcaggcccaaggccacaccctgcaggtagccgggctgagaggccctgtgctgcgcctgcgggagccgctgggtgtgctggctgtggtgtgtccggacgagtggcccctgcttgccttcgtgtccctgctggctcccgccctggcctacggcaacactgtggtcatggtgcccagtgcggcctgtcctctgctggccctggaggtctgccaggacatggccaccgtgttcccagcaggcctggccaacgtggtgacaggagaccgggaccatctgacccgctgcctggccttgcaccaagacgtccaggccatgtggtatttcggatcagcccagggttcccagtttgtcgagtgggcctcggcaggaaacctcaaaccggtgtgggcgagcaggggctgcccgcgggcctgggaccaggaggccgagggggcaggcccagagctggggctgcgagtggcgcggaccaaggccctgtggctgcctatgggggactgatgcctgagcgccacctactgcattttggacacctcacaccaaggggagatgcaccccacggacacctgggactttccccttctggttcctgtgtctcccaataaactctctgaccaaccctaaaaaaaaaaaaaaaaaaaaa

SEQ ID NO: 31399 - DNA, 2195 bp, Homo Sapiens
ccgccgccgcgggaacgcgagcccggtaatttttcaacggagaaaggcgaggctttcgggctctgcagagtgagagttagcaagtgtccggctccagcaactctcctctggcgtgacagccggcatggaggatccacagagtaaagagcctgccggcgaggccgtggctctcgcgctgctggagtcgccgcggccggagggcggggaggagccgccgcgtcccagtcccgaggaaactcaacagtgtaaatttgatggccaggagacaaaaggatccaagttcattacctccagtgcgagtgacttcagtgacccggtttacaaagagattgccattacgaatggctgtattaatagaatgagtaaggaagaactcagagctaagctttcagaattcaagcttgaaactagaggagtaaaggatgttctaaagaagagactgaaaaactattataagaagcagaagctgatgctgaaagagagcaattttgctgacagttattatgactacatttgtattattgactttgaagccacttgtgaagaaggaaacccacctgagtttgtacatgaaataattgaatttccggttgttttactgaatacgcatactttagaaatagaagacacgtttcagcagtatgtaagaccagagattaacacacagctgtctgatttctgcatcagtctaactggaattactcaggatcaggtagacagagctgataccttccctcaggtactaaaaaaagtaattgactggatgaaattgaaggaattaggaacaaagtataaatactcacttttaacagatggttcttgggatatgagtaagttcttgaacattcagtgtcaactcagcaggctcaaataccctccttttgcgaaaaagtggatcaatattcggaagtcatatggaaatttttacaaggttcctagaagccaaaccaaactgacaataatgcttgaaaaattaggaatggattatgatgggcggcctcactgtggtcttgatgactctaagaatatcgcccgaatagcagttcgaatgcttcaggatgggtgtgaactccgaatcaacgagaaaatgcatgcaggacagctaatgagtgtgtcctcttccttaccaatagagggcactccaccaccacaaatgccacattttagaaagtaacaacagttttgtgtgtggatcattccaattgaagttgctatgaagaggtagcagatgaatctcattgaattagtcctgtagtgcaaactttaagcaccttaaaacatttaaaatcttattacaggtgatagagatagatacatgtatgtgaacagattttgtaggaaggcatactgaattctttgtcaccagcacttttgatatgaacagtattcgttacatagtaacagttcctgcttacaactgaattttataatttaaggtgttcaagatatattctttttggttttaaaatgcaaaatcttattggctgttctgttgaatgtcatatcttactggtgtttaaatatgtaatgtgtttctttattaacatcactagatgaaaccatatcttaaaatgcagaaatgattggaaggtagatcttatctagcctttggatttcaagaatatcatagtccttttgattttcaaagtttatatgtgaagttcaccatgtatgtggtgaatttcgtaaggtacttggtatacatatctgcctatgtttcttttcaactcataattggaagaattatgatggattatagggtttggttaaaaatccagttactgaaggaattaatgaaaacgtagaagaaagtactaaaaggaatatcataagggctgtagctcaaacttcataatacataaatcactggggtctttttggatttggttgtttgattcgccttccttttttgacatatgtatgccttaattcttaaatctgagggaccatgctttgaaatagactgaaaattaagggtcaccacctaattttactttgtattcagtatcgtaagtgaggttaataaagtcaatactttctaccatatattacgtttttgttattaaaaaacttcattggccactagtgaagttagtcaataaaagacttgtttttctgaaaaaaaaaaaaaaaaaaaaaaaaaaaaaaaaaaaaaaaaaaaaaaaaaaaaaaaaaaaaaaaaaaaaaaaaaaaaa

SEQ ID NO: 31400 - DNA, 2528 bp, Homo Sapiens
ctctgagacacagccggaaaggctggcaggcaggggggctggggcgagcactggggggccatggagcgggcagaagagcctgtggtctatcagaagctgctgccctgggagccaagcttggagtcggaggaggaagtggaggaggaggagacatcagaggcgctggttctaaacccctggaggcaccaggactcttccaggaacaaggctggcgggctgcccggaacctgggcccgtgtagtggcagccctgctgctgctggctgttggctgctccctggctgtgaggcagctccagaatcagggcaggtcgacaggaagcttgggctctgtggcccctccacccggcggacactcccacggccctggcgtataccaccacggtgccatcatcagccctgcaggtgccatgttttggggcctcttccacgatagctcctcaggcaattccacggccctgacatcaggcccagcacagaccctggcccccggcctggggctgcccgcggctctgcccaccctgcacctgctgcatgcacgcttcggccgcctgccctggccacgcctgctagtgggccccaccacgctggctcaggagggcttcctggtggacacacccctggcaagggctctggtggctcggggcacagaaggcctctgtccactactttgccatgctgatgggacacccctgggcgctggggcccgagccaccaacccacaactggcagctgtgcttcgcagcgcagccctcgctcccacctcagaccttgctggggatgctctactgagtctactggcgggagacctgggggtggaggtgccctcggctgtgcccaggcccactttggaaccagcagagcagctacctgtgccccagggcatcctgttcaccacccccagtccctcagctggcccagaactgctggcactgttggaggcagccctgcgctccggggcgcccatccctgacccctgcccaccgttcctgcagactgctgtgagccctgagagcagtgccctggccgccgtggacagcagcggctctgtgctccttctcacctcctcgctcaactgctcctttggctctgcacacctgtccccaagcactggggttctgctcagcaacctggtggccaagtctaccactagtgcctgggcctgccccctcatcctccgtggcagcctggatgacacagaggctgatgtgttggggcttgtggcttcagggacccctgatgtggccagggccatgactcacaccctactcaggcatctggcagcaaggccccctacccaggcccagcaccagcatcagggtcagcaagaaccaacagagcatcccagcacttgtggccaagggaccctgctccaggtggcagcccacacagagcacgcccatgtctccagtgtcccccatgcctgctgccccttccaggggttctaacaggatgggggtgggtctggcagaaggcagagttatctgaagcatgggggcaggagcagagcagacacagcagcaatggagtgtgcacccgcagggtgtggtgcctcacacctgtaatctcagcactttgggtggtcaaggcaggaagatacctcgaggccaggagtttgaaactagcctagacaacaaagcaagatctcatctgtactaaaaatttaaaaatttgccaggggcggtggcacatgcctgttgtcccagctgcttgggaggctgaggcaggaagctcgcttgagctcaggagttcaaggctgcagagagctaggatcacaccactgcactccagcctggacaacagagtgagaacctgtctttaaaataataataataataataaaaaaatagctgggtgcggtggctcatgcctgtaatcccagcactttgggaggccaaggcaggtggatcacctgaggctaggagttcgagaccagcttgggcaacatggcgaaaccccgtctctactaaaaatacaaaaaattagctgggcatggtggcgtgcacctgtaatcccagctacttgggaggctgaggcaggagaatcacttgaacccgagaggtggaggttgcagtgaaccaagatcgcaccattgcaaccccacctgggcaacaagagggaaaccctgtctaaaaaaaaaaaaaaaaaaaaaggatttattatgtgctcactgctggctcaggccccaacctctggccttttaagttacctagacttgagttctggcatccagagctaacaatcattcttcagatcacccacaccggatggaatctctagctattttatcagctaagaaaatcagggtaataatgaaaaagcagtagggcctggggctagcactgagttcagatccagctttcaggaggacagtggaaagagtgcagagcctctgcctaggccctgggccccacgaagcaggacaggcagagcccagggtactgttggcatctctgtccttcccttcaggacaccccttacctatctgcctcaaccagactgggtacaaaataaagatcaagtctcccgg

SEQ ID NO: 31401 - DNA, 1988 bp, Homo Sapiens
catgctgcgccgctacctagcctcggaccccgactgccgctggtgcccggccccggactgcggttatgctgttattgcctatggctgtgccagctgcccgaagctaacttgtgagagggaaggttgccagactgagttctgctaccactgcaagcagatatggcatccaaatcagacatgcgatatggcccgtcaacagagggcccagactttacgagttcggaccaaacacacttcaggtctcagttatgggcaagaatctggaccagcagatgacgtcaagccatgcccacgatgcagtgcatacattatcaagatgaatgatggaagctgtaatcacatgacctgtgcagtgtgtggctgtgaattctgttggctttgtatgaaagagatctcagacttgcattacctcagcccctctggctgtacattctggggcaagaagccatggagccgtaagaagaaaattctttggcagctgggcacgttgattggtgctccagtggggatttctctcattgctggcattgccattcctgccatggtcattggcattcctgtttatgttggaaggaagattcacagcaggtatgagggaaggaaaacctccaaacacaagaggaatttggctatcactggaggagtgactttgtcggtcattgcatccccagttattgctgcagttagtgttggtattggtgtccccattatgctggcatatgtttatggggttgtgcccatttctctttgtcgtggaggcggctgtggagttagcacagccaacggaaaaggagtgaaaattgaatttgatgaagatgatggtccaatcacagtggcagatgcctggagagccctcaagaatcccagcattggggaaagcagcattgaaggcctgactagtgtattgagcactagtggaagccctacagatggacttagtgttatgcaaggtccttacagcgaaacggccagctttgcagccctctcagggggcacgctgagtggcggcattctctccagtggcaagggaaaatatagcaggttagaagttcaagccgatgtccaaaaggaaattttccccaaagacacagccagtcttggtgcaattagtgacaacgcaagcactcgtgctatggccggttccataatcagttcctacaacccacaggacagagaatgcaacaatatggaaatccaagtggacattgaagccaaaccaagccactatcagctggtgagtggaagcagcacggaggactcgctccatgttcatgctcagatggcagagaatgaagaagaaggtagtggtggcggaggcagtgaagaggatcccccctgcagacaccaaagctgtgaacagaaagactgcctggccagcaaaccttgggacatcagcctggcccagcctgaaagcatccgcagtgacctagagagttctgatgcacagtcagacgatgtgccagacatcacctcagatgagtgtggctccccccgctcccatactgcagcctgcccctcgacccccagagcccaaggtgcaccgagcccaagtgcccatatgaacctctctgccctagccgagggacaaactgtcttgaagccagaaggtggagaagccagagtatgaagtggaatgaatgctcctgttctgagaagcacacttgtaactgcatcttttggaattttttttttttttttttccaaggggtagagatttatgtattttatttcacagattctctggtcacaggtttttgcccagggaaattctgagaaattcacaatttcttaccagataaaacatgaaaagtttgccgttagttcccctcccctcccctccctctttttagttttaatttattggttaaactgatggcagcaatccatgaggtgtgtcaaagagtgtacatatgtatgtgtgtatattgaatgctaaacatattactgaaagacacattttaataaagatttctgtcataattcaactt

SEQ ID NO: 31402 - DNA, 4871 bp, Homo Sapiens
gcggcggacacttccctgggcgggactgtctcgtggcacccggtggaaccgaggagaacgtggagcgccgggagcggcgaatatggacgactacagcctggatgagttccgtcggcgctggcaggaggagctggcgcaggcccaggcgccgaagaagcggcgacggcccgaggctgccgagaggcgggctcggcggccggaggtgggctccgggcgcggcgaacaggcctcgggggacccggcgctggcccagcgtctcctggagggcgcggggaggcccccggcggcgcgggcgactcgggccgaggggcaggacgtagcgagccgctcacgttctcctctggcccgcgagggcgccgggggcggggagcagctggtggaccagctcatccgcgacctgaatgaaatgaatgatgtgcctttctttgatatccaactgccttacgaattggcaatcaatatatttcagtatctggacaggaaagaactaggaagatgtgcacaggtgagcaagacgtggaaggtgattgcagaggatgaggtgctgtggtacaggctgtgccagcaggaagggcaccttccggatagcagcatctctgactattcttgctggaagctcatcttccaagagtgccgagccaaggaacacatgttacgaaccaactggaagaatcgcaaaggtgccgtgagcgagctggagcatgttcctgacacagttttgtgtgatgtgcattctcacgatggtgtggtcattgcgggatatacatcaggggatgtgagagtgtgggacacccgcacctgggactacgtagcccccttcctggaatcagaggacgaggaggatgagcctggaatgcagccaaatgtctcctttgtgaggataaacagctcgttggcagtagcagcttatgaggatgggtttcttaatatttgggatttaaggaccggaaagtaccctgttcatcgttttgagcacgatgcaagaatacaggcactagccctcagccaggacgatgcaaccgtggccacagcttctgcttttgatgtcgtgatgttatcccccaatgaggaggggtactggcagatagctgcggaatttgaagttccgaaactggttcagtaccttgaaatagttccagaaaccagaaggtaccctgtggcagtagccgctgctggagatctgatgtacctgctcaaagccgaagactccgccagaaccctcctttacgcccacggcccgcctgtcacatgtctagacgtctcggccaaccaagttgcttttggtgtacagggtctgggatgggtgtacgaaggaagcaagatcctggtgtatagcctggaagcaggacgccgcctcttgaagctgggtaacgttctccgtgacttcacgtgtgtcaacctcagcgacagccctcccaacctcatggtcagtggcaacatggacgggagggtgaggatccacgacctccgcagtggtaacatcgccctgtcgctctccgcccatcagctcagggtctctgctgtgcagatggatgactggaagatcgtcagtggaggcgaggaaggcctggtgtccgtgtgggattatcggatgaaccagaagctgtgggaggtgtattccgggcacccggtgcagcacatctcattcagcagccacagcctcatcacggccaacgtgccttaccagacggtaatgcgaaacgccgacctggacagcttcactactcacaggagacaccgggggctgatccgcgcctatgagtttgcggtggaccagctggccttccagagccctctccctgtctgccgttcatcctgtgacgccatggccactcactactacgacctcgcactggcctttccctataaccatgtttagggatgtgcctcagttgggagcaaggagaaaaatgggaagaaccagttttatccatcttaaaacgccaggcacctcttcacaggtggtaaacatttaggggaagaaagcagcccagggtgccatgcctgacagcacgcatctccctgacccctgcacttcccccagcgcctggggcaagctggcgtgtgccagggctcgagtcccacgtgctgccaactcaaacatagcctccttccccacccagctggccaccctggcctcagctccctcaggacgcctcagggatctcgctgcgcggtcctatacggtccctgcttagccagcttctgtgtgtccgccctcccagctccagccctgcaggccgtcttttccgtctccagccccttacctcttttcctccgagggcctttggatgtgcttgttcctggcctccaaggcaataacctccatgtccttttccctgtatttacttggggtgctcttctgtgacacttgccaccaccaccttccagtagcaagctggtagagctgtactttttcttcacagcttttaccatggtttataattatatacttatacagtttagtcatcaatgactattttgcttactattgtgtctatgatatgtgatacaaagcaaatattttctaaatattcattgactaaacagccatcaagatgaaacaggacaggagagaactgttcagtgtgatacagagctgccatttccaaagtattctggaagcaagccattgccttactcttgattttcaacagttctaaacagcaacagcatccacctaatataccttcagaatatcaaagcgaaaactgatagaactacaaagagaaataaaatccattctcacggcaggcaaatcagtgagaaaaatgtaaagatctggaggatttacttagtatcgctaacaagctggatccagtagatgcgtatggaatttcaaatacacatagacgatgcacaaaaaaccaccctgtacgaaggccacaaagaacagctcagatgcacaaagattcacaccatacaggccaaattatagaatcccccaaccccaagacactgcaccctatgggctataccctcaggcagggccctgcttttctaggaattgactccaatgcagaatagtgagaaatcaacaaaaagcaaaataagacaattccagacactcctgaatttacttggatttaaagaggttaataaaaacaaactataaactctctagactgggctgacagtaaaagcacagaatacaaaacccaggggatggggctgggaggggctgtgaggggctggcacctcagctcagaaaaggtagcagcaatcccaaagcagcagaaggcaggggttaaatcaggataaaaacagacatcagtggaatcgaaaaccaatagttagttaatataaagccagaaggttttgttttttttcaggtggggtctcgctctgtcacctagactagactggagtgcaatggcctgatctcggctcactgcaacctctgcctcccgagttcaagcaattctcctgcctcagcctcctgagtagctgggattacaggcgtccgctaccacaactggctaatttttacatttttagtagagacgggggatattgctatgttggccaggctggtctcaaacttctgacctcaaatgattgcctgcctcagcctcccaaagtgctgggattacaggtgtaagtcactgtacccagcccaaaagcagtttaaaaaaaaaaaagacaaaatatacaactcttgataaaacataaaggtacagtggtctatgaggaagagaaaaggtacctgaggatgcagaagtacctaccacatgggaaccgtttgtccacactcattccagagaaaaccgagtcctctcagttgcacacgtgtacgtatcagtgggaagtgcttgccattactccaaagcctagaaccttcacgtcatgaaggttctggaaggtttttcagattgcttaagatacgcagccattccatattcatctccaactacacaggggaacggagcagatagagctgcgactgggaagcgtcaccttcccgtccagagcgctttctttcagaccctgcctacctgcaggcagatggaccggagggttttctgcttcctttcaaccagataacttcctaagtggagatggcctgtaggtagcaaatgcaggattttgtttactttcatcatgtcatgtggtggtcagactgctcgctggtggcctcgctttagaaggttttcatcaagccccgccctttctctctcatagtcttaatgcgtctggaccactggggaaaatatttttcttttcaaaaagcagccccttcagtctgcgttcccagttcattttgcaggcgcattcgcccttcctagtttgcagcaattaaagataacggagtgtaaagtcattagacccagaattagagcagccagcagctggcccagtgtaaaaatgtcccaagtgtagcccctcccaccgcagagcctgtttctaacgtacctgccattcgtggaagtcgcctgggttttgtaaaggagaattttttggactcaagctgtcatcttcaagcacgccaacttcaggcagtgttttctactgcaaacctccacatcctggaatcaatcacactgacagggaaaggataaatgctcctttataagccaacatgtatccaaattaagcccccttacctttatccagaccctttcacaaacaagttctgagtttttagccaattgatcctctactttccttctttagtccctctcagggacgcctccatccccggctcccctaaaggtagaagatactcgagcatgctgccaggggagctggatggtgaaacacctgaagatctcatatcgcctctcaaaacactgtcggacttgctttctgctttatgatgtccgtagttgttctaatattaaatgctttgaatttcaaaaaaaaaaaaaaaa

SEQ ID NO: 31403 - DNA, 1723 bp, Homo Sapiens
ggcagagctggaaggtctgtgcaagctggctcctgctggggaatcaataaaggaggcagagcaacgcttttttttttttttcgccgtggccagggcagggttctgccagggctctatcgccaatggagcaggggtccacctggggcctaggacgcctgcagatagccctctcttagccccaacggccgcgggcttcagcgctccccggctccctcgctctgcagggtcttcccggtaccggcaggccgcggcgggagctgctttcgctcttaaccttgcaggtgcgtgtgccgcgggcgcccggggcaggcaggacgcagaggaggaggcgcccgccatgcccggcctgcggctccccgcctcggcttcccgtccgccgcccccgcggaacggcctgctgcagcccctgtgaagaggaagaggcggcggcggcggcggaggaggaggaggcgccgcccccttggcaagctccccgacccggcggcctcggcaggacccatggcggattcctcgcccgcactgtccctgcgggaaggcggcccccgcgcgccgcggccctcggccccctcgccgccgccgcgctcgcgctccggctccgagtccgaggaggccgagctgtcgctgagcctggcccgcaccaagacccgctcgtacggcagcaccgccagcgtgcgggcgccgctgggcgccggcgtcatcgagcgccatgtggagcaccgggtccgcgcgggcgacacgctgcagggcatcgcgctcaagtacggtgtcacgatggaacagattaaaagggccaataaactgtttaccaatgattgtatatttctgaagaaaactttgaacatcccagttatatcagagaagcctttgttgtttaatggacttaactccattgattctccagaaaatgaaactgctgataacagtttttctcaggaagaggagccagtggtggccggggaagacctccctcctcccagtcctcaagaatctgatgttcagcctgtgcagcctgaggaagtgtcagccagagatttcctgcagagacttgacttgcagattaagttatcaacacaggcagccaagaagctaaaagaagagagcagagatgaagaaagtccctatgcaacttccctctatcacagttaggtgatttgggggcataactctaaccaaaattaagatatgtttggaccataaagaatccaacaactgaagattcaaaaacatcccttctggattcctatagtgtccatcttaaaatcataactaggtagttctacctgctgcagttgcactgaagtgattagttccctctggctttctataattttaagtctttattatggcatgatggcaaggttgtagcctaaagctcatcacttttgtaggtggtgttagtttttagactagcttttataaatactaattgacataaagcatcaaagattatttatatatttaggctaaaaataatgtttatctccttatgcaatcctgattatgtgaaaatatggttgctgtttaagtgatgctgaatttgctgtgtgtttataacttaagtgctatatatatatttcgatatgtttacatattctctattaatataaagaaccaaattttgtctgctattttgtaaaaataaactacaaaagcctgaatgagaaaataaactatgttttcaaacttgaaaaaaaaaaaaaaaaaaaaaaaaaaaaaaaaaaaa

SEQ ID NO: 31404 - DNA, 2467 bp, Homo Sapiens
cagagctggagccggagccgggcgggcgccatggaggggctgcggcgggggctgtcgcgctggaagcgctaccacatcaaggtgcacctggcggacgaggcgctgctgctaccgctgaccgtgcggccgcgggacacgctcagcgacctgcgcgcccagctggtgggccagggcgtgagctcctggaagcgcgccttctactacaacgcgcggcggctggacgaccaccagacggtgcgcgacgcgcgcctgcaggacggctcggtgctgctgctcgtcagcgaccccaggtagtctgggttggaggaggcagagccatgaccaaggggacctgggtactggctgaaggaataggctggggtagagggcacttttggaaggcacttctcctgcctcctgggagcctagatctcactccagggtctgggctcccaggtggaccatgaaaccctggcctgaccagctgatgcacactgcttcagacactcctgctggagccccagtccctgacaaggacctaggacatttttgctcctgcccagcctatcgggagggagccttgagcctttcagctctgctgtgtgactttgaggttgttgctcccctcttggggccctgggtgccctgtcttcagtggaaagcactgtgccaccttggaaagctcccatgggcagccagagggcatcgcaagaagagaagcacagaaggggcaggagagacactcagaggcacttccgctcttgcccaggacattctcccagccacacctttgcccaagccgtgccccctgcctggagcacttttcaacctcttctctgcagctccaatacacctgggattgcagtctcctccaggaagtcttctcagattccctccttcccagccagagagcacctagccttctttggggcccccacaggccctttgtgcagtgaacagccctggctgggggtgcagccagtcgtgtccgaactctccaatgactaagcggggagatgcggacatcctagctccttctcaggcctccaactgtgccccatttccacccccaaatacctccccaggaggcacctgtgcccaccccctgggctgtttcccccttccccttaaatccggatgcctcgtcttgcatagggtcttggggcagcggggaaggggttctgaagaactctggccaagaggacgaggatctgggggtggggaactgggcctagctgtgggaggtcatcgcggggcattgcagggagtgcgttgtgggaattccgggtggagaccctcagggcagtgtgccgggcctccgttgcacctctgacctgcagccacgtcatcgttgcgcagcccctggggagggtctttggggagggggtgccgaggctacgcatgtcctcgagggccgtgtacactctccaggcaccatgggcggaggcgccagaggctgggaagaaataatgttttagttaagagtcctgttggctgcaggactcagagcatggacaggtggatagtaaatcaccaccacggggacagccgtgcccagactgtgcgtttgcttagctcggggacagcacttggcccggggtctcctgctcgcctcccttcagagcatctgccaaacttcgggcatctaccctgcaattcccgcttggctgagaggagggggagaaggaggggaagagagaggagccccacttcactccggcaggcagacctgctggagctgctttgcagaatgacttgggtcttgctggcccctgggtgtgcctggaggggggtcttcctatccccctccacctctccccttggtgcctaacccaggactttgtccccagagacccactgtgtgccccctggagctcctcctagagcagagtctgctgctgtctgttctgcagagagtagcctgaggcccaaggaggttgtcagggacacagagcagggggaggcagcccagatccctgctcatgcgtggtttgggcctctgctaacagctgggccacatgtgtgtatctagagcctgggtcccctctgtcctcatttccctgtgcatattcagggacatgcctcgtcagggtttggcaagaaaatggggcatttaataatctccccagtttcattccttggtccttactccatgccaggacttgtgcacatctttttggagccctgtctcacttgattgacagccggccaggcgcggtggctcacgcctgtaatcccagcactttgggaggacgaggcaggcggatcatgaggtcaggagatggagaccatcctggctaacacggtgaaaccccgtctctactaaaagtacaaaaaaaatagccgggcctggtggcgggcgcctgtagtcccagctacttggtaggctgaggcaggagaatggcgggaacccaggaggcagaggttgcagtgagctgagatcacgccactgcactccagcctgggcgacagagcgagactccgtctc

SEQ ID NO: 31405 - DNA, 3234 bp, Homo Sapiens
cgcctgcccgcccgcccgctcgcccccggtccggactcctcctcctcctcttctcgccattgcagttggacccagcagcccggcgcgcaccgcgtggcttttgggggcagaccccggcgggctgtggcaggagggcggcggcggcggctgcggtcgaagaaggggacgccgacaagagttgaagtattgataacaccaaggaactctatcacaatttgaaaagataagcaaaagtttgatttccagacactacagaagaagtaaaaatgcgtccaatgcgaatttttgtgaatgatgaccgccatgtgatggcaaagcattcttccgtttatccaacacaagaggagctggaggcagtccagaacatggtgtcccacacggagcgggcgctcaaagctgtgtccgactggatagacgagcaggaaaagggtagcagcgagcaggcagagtccgataacatggatgtgcccccagaggacgacagtaaagaaggggctggggaacagaagacggagcacatgaccagaaccctgcggggagtgatgcgggtgggcctggtggcaaagggcctcctactcaagggggacttggatctggagctggtgctgctgtgtaaggagaagcccacaaccgccctcctggacaaggtggccgacaacctggccatccagcttgctgctgtaacagaagacaagtacgaaatactgcaatctgtcgacgatgctgcgattgtgataaaaaacacaaaagagcctccattgtccctgaccatccacctgacatcccctgttgtcagagaagaaatggagaaagtattagctggagaaacgctatcagtcaacgaccccccggacgttctggacaggcagaaatgccttgctgccttggcgtccctccgacacgccaagtggttccaggccagagccaacgggctgaagtcttgtgtcattgtgatccgggtcttgagggacctgtgcactcgcgtgcccacctggggtcccctccgaggctggcctctcgagctcctgtgtgagaaatccattggcacggccaacagaccgatgggtgctggcgaggccctgcggagagtgctggagtgcctggcgtcgggcatcgtgatgccagatggttctggcatttatgacccttgtgaaaaagaagccactgatgctattgggcatctagacagacagcaacgggaagatatcacacagagtgcgcagcacgcactgcggctcgctgccttcggccagctccataaagtcctaggcatggaccctctgccttccaagatgcccaagaaaccaaagaatgaaaacccagtggactacaccgttcagatcccaccaagcaccacctatgccattacgcccatgaaacgcccaatggaggaggacggggaggagaagtcgcccagcaaaaagaagaagaagattcagaagaaagaggagaaggcagagcccccccaggctatgaatgccctgatgcggttgaaccagctgaagccagggctgcagtacaagctggtgtcccagactgggcccgtccatgcccccatctttaccatgtctgtggaggttgatggcaattcattcgaggcctctgggccctccaaaaagacggccaagctgcacgtggccgttaaggtgttacaggacatgggcttgccgacgggtgctgaaggcagggactcgagcaagggggaggactcggctgaggagaccgaggcgaagccagcagtggtggcccctgccccagtggtagaagctgtctccacccctagtgcggcctttccctcagatgccactgccgagcaggggccgatcctgacaaagcacggcaagaacccagtcatggagctgaacgagaagaggcgtgggctcaagtacgagctcatctccgagaccgggggcagccacgacaagcgcttcgtcatggaggtcgaagtggatggacagaagttccaaggtgctggttccaacaaaaaggtggcgaaggcctacgctgctcttgctgccctagaaaagcttttccctgacacccctctcgcccttgatgccaacaaaaagaagagagccccagtacccgtcagagggggaccgaaatttgctgctaagccacataaccctggcttcggcatgggaggccccatgcacaacgaagtgcccccaccccccaaccttcgagggcggggaagaggcgggagcatccggggacgagggcgcgggcgaggatttggtggcgccaaccatggaggctacatgaatgccggtgctgggtatggaagctatgggtacggaggcaactcggcgacagcaggctacacaggttttgtatgaatttttaaccttttaacaaactcccaaatctggttgatgcctttgacagtgatgaaaacgatttcaccacatctgaatccagagaaaccggctttttttcttattgcgagcatgttaaaacgttgggaacatgtggggaattgtatattgcgctgaattaacttctcccgcctcttgtaatgctctggtgggttcttgtttgggaatgcgatattttgtggctggtttagctagagagtgaactctcaaaggtatcaaaactgtgcttccattattagtgcaagaaacagacaggctttaaggggtagatgacgtgaaattttgcaagtcttaattacagctgcagatgcatgggattctggatttttttgttgctttttagtttaatgggactttaaaagtaattgaggagaaagaaccgtgatgttccctgtttctccagtaaaggactggcttttgcttgggcagaggtggtgctgctgggtgtgcagctgccacagactccaaaggcgtagaagtttgtgccaacacacggagtcattctggctctctgctgaggcccctgttttctggcaggtgccctccttggaaactggttttggctctgatcagcggttctttttgcagcaaagcctgcatctgtgttgacttgcaagattttgcgtttattcaggcaaaaactggtcaaaatggttactacatgatttgttcccagaggtttgaaacattcagtgaaactttttaaaactttgattgcatgatgtattttttttttagaaagttattgtttgagaataatgtctttttataccaggaaaatagttatcctgaatgacgttgaaaactccccctcccctttatttttttttaatcaatacatgtgaaagtaacaagc

SEQ ID NO: 31406 - DNA, 5446 bp, Homo Sapiens
cgggaacccgtcaggaaggacataaacaaaacaaacccgaggcagcatggagaggggccgtggcccctgcagcggaaccggacccagtccctgagccgcccctacacccacagacagcatcgcacagaattattttaaaaaaaagcagtgatccaagcaattgaattggaagcactctggggaaacctgctgtttattgtggaaatcatcttcgatcttggaattgaaagtaaagctggaaaggaatttacaaacaagaaaaaaaagaagtttggaatcggattcacaggatctgggcttggaaatgcctcagcctagtgtaagcggaatggatccgcctttcggggatgcctttcgaagccacaccttttcggaacaaactctgatgagcacagatctcttagcaaacagttcggatccagatttcatgtatgaactggatagagagatgaactaccaacagaatcctagagacaactttctttctttggaggactgcaaagacattgaaaatctggagtctttcacagatgtcctggataatgagggtgctttaacctcaaactgggaacagtgggatacatactgtgaagacctaacgaaatataccaaactaaccagctgtgacatctggggaacaaaagaagtggattacttgggtcttgatgacttttctagtccttaccaagatgaagaggttataagtaaaactccaactttagctcaacttaatagtgaggactcacagtctgtttctgattccctttattaccccgattcacttttcagtgtcaaacaaaatcccttaccctcttcattccctggtaaaaagatcacaagcagagcagctgctcctgtgtgttcttctaagactctgcaggctgaggtccctttgtcagactgtgtccaaaaagcaagtaaacccacttcaagcacacaaatcatggtgaagaccaacatgtatcataatgaaaaggtgaactttcatgttgaatgtaaagactatgtaaaaaaggcaaaggtaaagatcaacccagtgcaacagagccggcccttgttgagccagattcacacagatgcagcaaaggagaacacctgctactgtggtgcagtggcaaagagacaagagaaaaaagggatggagcctcttcaaggtcatgccactcccgctttgccttttaaagaaacccaggaactattactaagtcccctgccccaggaaggtcctgggtcacttgcagcaggagagagcagcagtctttctgccagtacatcagtctcagattcatcccagaaaaaagaagagcacaattattctctttttgtctccgacaacttgggtgaacagccaactaaatgcagtcctgaagaagatgaggaggacgaggaggatgttgatgatgaggaccatgatgaaggattcggcagtgagcatgaactgtctgaaaatgaggaggaggaagaagaggaagaggattatgaagatgacaaggatgatgatattagtgatactttctctgaaccaggctatgaaaatgattctgtagaagacctgaaggaggtgacttcaatatcttcacggaagagaggtaaaagaagatacttctgggagtatagtgaacaacttacaccatcacagcaagagaggatgctgagaccatctgagtggaaccgagatactttgccaagtaatatgtatcagaaaaatggcttacatcatggaaaatatgcagtaaagaagtcacggagaactgatgtagaagacctgactccaaatcctaaaaaactcctccagataggcaatgaacttcggaaactgaataaggtgattagtgacctgactccagtcagtgagcttcccttaacagcccgaccaaggtcaaggaaggaaaaaaataagctggcttccagagcttgtcggttaaagaagaaagcccagtatgaagctaataaagtgaaattatggggcctcaacacagaatatggtaatttattgtttgtaatcaactccatcaagcaagagattgtaaaccgggtacagaatccaagagatgagagaggacccaacatggggcagaagcttgaaatcctcattaaagatactctcggtctaccagttgctgggcaaacctcagaatttgttaaccaagtgttagagaagactgcagaagggaatcccactggaggccttgtaggattaaggataccaacatcaaaggtgtaatcagcctcattggaccactggtcagaaatgtctgcgttttgtcacgttatccattgtaaattttcattctgttttgcatgtcagttagcattatgtaaacatttacaattaggttacattgttttaagaactaagtagcataagtgaagcatgatccaaaatacttgattattgcattttcagagcataaaccatgattaaaactgctactggcatcagaattgaaaatcatatgtttaagtaaatgttaggtacagattacaaaaatctgttaaagcaaaacattttggaggagtgaaatagtaaaatgccaagtattgtggcagatttatgctctgaaccacacaaaaaaattgaggaagcatttttttaaacagtcggtttaaattgtttttagaattattgctttttgttctaattttccacaaccattaatctcacttgtatatggcacacccagcacttgtgcctgtgggccatattagatgttcattgtcagagctcaagatgatatatataaatatatatatatatatatatatatacacacacacacacaaatgtctgtgcaagtaagaaaaaaaaagcatattctttgtgccttgtattttggggaaactctaaaactggtaatattttgtatgatgaaaaccctaatgagaaaaaacaagatatatagatggaaaaattatggggtttaaatgtttttttgttccaactctttttcagattttttgaatgtatataggactatgttgaaatgtagatatatgccacagagtctgtgtattgtataaaaaacaaaacaaaaaacaacaaaaaaaagatggctctagaaaactcatatttcggtacttgaccggaagaagacaaatacttgcacattattgcgattgttttattttttgtaccaaagacaaatgcaactgatatggcaaactgccagtctaagtaaagttttgcacagcttacatgatactgtatgaatgtatgaaaaaaaaggagaaaaaaaagaaaaaaaaaggtcagggttagggatcttactgaactgtgaattttatttctgtttgggtccaattatctacagaaggagcatccatacatacaaatattattttgctgttcctctagttcgcttccatagtagataagttggtggccatttagatgtcttttatttctgcacttattgtaggaaattttaatatatttcattttagtaagctattgataaaatagtttttgactttgaaaattaaaatgtttatttagcttattgtagtatacttccaccagacaacaaaatagattatttttattgtattatgtatatatatatatgtaaagaaagaaaaaagctaaaaatatctaattctttagttgccacttttccgattgatgtattattgtgcatgtaatattttcaaagatcaacacaggctaaaacaaaaacaatttatagatttttatatttttgtacaggtattttcaaactagcttcttcaaacttaacatgtgacttattcttctatagtttctagaattgagaaacattaacacatttagtttttaggtgctcttttttgctcatataaaacagcttcattagtcagtgttttaactgtgttcaagctttacctcttgatgagaaatttcttatgtcaaggcagcattataaaccttcccccacagatttttccatcctgtctctcttactgttttattctcaaatcttgtgctttgaactctgaaaactggtggcttaaaaactaaaaaaagaaaaaaagcatatttagcaaggaaaaaaataccaaaaatttcaggcatagctgctggaaaaattatctatttctccattacccactgtaggatttcttttttaattatactttgactataaagtgtcaaagtataatttgttcttttcttttactttgttaccccatttgtaagctatagcatatgaagctatatatatagcttgtgaaggtttgatctagaacacccagtaacaaatgaacaatgttgcttacctgcttctttgacatcttaaaaaagaaatccaaggaggattgtaaggattgtcttaccaccttagctgaactgtgatgcacaagatttttctatgtgtttggtggaaatgtacctggtttgtacattcacgctaaacagatgataagctcaagtctgatggtttaatagaatgtaagttcatcgtttaaagcttttcctttttaggttggagaaggcaaaacacaggcttgcaagttggaagtatatgaagtcttgacagagtgtgtctggtaaattgaaaagtgtttcaaactatggcagttttgcaatcaggtgaaaatcacctcatgatattcagctgataaggtttataaaattgcccctttctagctgctctgttaggaattctggtttttgatacttttttcctgtctgcaaaccagaatttgattttttggtcttgcatttcaaaaaaaaaaagactttgaatctgtttagtagattccatatctttgagtttcagtgttttatatgtactacttaagttaaatagttaaaagcttttaaatagttgagctttttaatgttgacactttattttgtacctatttatatatgtatgtatatcttagaaaagcactttgttaaaaaaaaattgcattttatatgattcctgccatttgctgctaaatctgggctggtcagaatgctgcagcgatacttgatctatataaaaacctggcagtaaaatgtagagtgaaagttaaatcctcttgctgttttaactttatcataaagatgacataggcaagctgtgcagctttacattttaaccaggggactctgtggcatttaaaaccgtctagaaatggttgtactttaatgccagtaataatctgcttcctctattgtcattaaaatatatacgtttagtgtatcacacaaaccaatcttataagggtaatgtaaaaaccccaacaattgtacatgttctgtttttgaaaattgtggcatgtatttttgggtgaagatcattagagaagagttctctaaaggttttctgtgttcatacatggtatacagatagctcataatgaagtccagaatcttacttttaagtgaaggcattgtgaattcacctcaagtaaacccattgttccaaagcaattataaactttgactctagtactactatgatttaaaaaaaaa

SEQ ID NO: 31407 - DNA, 4518 bp, Homo Sapiens
cagtagatatcacaaaagaaagtatgaaagaaggatttccatctaaagaatccgaaaggactttagctcgtccttttgatgaaactaagagctcagaaacaccgccatatttgctgtcacctgtaaaaccacaaactcttgcttcaggagcttctccagaaattaacgcagtgaagaaaaaagaaatgccacgatcagaattgactccagaaaggcatacagttcatactattcagacatctaaagatgacacatccgatggcctaaacaatctgttcttgtttcaaagcaccacttggaggctgcggaagatacccgtgtaaaggaaccactgtcttcagcaaaaagcaactatgctcaatttatatctaatacatcagcaagcaatgctgataaaatggtttctaataaagaaatgcccaaggaacctgaagacacatatgcaaaaggtgaagactttacagtgactagtaagccagccggactttcagaagatcagaagactgcctttagtatcatttctgaaggctgtgagatattgaatattcatgctccggcctttatttcttcaatcgatcaggaagaaagtgaacaaatgcaagataaattagaatatttggaagagaaagcctcatttaaaaccataccactccctgatgatagtgaaacagttgcttgtcataaaacattaaagagcaggttagaagatgaaaaagttaccccattgaaagaaaataaacaaaaggaaactcataagacaaaagaagagatatccacagattcagaaactgatttatcatttattcagcccacgattcccagtgaagaggattattttgaaaaatatactttgattgattataacatctccccagacccagaaaaacagaaagctccacagaaattaaatgttgaagagaaactctcaaaggaagttacagaagaaactatctctttcccagtaagttcagtggaaagtgcactagaacatgaatatgacttggtgaaattagatgaaagtttttatggaccagaaaagggccacaacatattatctcatccagagacccaaagccaaaactcagctgacaggaatgtttcaaaggacacaaagagagatgtggactcaaagtcaccggggatgcctttatttgaagcagaggaaggagttctatcacgaacccagatatttcctaccactattaaagtcattgatccagaatttctggaggagccacctgcacttgcatttttatataaggatctgtatgaagaagcagttggagagaaaaagaaggaagaggagacagcttctgaaggtgacagtgtgaattctgaggcatcatttcccagcagaaattctgacactgatgatggaacaggaatatattttgagaagtacatactcaaagatgacattctccatgacacatctctaactcaaaaggaccagggccaaggtctggaagaaaaacgagttggtaaggatgattcataccaaccgatagctgcagaaggggaaatttggggaaagtttggaactatttgcagggagaagagtctggaagaacagaaaggtgtttatggggaaggagaatcagtagaccatgtggagaccgttggtaacgtagcgatgcagaagaaagctcccatcacagaggacgtcagagcggctacccagaaaataagttatgcggttccatttgaagacacccatcatgctctggagcgtgcagatgaagcaggcagtcacggtaatggagtcggaaatgcaagtccagaggtcaatctgaatgtcccagtacaagtgtccttcccggaggaagaatttgcatctggtgcaactcatgttcaagaaacatcactagaagaacctaaaatcctggtcccacctgagccaagtgaagagaggctccgtaatagccctgttcaggatgagtatgaatttacagaatccctgcataatgaagtggttcctcaagacatattatcagaagaactgtcttcagaatccacacctgaagatgtcttatctcaaggaaaggaatcctttgagcacatcagtgaaaatgaatttgcgagtgaggcagaacaaagtacacctgctgaacaaaaagagttgggcagcgagaggaaagaagaagaccaattatcatctgaggtagtaactgaaaaggcacaaaaagagctgaaaaagtcccagattgacacatactgttacacctgcaaatgtccaatttctgccactgacaaggtgtttggcacccacaaagaccatgaagtttcaacgcttgacacagctataagtgctgtaaaggttcaattagcagaatttctagaaaatttacaagaaaagtccttgaggattgaagcctttgttagtgagatagaatccttttttaataccattgaggaaaactgtagtaaaaatgagaaaaggctagaagaacagaatgaggaaatgatgaagaaggttttagcacagtatgatgagaaagcccagagctttgaggaagtgaagaagaagaagatggagttcctgcatgagcagatggtccactttctgcagagcatggacactgccaaagacaccctggagaccatcgtgagagaagcagaggagcttgatgaggccgtcttcctgacttcgtttgaggaaatcaatgaaaggttgctttctgcaatggagagcactgcttctttagagaaaatgcctgctgcgttttcccttttcgaacattatgatgacagctcggcaagaagtgaccagatgttaaaacaagtggctgttccacagcctcctagattagaacctcaggaaccaaattctgccaccagcacaacaattgcagtttactggagcatgaacaaggaagatgtcattgattcatttcaggtttactgcatggaggagccacaagatgatcaagaagtaaatgagttggtagaagaatacagactgacagtgaaagaaagctactgcatttttgaagatctggaacctgaccgatgctatcaagtgtgggtgatggctgtgaacttcactggatgtagcctgcccagtgaaagggccatctttaggacagcaccctccacccctgtgatccgcgctgaggactgtactgtgtgttggaacacagccactatccgatggcggcccaccaccccagaggccacggagacctacactctggagtactgcagacagcactctcctgagggagagggcctcagctctttctctggaatcaaaggactccagctgaaagttaacctccaacccaatgataactactttttctatgtgagggccatcagtgcatttgggacaagtgaacagagtgaagctgctctcatctccaccagaggaaccagatttctcttgttgagagaaacagctcatcctgctctacacatttcctcaagtgggacagtgatcagctttggtgagaggagacggctggcggaaatcccgtcagtgctgggtgaggagctgccttcctgtggccagcattactggaaaaccacagtcacagactgcccagcatatcgactcggcatctgctccagctcggctgtgcaggcaggtgccctaggacaaggggagacctcatggtacatgcactgctctgagccacagagatacacatttttctacagtggtattgtgagtgatgttcatgtgactgagcgtccagccagagtgggcatcctgctggactacaacaaccagagacttatcttcatcaacgcagagagcgagcagttgctcttcatcatcaggcacaggtttaatgagggtgtccaccctgcctttgccctggagaaacctggaaaatgtactttgcacctggggatagagcccccggattctgtaaggcacaagtgatccttggctttcagaatttgcaagaacagcgatttgaattttgggggggtctgctgttcattcctttaggtgctatacattattcaaaaagtctcccgcgcatttgcactaatgatggctgcatgcatagcaatcagcatgtgagcaaaatcgacaagaaaaccttgactttacagagcagtgtgtgagtaaacagaatgaaaacaacaacctccactctttagtttatataagtttgagttctttcctaaattaaaagatctacacttgagttgggaaccgaaagagaaaaatggacttccatctgttttactggtaaaggaaatcctctgatggacaggtcagagtgaaggaaggttgtgctggtaagacatctctgacgaagagccatggatgctttccacaaaatgtcacctcgctgcactaaaggatgatgaatcctaatcattaaaggaattgtttcagctgatttaaatttataatgaactcttttgtaataatgtatactgtagaacatgagtctctcctccctaaaattttaaatgtagaaaagtgctatatattagaaatttccattttgttaaataaatggttaaagtctataaagccaaaaaaaaaaaaaaaaaaaa

SEQ ID NO: 31408 - DNA, 1215 bp, Homo Sapiens
agaaaaacgacaaagcgagaaaaattattttccactccagaaattaatgatcatgagctcgtatttgatggactctaactacatcgatccgaaatttcctccatgcgaagaatattcgcaaaatagctacatccctgaacacagtccggaatattacggccggaccagggaatcgggattccagcatcaccaccaggagctgtacccaccaccgcctccgcgccctagctaccctgagcgccagtatagctgcaccagtctccaggggcccggcaattcgcgaggccacgggccggcccaggcgggccaccaccaccccgagaaatcacagtcgctctgcgagccggcgcctctctcaggcgcctccgcctccccgtccccagccccgccagcctgcagccagccagcccccgaccatccctccagcgccgccagcaagcaacccatagtctacccatggatgaaaaaaattcacgttagcacggtgaaccccaattataacggaggggaacccaagcgctcgaggacagcctatacccggcagcaagtcctggaattagagaaagagtttcattacaaccgctacctgacccgaaggagaaggatcgagatcgcccactcgctgtgcctctctgagaggcagatcaaaatctggttccaaaaccgtcgcatgaaatggaagaaggaccaccgactccccaacaccaaagtcaggtcagcacccccggccggcgctgcgcccagcaccctttcggcagctaccccgggtacttctgaagaccactcccagagcgccacgccgccggagcagcaacgggcagaggacattaccaggttataaaacataactcacacccctgcccccaccccatgcccccaccctcccctcacacacaaattgactcttatttatagaatttaatatatatatatatatatatatatataggttcttttctctcttcctctcaccttgtcccttgtcagttccaaacagacaaaacagataaacaaacaagccccctgccctcctctccctcccactgttaaggacccttttaagcatgtgatgttgtcttagcatggtacctgctgggtgtttttttttaaaaggccattttggggggttatttattttttaagaaaaaaagctgcaaaaattatatattgcaaggtgtgatggtctggcttgggtgaatttcaggggaaatgagg

SEQ ID NO: 31409 - DNA, 3190 bp, Homo Sapiens
aaaaaacttcccccaccaccagcggcgagtgggtgacagagcccccgtctccgcgcgtcttcgccgccctgcgccgtgacccgctgtggcactgggccacgagtggaggctgcgcccctccagttctgccttcatagttctctgcctttgcccaaaactgcagaaaatgaacaaatcccagggatcagtttcattcacggatgtgactgtggactttacccaggaggaatgggaacaactggacccctctcagaggatcctatacatggatgtgatgctggagaattatagcaacttgctttcagtgggtaaggacggttttcagaagtgtggaaggctgatgaccagatggagagagaccacagaaacccagacgagcaggcgaggcaatttttaattcttaagaaccaaaccccaattgaggaaagaggcgatctctttggaaaagcacttaatctgaacacagactttgtttctttaagacaagtaccttataaatatgacttatatgaaaaaactttgaaatataattcagacttgcttaatagtaatagaagctatgcaggaaagcagactgatgagtgtaatgaatttggaaaagcacttctctacctgaagcaagagaaaacccacagtggagtagaatattctgaatacaataaaagtggaaaagccctcagccataaagcagccatttttaaacatcagaaaataaaaaacttggttcaacctttcatttgtacttactgtgacaaggctttctcctttaagtcactcctcattagtcataagagaatacatactggagaaaagccatatgaatgcaatgtatgtaagaaaaccttctcccataaggccaacctcatcaaacatcagagaattcacactggggagaaacctttcgagtgtccggaatgtggaaaagctttcacccaccagtcaaacctcattgtacaccagagagcacatatggagaagaagccctatgagtgcagtgaatgtggaaagacatttgcccaaaagtttgaactcaccacacaccagagaattcatacaggagagcgaccctatgagtgtaacgaatgtgcaaaaaccttctttaagaagtcaaaccttatcatacatcagaagattcacacgggggagaaacgctatgagtgcagtgaatgtggaaaatcctttatccagaactcacagctcatcatacacatgagaactcatacaggagagaaaccctatgaatgtactgagtgcggcaaaactttcagccagaggtcaactcttagattacacttgcgaatccacacaggagagaaaccatatgagtgttccgaatgtgggaaggcctttagcaggaagtcccgactcagtgtccatcagagagttcacatcggggagaaaccctgaaactccagccaggtcttactgtggaaaactcctgccagaactcttcaagcgggtgaaaaacctcatgacagtattgagggaacatgggaatttatactgagatgcaatctctcaactcaaaaatgtattaaaaataggatcccatgagaacattatactggaagttacatgtgatacccagctaaagaatacatatcagaatatatccagttgtaaatagccatacccagttgtactacaatgagctttttaaaatcttgaatgaattgagtattctagacagcagcataagaaatatacaaacagtatcctatgaatttagtggttttatgtggatatgccacaaaacacaagtggtatgctttagatctgcacatgtgaatttagcataatcactgggaatttgaaattcttgtcctctgtgataattaggacataacaagattttccatactaaacatcacatgtgtttttcagtatctctgcaatccagtatgcattccaaatgaaatgtgtaacatttaaagtagcatggaacctacgtctttccctactgcttgctggcatatatcagttggtatgaacattgttcttgagctgcctcttaggaaacagaagacagtgttgaagttttccctgcttctggtttgctgaagattttctagactgcttctggtttgctgaagattttctagaagcactatttacacaaatatgcaaatgtgaaataaccgatctataacgtgaaggaggcagacatgagctgtactactcagtatgcaccacagaataagagtttgccgtgtaaagacaatatccccattcgtcatgctcttattttcccgtgggatatttgcatacaaatgcatgtctgttaccaaaatattgtgtaacacagacagaaaccacctgtttttgtctttccttgtttcccttaatatttcatgaattgtctagcaaaaatggtaggatgcttctgtagttcacaaatgttacatttcagagactttggaggaaaaattattttaaataactgtcaactgtttcattgctttttaaatttttcacgtgcataaccccctttagaagtaaatttttacactattttgttgtttaaaggaggcatttctacttccttgagttttgctgttgccaacctaaaacatttccctttggaacatgagttataagttattacttttcctttacatgtttacacttttataaaaatcagatttttcagtggtctctccagatattaacaagaattgttgtgtaactcaaagatttgcttttatagacttgatttcaaattcttaagttcagcctttccctatcaatcacaaatcatgtattggaaattataaatggcaaccaaaaaccggcttttaaaaaatatttttggatatcattgatgtgctgtcacactatatattgagtgactttctgaacaaatttatccagaacatccatagcccaataagcttttgtctaagttgtcatcttacttactcacaaaggaggggaaaacgttattttcatagctgcttttagaaatgtagattgtaacagcctccttggacaacattgtgagtctgttttaacattaatatactcttacaacctaggaatctcctgggaatctatccctaaggagtaaaaagcgccagcacttaagattatatgtttactaatgtatattgtattttttggtaaggaccaaaaaaacaaacaaaaaaaagaccatcagtaagggaatggatgaataaattgtggtaaaaac

SEQ ID NO: 31410 - DNA, 2552 bp, Homo Sapiens
tttttttgcttgtagctccagccagagctcggttagggcctcatcgctctgctcccgctccttagggaagcctcggtgattctgccacagcctcagcctctgtggctctgtgacctgccggtattggatgattcgtatctaagactctgggacactcctgaagtcgggaaatggtgagtgtgcagggcagggcgtcccaaggctgtggaggcctcatcggaaccggcgggaaatggcggcggtgggaggagtctgtgaatggagttcccgctcagccctctgtcctcagtcccctccggtgagggacccgcgctcttgtcagtccccgtacagcggctctggcccagcctgcagccctccttgtgcagctctgcgccggtagccctgcactttccccgggctgtggagtgagtaggagctcatccggaagacaccgcggcggcctgcgcggtgccggcgtgggaggagctgtggtccggaatcccgtccctactttaccctgttcagaatgagattgaggccccatcaaaacatggagttcatgtgagcaaacaggacttattaatgggaaagctctgccgtggctcgtggtttggggactgccagcgggtcttgaaggaaaggcttttgtgaggtgtgtgaggaagcgaagcaaatcacctgcctgcgccaactttgccgccagtccccttgccctgtgcgcctcctccgcgtggctgttcctgaatacgctggtgtctgttcgcatcttttagaatacgctggtgtcggtgcgcacagcgcttctcttagttctacggagtcttcgctgtgtcgccaggctggagtgcagtggtgcgatctcggctcaccgcattctccacctcccaggttcaagcgattcacctgctcagcctcctgagtagttgggattacaggcgcgccaccacactcagctaatttttttgtatttttagtagagacggggtttcgccatgttggccaggatggtctccatcttctgacctcatgatccaccggcctcggcctcccaaagtgctgggattataggcgtgagccaccgtgcctggctgaagctgtgtgttctcatttcacccaaaacctttggacagtgcagggcatagaagattcattccacaaacttataccaaaaggacatgagaaacgtggacatgagaatttaagaaaaacttgtaaaagtataaatgagtgtaaggtgcagaaaggtggttataatagaattaaccaatgcttattaactacccagaaaaaaacaattcaatctaatatatgtgtcaaagtttttcataaattttcaaattcaaacaaagataagataagatatactggagataaaacctttaaatgtaaagaatgtggcaaatcatttcacgtgctctcacgcctaactcaacacaaaagaattcatactggagagaacccctacacatgtgaagaatgtggcaaagcctttaattggtcctcaattcttactaaacataagagaattcatgccagagagaaattctacaagtgtgaagaatgtggtaaaggctttactcggtcctcacaccttactaaacataagagaattcatactggagagaaaccctacatatgtgaaaaatgtggtaaagcttttaaccaatcctcaacccttaatttacataagagaattcattctgcacaaaaatactacaaatgtgaagaatgtggtaaagcctttaagtggtcctcatcccttaatgaacataagagaattcatgctggagagaaacccttctcatgcgaagaatgtggcaatgtctttaccacatcctcagactttgctaaacataagagaattcatacaggagagaaaccctacaaatgtgaagaatgtggaaaatcctttaataggtccacaactcttacgacacataagagaatccatactggagagaaaccctacacatgtgaagaatgtggaaaagcctttaattggtcctcaacccttaatgtacacaagagaattcactctggaaaaaatccctacaaatgtgaagattgtggcaaagcctttaaagtgtttgcaaacctgcataatcataagaaaattcatactggagagaaaccctacatatgtaaacaatgtggcaaagcctttaaacagtcctcacacttgaataaacataagaaaattcacactgtagataaaccctacaaatgtaaagaatgcgggaaagcttttaagcagtactccaaccttcctcaacataagagaactcatactggaggaaaattttagaaatgtgaagaatgtgggagcctttaagtcttcctcagtcttttctaatcataattcatactggagagaaactctacacatgaaaaaattgacaaagcttttaaccgcaactcaatctgttctaaacataagagaaatggtattggtgagaagccataaaaatatgaaaaatgtggaaaagccttcaaatgcttgtcacatcttactgaatataattcttactgcagaaaacccctaggaatattaaaagtgtggcaaaaccttt

SEQ ID NO: 31411 - DNA, 1126 bp, Homo Sapiens
ttgcctcagaagcgtcgcggagaaggggccacctcaggtgaagcgcgcttgtggaggagttgtggaggacgcctgtcgacgaccagtaactggtcctcggccattgcggtgtgtttcaggaagcatctaaatatggtgtcctccggaaaaaagtattccaggaaatctgggaagccgtctgtggaagatcagtttacgagagcctatgactttgagactgaagataagaaagatctgagtggatcagaggaagatgttattgaagggaagactgcagtcattgagaaacgtaggaagaaaaggtcttctgcaggagtagttgaagatatggggggtgaagtgcagaatatgctggaaggagttggagttgacattaacaaggctcttcttgccaagagaaagagactagaaatgtataccaaggcttctctcaaaactagtaaccagaaaattgaacatgtttggaaaacacaacaagatcaaaggcagaagcttaaccaagaatattctcagcagtttctgactttgtttcagcagtgggatttagatatgcagaaagctgaggaacaagaagaaaaaatacttaatatgtttcgacagcaacaaaagattcttcaacaatctagaattgttcagagccagagattgaaaacaattaaacagttatatgagcagttcataaagagtatggaagagttggagaagaatcatgataatctacttactggtgcacaaaatgaatttaaaaaagaaatggctatgttgcaaaaaaaaattatgatggaaactcagcagcaagagatagcaagtgttcggaagtctcttcaatccatgttattctgatgactctttgaagaaagaacttgaacctaagtaatatgatacaattataacgttagctaagaagcatattgtaagtctttagaatagtttaattgtaacatctttaatcataaacctgtttcattgtaagacctccctttctgttaagtcaaatctaaatagttatgagttagttagcaactattcctaaagaatatgtattaagctttcagctctttagtaatgatagtgaatttttctctctaacactgtcaattaaataaagacgatttaattttaaaaa

SEQ ID NO: 31412 - DNA, 4470 bp, Homo Sapiens
ggcccgggcgcgcggcgcttcgccatgtacaccttcgtggtacgcgatgagaacagcagcgtctacgccgaggtctcccggctgctcctcgccaccggccactggaagaggctgcggcgagacaaccccagattcaacctgatgctgggagagaggaatcggctgcccttcgggagactgggtcacgagcccgggctggtacagttggtgaattactacaggggtgctgacaaactgtgtcgcaaagcttctttagtgaagctaatcaagacaagccctgaactggctgagtcctgcacatggttccctgaatcttatgtgatttatccaaccaatctcaagactccagttgctccagcacagaatggaattcagccaccaatcagtaactcaaggacagatgaaagagaattctttctcgcctcttataacagaaagaaagaggatggagagggcaacgtttggattgcaaagtcatcagccggtgccaaaggtgaaggcattctcatctcctcagaggcttcagagcttctcgatttcatagacaaccagggccaagtgcacgtgatccagaaatatcttgagcaccctctgctgcttgagccaggtcatcgcaagtttgacatccgaagctgggtcttggtggatcatcagtataatatctacctctatagagagggtgtgcttcggactgcttcagaaccatatcatgttgataatttccaagacaaaacctgccatttgaccaatcactgcattcaaaaagagtattcaaagaactacgggaagtatgaagaaggaaatgaaatgttcttcaaggagttcaatcagtacctaacaagtgctttgaacattaccctagaaagtagtatcttactacaaatcaaacatataataaggaactgcctcctgagcgtggagcctgccattagcaccaagcacctcccttaccagagcttccagctcttcggctttgacttcatggtcgatgaggagctgaaggtgtggctcattgaggtcaacggtgcccctgcatgtgctcagaagctctatgcagaactgtgccaaggcatcgtggacatagccatttccagtgtcttcccacccccagatgtggagcaacctcagacccagccagctgccttcatcaagctgtgacagagggcactccctgctgccttggaaaaagcacggggtcctgctccagggaatggtgaaatgactggattgctctttatccagcccacagcaggggaaagaaaggcaactcgcaaagaagagatggaagaaggcacgtgagcagaggaggcagctcccaaagagagggctgctcagggggcttcccaggtgtagctctcagcagtgctgttgagacttttgaaaacaactttggtacacaaaggcagctttgtgagcagagctccttccctctccccgggaacggcagggcactgggactctggttcggtgcaaagtggcaagtctgccctgaacctgtaagcatcaaataagcatgagagagaaaaaaacatgatatattgctttacttaataggttgaatatggtaggtctttgaaaatatgatgattcaattttctcaattttctttactttaaccaaaattctaaatgcagttttgcctagttcccttttttttttctttttttacttttttttaaacgtttgtaaaaacctctttgaggatgaggagtcagtaaaattccactccccaagtggccctgccccagacaaaggttgctttccccctttttgttctttttatgccccgaagcactttctgcagtagctagagggacaggtttccttccaggaaggattcgagttcctgtgcctgtgggtattaggagagtatatatcctgcctgaatggggaagtcttctaaaatgggaaagaagtggtttcatctccacacagtgtcttgtaaatctcaacaaatgtgtactgttagaagtggcttccgcttactggattaactaatactttataggcttttcaggaggccacatcactagcagtagggagaacaagatgtcatttgtgttcagtgtaagctgagtaaacaggcccttcctagagtgtcctggaaatcacagcaacccattgaaaactgccctccccaccagaacgtgctacgttctttcttcatgcctatgtgtgctccattcctcatttctacttggctcaagaaaacatttctgcagtcaggtgagacttttacaaaagaggagaaaatcaatgcctccttgaacatgatgagatgtgagaacttacaatgaaaaaggcaataatgatagaaattatttcttaggtacagcaatagttgataggatgtgagggtgttaccttggggtgaagtggagaaggtcccaggtgaattggctctcatggaaatttggaattacgaaataaacgtcctgggggttacccagaatacagatttaaaagtttgcctgtagagcaaaataaaacagtcagttgtagtcattaatccttgaggcccaacgcagccgatgggttggtgtttgggaaattctgagatgggagtgagatctgatcggatcctgggaagatgtatacccagttagaacgtgtagggttctgggtccctggcaagtctaggtgggcgggtgacagggaaagcatgggcatttttgtattgctgtcacatgctaacagaggtttgtaattatcttttggacccaaattatagagacattcacgagttttctagccctcacagtaacagagctaagaattcagatgtcaggaagtctgtgaatcttgatggattttctgagaaacctgactcaatggcatatataagagggaagtaagacttttaagaaaagaaaaagttatgcctcattcctcatgtggcttccaataagtatcttaggaacttatttcctttttaaaaaatattttttaaatttttaaaatttgattttaaatttcaaataaatttaaataaattttaaataaattttaaataaaattttacagagacgtggtctcactatgttgcccaggctggattgcagtggctattcgcagttgtaatcatagcacactgcagcctcgaatttctgggcttgagcagtcctcccgtctcagcctcctgagtagctgagactacaggtgcacaccaccaagcctggctttatgtatttatttctgttcatgcggaatgattggttcagaactgttcctttcccttccatgatgtccttgacacagaaggttatgcctggctcccagtcaggcttcatacttttggtccatgtaagtgctacccgttgctgggggaggagtcatggtttatttggaaatgtcagttgcaatcatggttctgtcatttgactgcacagtatcagaggagcctgttaacctctctgtgccttagtttcttagcccatgaaagagatcattgcctgacccagggactacctcaagggcttttgatgaggacaagtgacagtaggaagatgcaagagcctttagtaccaaggttctcaacactgactacatgctggaatgactgtgaagcttttaaaaaatgttagtgcccactcttcccctgtacccccggacagttaaatcagaacctcagacagcaatatgccttgagatgccttgaaccatgcttgagaaggaaggacaaacacattattatcttggaagaattgcataaggcttatgacttaaaaaaaaaaattctttttggaaacacaagcatttctttaaggatgaccggatgttgccgtatgtatttatggcacaagcaggtgttgtctaagcagtttctctgtttgcttgtcatagcagcatttggaaactcaaacatgctttcatttacataaatagtttatgaagctttgacaacaaatgtaaacagacacgaaattataaatctgctaaatatgtattaagggtattaattattgaaagtccctttccccaaaactcaactcctatggcaattatgaactccattttaccaagaacatttaagtgcctcagcatctgtatgatatagtggagcaggtgctgacataggtaccagctgacatgatgtgtcactagctctgtgggatgattgccacatacatggaacacctgggagtgctggaaatgtactgggatcgaagtgacaaagtgtgttttcattcacagtggaggctacatcaagcaaggggaggtccagccctcttgcaagtgtggtgagaggctttactagcaaagacatgggcaccggagtaggtcccgtgtagcatgcgggtgctgtagagaaaattcagtgacgtacatggctctggttctggacacaaaatctgtactggagaggaaatgactgctgaaataaggcgattgtatgaatatttaaaatgcctggaacactaaagtaaagtaatgatatttcaaaaaaaaaaaaaaaaaaaaaaaaaaaaa

SEQ ID NO: 31413 - DNA, 1912 bp, Homo Sapiens
aagatctctctggaccagctcgggtgcagggcctctgcgggagccctcctagacctctgcggcttctcctctaacatggccgactcggaaaaccaggggcctgcggagcctagccaggcggcggcagcggcggaggcagcggcggaggaggtaatggcggaaggcggtgcgcagggtggagactgtgacagcgcggctggtgaccctgacagcgcggctggtcagatggctgaggagccccagacccctgcagagaatgccccaaagccgaaaaatgactttatcgagagcctgcctaattcggtgaaatgccgagtcctggccctcaaaaagctgcagaagcgatgcgataagatagaagccaaatttgataaggaatttcaggctctggaaaaaaagtataatgacatctataagcccctactcgccaagatccaagagctcaccggcgagatggaggggtgtgcatggaccttggagggggaggaggaggaggaagaggagtacgaggatgacgaggaggagggggaagacgaggaggaggaggaggctgcggcagaggctgccgcgggggccaaacatgacgatgcccacgccgagatgcctgatgacgccaagaagtaaggggggcagagatggatgaagagaaagcccacgaagaaaaaagcctggttttgtttttcccagaatatcgatggacttaaaaaggctcaggtttttgaccaaaatacaatgtgaatttattctgacattcctaaaatagattaaattaaagcaattagatcctggccagctcgattcaaatttgactttcattttgaacataataaatatatcaaaaggtgttaaagaaaactgaattaaacccaaaattatgttttcatggtctcttctctgaggattgaggtttacaaagggtgttagcagatgcgaagtaaagaacgtcactttgaaacccattcatcacacagcatacgctacacatggaacacccaagccatgactgaacacgttctcagtgcttaattcttaaatttctttactcatgacatttcgcagtgcagagaaggcagaacccaagaaaaacgtcatctttgagactttgcttttgtaacgcagacatcagctttacacttcacaggagattgatggcattgaggaagattgcaatggagatcatgacactactgttaataaggccaggaaaactgccatttcaagttctgaaaaatgttttgagtatttgaatttagagaaacaacatggttccaagaaggagggtgtaaaacctgtaaaatactgtcaacatgtattcattagttacaatctcatgtttgtgttttcttagtactgtctatttacaaacacgtaaaaaataccccaaatatgtttaagtattaaatcactttacctagcgttttagaaatattaatttacttgaagagatgtagaatgtagcaaattatgtaaagcatgtgtatccagcgttatgtactttgcgccttgtgacgtctttctgtcatgtagcttttagggtgtagctgtgaaaatcatcagaactcttcactgaagctaatgtttggaaaaaatatatacttgaagaaccaatccaagtgtgtgcccctacccccagctcagaagtagaaagggtttaagtttgcttgtattagctgtgccttcattattttgctatgtaaatgtgacatattaattataaaatggtgcataatcaaattttactgcttgaggacagatgcatacagtaaggatttttaggaagaatatatttaatgtaaagactcttagcttctgtgtgggttttgaattatgtgtgagccagtgatctataaagaaacataagcttaaagttgtttatcactgtagtgttaataaaacagtattttcaaaaaat

SEQ ID NO: 31414 - DNA, 3294 bp, Homo Sapiens
gaggccgggcagggggcggggccggcgaatgcccgtcccgacccgtcgcgcctcccctgttagctccctgccagccgaggcggggcgaacctctgccctgttgcgtgggagtgactcacagctcccgccccttttggctccgctttctcgcggccagtccctcgcaccacgtgccctcctggccgcgcccccagctgccctttccaactgcctgttggaagccgctgtaaaacgtcgtgaggagcgccgctgctttacggctgcctctcccagactagagccccggagcgcccaccgccgtcagccgcgtcttcaagctagtcggccccgcggagagcgagagaccctgcgcaccgcagccctctccgctgcgcccattcctgccgccggcgatgtaactcggggaggcagcggtgcccgctggcccggggttgagacaggcggcaggtgcctgtgaggcgggcgggtgccgggggccagcaggatggaggaaagcatggaagaggaggaggggggcagctacgaggcgatgatggacgaccagaaccacaacaactgggaggctgcggtggacggcttccggcagcccctgccacctccgccgcccccctcgtcgatcccggcccctgcccgagagcctccgggggggcagctgctggcggtgcccgcggtctccgtggacaggaaaggccccaaggaggggctcccgatggggccgcagccaccgccggaggctaatggggtgatcatgatgttgaagagctgcgacgcggccgccgccgtggccaaggcggcccccgcccccaccgccagctccaccatcaacatcaacacctccacctccaagttcttaatgaatgttataactattgaagattataagagcacatactggccaaaattggatggtgccatagatcaacttttaactcagagtcctggtgactatatccccatatcctatgaacagatatacagttgtgtgtataaatgtgtatgccagcagcactcggaacagatgtatagtgatctgattaaaaagataactaatcacttagagagagtctcaaaggagctgcaggccagccctccagatctctatattgaaagatttaatatagctcttggacaatatatgggagcattgcagagcattgtgcctcttttcatatatatgaataagttttacatcgaaaccaagcttaacagagacttaaaagatgaccttataaagctgtttacggaacatgttgcagaaaagcacatttacagcctaatgcctttacttttagaagcccagtcaacaccatttcaggtcacaccttcaactatggcaaatattgtgaaaggcctgtataccctcagaccagtttctcagaattttacagcagtgtgatgaagatggctcctgaaatagtagtgggttcagatggctccaactctattttctaaatttattccaaacattctccctccggcggtggaatctgaactttctgaatatgctgctcaagatcagaaatttcaaagagaacttatacagaatggttttacaaggggtgaccagtcccggaagagagctggggatgagttggcttataatagctcgtcagcatgtgcaagttccagggggtacagatagtgaatgtattgaatatgctttccttcctgaaaagaggacacactggagctgcagagactgtattcagagcacagtgggggctgcacacactcaggagctctgtcacaaagctgttcatggaagaggatgttggacttcttacttggtttgtaattttaaaacaaaaactaaaaaaaaaaaaaacgttgctgctagacttgggggtgattttgaaatgggacaatcttttaatgagtttatctacagattctgtgaggaaaaagcatctcagaaagtgaccatttctaagtgaaatctgacagccaaaatcagcagcttcctccaaaaatataagagcagaagaattttttttttaagcacttgttttgttcatttgtggacttggcattttggtgtattggtttcacatgtcaggatctcttttgctttaaaaccaagcagatcattacagtacagtatttttcacccacaaccaaaacaaccccttttaaaagagttggtctttgtttagcattagaaagtcttgttaaaggaaaatgctaactctgcttttgctagaactttcccccatcagttcacaactttcttctactctgtgccttgagctttgtgcactttgcaactgtgtgaccatgttgtcaaactcctcctggagaagtgtatggtatctaaactcacccaccaagatggcaggtgtggccctgtagcaggatgctaattaagtgggaaaatagaaaccttttgcacatgggtcggattttcccctggttcaccagagcatattcatattaatgttggggaccaactctcctagagcatttccattccctgtgccacttaacacgatgtctgtcaccagctgctatagtattggcagtactctagtttagggatgggcggtactttagcacggaagcttcccttagtattattgagagctacttcctgcgatgctctaggaagcagatacagttattaagtccaaatacacagtggtgtggggttcctgatcacttcattttaaatgaatgagataattacttaaaaaaagtctgtcatttgaacattatatttgagtgtgatagggaagaagtagcactgctgtcctaaggctcccttccagctgtggcaaagctatatttctgtttctccacatccacagtgctttttagtccatcataaaagtttctgaagcttattctagctgttgttgaaagcccaagaaaaatagatgtggcaagagaaaaatacttttcttctcaattttgcttgaatcttaattgagcataggcttctctactaggcaacatcagactaatagtatttacctcttcagagaacttgaggggaaaagaaacatcccagggatgctgtcgcatgtctgctctgcaggttcttcatacagctgcctctgccaattcagtttattttttggggggagtggtgtgggtgggagagttagaagtgggatattgggagcaagtaagtcacccaataattgaagtccttgatttgtaaaactgttatacagagaagtaaagataaaggttgtcagatttattttttaaagtaaaaaaaaaaaaaaaaaaaaaaaaaaaaaaaaaaaaaaaaaaaaaaaaaaaaaaaaaaaaaaaagaaaaaaaaaaaaaaaa

SEQ ID NO: 31415 - DNA, 1516 bp, Homo Sapiens
gtacggaatgccggaagggccgggctcaaagctccgcctctggcgcgaccgacgactggagcgcagggcaggggtagaggctcgtagatggaactggtagtcagctggagagcagcatggaggcgtcctgggggagcttcaacgctgagcggggctggtatgtctctgtccagcagcctgaagaagcggaggccgaagagttgagtccgttgctaagcaacgaacttcacagacagcgatccccaggtgtttcatttggtttatcagtgtttaatttgatgaatgccatcatgggaagtggcatccttggcttagcttatgttatggctaataccggtgtctttggatttagcttcttgctgctgacagttgctctcctggcttcttactcagtccatcttctgcttagtatgtgtattcagacagctgtaacatcttatgaagatcttggactctttgcatttggattacctggaaagttggtggtggcaggcaccataataattcagaatattggagctatgtcatcttatcttttaattattaaaacagagcttcctgctgctattgcagaatttttgactggagactatagtagatattggtatcttgatggacaaacactactaataatcatatgtgttggcattgtgttccctcttgcacttcttcccaaaataggctttcttggctacacaagtagtttatcatttttctttatgatgttctttgctcttgtggtaataattaaaaaatggtccatcccttgtcctctgacattaaattatgtagagaaaggcttccagatttcaaatgttacagatgattgtaagccaaagctctttcatttctccaaagagagtgcttatgccttaccaaccatggctttttcatttctctgccatacctcaatattgcccatatactgtgaacttcaaagtccttcaaagaaaagaatgcagaatgttaccaatacagcaattgctttaagttttctcatttattttatatctgcactctttgggtacctcactttttatgacaaagtggagtcagaattactaaaaggttatagtaaatacttatcacatgatgttgttgtcatgactgtgaagttatgcatactatttgctgtgcttttgacagtccctctaatccacttccctgccagaaaagctgtaacaatgatgtttttctccaattttccattctcatggattcgccattttttgatcactctagcactcaatattatcatcgttttacttgcaatatatgttcctgacattagaaatgtatttggtgtagttggtgccagtacatcaacatgtttgatttttatattcccaggactattttatcttaaacttagcagagaggattttctgtcatggaaaaagcttggggcattcgttttgctcatctttggaattttggttgggaattttagtttagcactcatcatttttgattggattaataaataaaagaaatattttcctacttcttacaagaa

SEQ ID NO: 31416 - DNA, 3378 bp, Homo Sapiens
cgcgagagcttcgcggcgggagagcggctggtgtcgccggcttacgtgcggcagggctgtgaggcccgccgctcgcatgagcacctcatacggctgcttctggagaagggcaagtgtccagagaatggctgggatgaaagtacacttgaactctttttacatgaacttgcaatcatggacagcaacaatttcttaggcaattgtggtgtgggagaaagggaagggagagtggcatccgcactggttgctcgtcgtcattacaggttcattcatggcattggacgatccggtgatatttctgctgtgcaaccaaaagctgcaggctctagccttttgaacaaaattaccaattctttggtcctggacattataaagctggctggtgtccatacagtagccaactgctttgtagttcctatggcaactggtatgagtctaactctgtgtttcttaacattacgacacaaaagaccaaaggcaaagtatattatatggccacgaatagaccagaagtcctgctttaaatccatgatcactgcaggttttgagcctgtggtgatagaaaatgttttggaaggtgacgagctgcgtacagacctgaaagcagtggaggctaaagtccaggaacttgggcctgattgcattctgtgtattcattctactacatcctgttttgctccaagggtgcctgatagattagaagaactggctgtgatttgtgctaattatgacattccacatatagttaataatgcttatggagtgcagtcttcaaagtgtatgcatctcattcagcagggggctcgagttggtagaatagatgcttttgttcagagcttggacaaaaattttatggttccagtaggtggtgctataattgctggctttaatgattcattcattcaggaaatcagcaagatgtatccaggaagagcttcagcttcaccttctttagatgtccttattactttattgtcacttggatcaaatggctataagaagctactaaaagaaagaaaggaaatgttttcatatttgtccaaccaaataaagaagttgtcagaagcctacaatgaaagactgttgcatacacctcacaatcccatatctttagctatgacacttaaaacactagatgaacaccgtgacaaagctgtcactcagcttggctcgatgctttttaccagacaggtttctggagccagggttgtgcctcttgggtccatgcaaactgtgagtggctatactttcagaggctttatgtcacatacaaataattacccttgtgcttacctcaatgctgcatcagccatcggaatgaagatgcaggatgtggacctgttcataaagagacttgacaggtgtttaaaggcagtaagaaaagaacgaagtaaagagagtgatgacaattatgacaaaactgaagatgtggatattgaagaaatggctttaaaactagataatgtacttcttgacacataccaggatgcttcttcatgacatgcgaagggtttcttcttgatcatttgaaagaaatgataaggctgtagtacaagcaagcagtttaaagataagacttgagatttttgaattgagaatttcatgggaatattcagtcaaggagcagactttggtctgaactagccattgatgattgttaagtttcccattcttagactgcatcaatccttgtgatccttaacaggttataatatacaattagcatttttctaattgttagaatatctgtcaattaagcatcatgactcagataatttttactagtgtaatgacagtaaaattacttcaattctctttgaaatgtagagtgcttcctcctaaccattctttaccgtttctgatcacacagaattgagaaagatctcttaggccactagttactagttgtttgttgagatgtgtaagtcacagtgtgcctgtaaaatgggcattccccaaggaagcagagtcaaggtataaactttcgttttgactcaaaagcagtgggtctcaactggggatgattcgcttatctgaacagcatctgcagacatttttggttgtcacaactggtgggatgctgttaacatctagaggatagaggccagggtgctactcaacatcctacaatgcatgggacaactcccacaacaaagaattatccagcccaaaatgtcattagtgctgaggttgagaaatactcctctaaagtagataaactccttgagtaaagagaagtttaccatagcaactttcagtagtacttcaaagaagatagctgtataaatgtcatcaaactatactatgtagagaatcttaagtgataaccagggtcacggattccaaacatgtcattataaattgttttatatggtgctcactggtgcatttttccttttggataagggaaaacattattccacttactgtttttgctttaagcagcctgcatatattggttagtttgttcagatgttgtgcacagacatcatcaaaattagctaacatgggtatttttgaacatatttttgccaggaagatgaaaatcacatagtatgataaacaggtgtattcccctctacttgcccatgtgctcatttttctgagtctgaaattccagacttactggctttaacaataatttttgttgttaatttaagaaatagacttacttaagactattttaagaaatagagatgtcatagcctgaagatttactgaagcttctgaacatgccaccatgccaaagctatgtttctcaaacccagctctgtggatcatgttcctaaaagatgctcatggggagaaaatgtttacagacaaataattttgggagctgcctttgcaaacctgcctgttggcatattgaaggctctaagaattccttcactaaataacccagttttaatatatccttatccaaagagaaactcatttttttaaagtgaaatatttgttaacagcccattgaacatacttttaaaaacactatggtagagaatgctgtgttgccttctgggctgcatttttcttattgatttggaattgtaacctatgtatgagaaagggattttctggtattttggtgacgttgtacattgtcccagactgtttgtaaacatgaggtcagacatgtgtaaggtagacgcctatggccactggcttgaccaccttggaagtcaatgactattttgagatgaagtatttaactatgaatatcatgaaggttatttaaaaatgtatttattttatctttggggttcaaacattaaaaaaatttacataggtgtagtaactcatttcaagggaataaatgctggattaaaaagtgaaaaaaaaaaaaaaaaaaaaaaaaaaaaaaaaaaaaaaaaaaaaaaa

SEQ ID NO: 31417 - DNA, 4453 bp, Homo Sapiens
gaccactgtgagcccgcggcgtgaggcgtgggaggaagcgcggctgctgtcgcccagcgccgccccgtcgtcgtctgccttcgcttcacggcgccgagccgcggtccgagcagaactggggctcccttgcatcttccagttacaaattcagtgccttctgcagtttccccagagctcctcaagaataacggaagggagaatatgacagatacctagcatctagcaaaataatggcagctgcttaccttgaccccaacttgaatcacacaccaaattcgagtactaagactcacctgggtactggtatggaacgttctcctggtgcaatggagcgagtattaaaggtctttcattattttgaaagcaatagtgagccaaccacctgggccagtattatcaggcatggagatgctactgatgtcaggggcatcattcagaagatagtggacagtcacaaagtaaagcatgtggcctgctatggattccgcctcagtcacctgcggtcagaggaggttcactggcttcacgtggatatgggcgtctccagtgtgagggagaagtatgagcttgctcacccaccagaggagtggaaatatgaattgagaattcgttatttgccaaaaggatttctaaaccagtttactgaagataagccaactttgaatttcttctatcaacaggtgaagagcgattatatgttagagatagctgatcaagtggaccaggaaattgctttgaagttgggttgtctagaaatacggcgatcatactgggagatgcggggcaatgcactagaaaagaagtctaactatgaagtattagaaaaagatgttggtttaaagcgattttttcctaagagtttactggattctgtcaaggccaaaacactaagaaaactgatccaacaaacatttagacaatttgccaaccttaatagagaagaaagtattctgaaattctttgagatcctgtctccagtctacagatttgataaggaatgcttcaagtgtgctcttggttcaagctggattatttcagtggaactggcaatcggcccagaagaaggaatcagttacctaacggacaagggctgcaatcccacacatcttgctgacttcactcaagtgcaaaccattcagtattcaaacagtgaagacaaggacagaaaaggaatgctacaactaaaaatagcaggtgcacccgagcctctgacagtgacggcaccatccctaaccattgcggagaatatggctgacctaatagatgggtactgccggctggtgaatggaacctcgcagtcatttatcatcagacctcagaaagaaggtgaacgggctttgccatcaataccaaagttggccaacagcgaaaagcaaggcatgcggacacacgccgtctctgtgtcagaaacagatgattatgctgagattatagatgaagaagatacttacaccatgccctcaaccagggattatgagattcaaagagaaagaatagaacttggacgatgtattggagaaggccaatttggagatgtacatcaaggcatttatatgagtccagagaatccagctttggcggttgcaattaaaacatgtaaaaactgtacttcggacagcgtgagagagaaatttcttcaagaagccttaacaatgcgtcagtttgaccatcctcatattgtgaagctgattggagtcatcacagagaatcctgtctggataatcatggagctgtgcacacttggagagctgaggtcatttttgcaagtaaggaaatacagtttggatctagcatctttgatcctgtatgcctatcagcttagtacagctcttgcatatctagagagcaaaagatttgtacacagggacattgctgctcggaatgttctggtgtcctcaaatgattgtgtaaaattaggagactttggattatcccgatatatggaagatagtacttactacaaagcttccaaaggaaaattgcctattaaatggatggctccagagtcaatcaattttcgacgttttacctcagctagtgacgtatggatgtttggtgtgtgtatgtgggagatactgatgcatggtgtgaagccttttcaaggagtgaagaacaatgatgtaatcggtcgaattgaaaatggggaaagattaccaatgcctccaaattgtcctcctaccctctacagccttatgacgaaatgctgggcctatgaccccagcaggcggcccaggtttactgaacttaaagctcagctcagcacaatcctggaggaagagaaggctcagcaagaagagcgcatgaggatggagtccagaagacaggccacagtgtcctgggactccggagggtctgatgaagcaccgcccaagcccagcagaccgggttatcccagtccgaggtccagcgaaggattttatcccagcccacagcacatggtacaaaccaatcattaccaggtttctggctaccctggttcacatggaatcacagccatggctggcagcatctatccaggtcaggcatctcttttggaccaaacagattcatggaatcatagacctcaggagatagcaatgtggcagcccaatgtggaggactctacagtattggacctgcgagggattgggcaagtgttgccaacccatctgatggaagagcgtctaatccgacagcaacaggaaatggaagaagatcagcgctggctggaaaaagaggaaagatttctgaaacctgatgtgagactctctcgaggcagtattgacagggaggatggaagtcttcagggtccgattggaaaccaacatatatatcagcctgtgggtaaaccagatcctgcagctccaccaaagaaaccgcctcgccctggagctcccggtcatctgggaagccttgccagcctcagcagccctgctgacagctacaacgagggtgtcaagcttcagccccaggaaatcagcccccctcctactgccaacctggaccggtcgaatgataaggtgtacgagaatgtgacgggcctggtgaaagctgtcatcgagatgtccagtaaaatccagccagccccaccagaggagtatgtccctatggtgaaggaagtcggcttggccctgaggacattattggccactgtggatgagaccattcccctcctaccagccagcacccaccgagagattgagatggcacagaagctattgaactctgacctgggtgagctcatcaacaagatgaaactggcccagcagtatgtcatgaccagcctccagcaagagtacaaaaagcaaatgctgactgctgctcacgccctggctgtggatgccaaaaacttactcgatgtcattgaccaagcaagactgaaaatgcttgggcagacgagaccacactgagcctcccctaggagcacgtcttgctaccctcttttgaagatgttctctagccttccaccagcagcgaggaattaaccctgtgtcctcagtcgccagcacttacagctccaacttttttgaatgaccatctggttgaaaaatctttctcatataagtttaaccacactttgatttgggttcattttttgttttgtttttttcaatcatgatattcagaaaaatccaggatccaaaatgtggcgtttttctaagaatgaaaattatatgtaagcttttaagcatcatgaagaacaatttatgttcacattaagatacgttctaaagggggatggccaaggggtgacatcttaattcctaaactaccttagctgcatagtggaagaggagagcatgaagcaaagaattccaggaaacccaagaggctgagaattcttttgtctaccatagaattattatccagactggaatttttgtttgttagaacacccttcagttgcaatatgctaatcccactttacaaagaatataaaagctatattttgaagacttgagttatttcagaaaaaactacagccctttttgtcttacctgccttttactttcgtgtggatatgtgaagcattgggtcgggaactagctgtagaacacaactaaaaactcatgtcttttttcacagaataatgtgccagttttttgtagcaatgttatttctcttggaagcagaaatgctttgtaccagagcacctccaaactgcattgaggagaagttccagaaccatcccctttttccatttttatataatttataaagaaagattaaagccatgttgactattttacagccactggagttaactaacccttccttgtatctgtcttcccaggagagaatgaagcaaaacaggaatttggttttcttttgatgtccagttacaccatccattctgttaattttgaaaaaatataccctccctttagtttgttgggggatataaattattctcaggaagaatataatgaactgtacagttactttgacctattaaaaaggtgttaccagtaaa

SEQ ID NO: 31418 - DNA, 2733 bp, Homo Sapiens; identical to SEQ ID NO: 26598

SEQ ID NO: 31419 - DNA, 2259 bp, Homo Sapiens
atgtacactggtccctgtaaggtcctccacctctcatctgggcttttaccaaatagcggtaggtttggtattgttctcagcgatgaataccaggttgtaacatctttatggtgccagctgtatacaacccatgcacctcaacaggcctctgggatgcttcttctgaattatcttgtcatcccatcaaaggcccaagttaacaaaccaggctacatccctaacctaggagaatgttcccactatagatccaagattcacctaaaagctggagataaacttcaaagccctgaagggaaacccaagactggaaggatccaagagaaatgcgaaggaccttgtatttcttcttccaactgcagccagccctgtgctaaggactttcatggagaaataggatttacatgtaatcaaaaaaagtggcaaaaatcagctgaaacatgtacaagcctttctgtggaaaaactctttaaggactcaactggtgcatctcgcctttctgtagcagcaccatctatacctctgcatattctagactttcgagctccagagaccattgagagtgtagctcaaggaatccgtaagaactgcccctttgattatgcctgcatcactgacatggtgaaatcatcagaaacaacatctggaaatattgcatttatagtggagttattaaaaaatatttctacagacttgtctgataatgttactcgagagaaaatgaagagctatagtgaagtggccaaccacatcctcgacacagcagccatttcaaactgggctttcattcccaacaaaaatgccagctcggatttgttgcagtcagtgaatttgtttgccagacaactccacatccacaataattctgagaacattgtgaatgaactcttcattcagacaaaagggtttcacatcaaccataatacctcagagaaaagcctcaatttctccatgagcatgaacaataccacagaagatatcttaggaatggtacagattcccaggcaagagctaaggaagctgtggccaaatgcatcccaagccattagcatagctttcccaaccttgggggctatcctgagagaagcccacttgcaaaatgtgagtcttcccagacaggtaaatggtctggtgctatcagtggttttaccagaaaggttgcaagaaatcatactcaccttcgaaaagatcaataaaacccgcaatgccagagcccagtgtgttggctggcactccaagaaaaggagatgggatgagaaagcgtgccaaatgatgttggatatcaggaacgaagtgaaatgccgctgtaactacaccagtgtggtgatgtctttttccattctcatgtcctccaaatcgatgaccgacaaagttctggactacatcacctgcattgggctcagcgtctcaatcctaagcttggttctttgcctgatcattgaagccacagtgtggtcccgggtggttgtgacggagatatcatacatgcgtcacgtgtgcatcgtgaatatagcagtgtcccttctgactgccaatgtgtggtttatcataggctctcactttaacattaaggcccaggactacaacatgtgtgttgcagtgacatttttcagccactttttctacctctctctgtttttctggatgctcttcaaagcattgctcatcatttatggaatattggtcattttccgtaggatgatgaagtcccgaatgatggtcattggctttgccattggctatgggtgcccattgatcattgctgtcactacagttgctatcacagagccagagaaaggctacatgagacctgaggcctgttggcttaactgggacaataccaaagcccttttagcatttgccatcccggcgttcgtcattgtggctgtaaatctgattgtggttttggttgttgctgtcaacactcagaggccctctattggcagttccaagtctcaggatgtggtcataattatgaggatcagcaaaaatgttgccatcctcactccactgctgggactgacctggggttttggaatagccactctcatagaaggcacttccttgacgttccatataatttttgccttgctcaatgctttccagggttttttcatcctgctgtttggaaccattatggatcacaagataagagatgctttgaggatgaggatgtcttcactgaaggggaaatcgagggcagctgagaatgcatcactaggcccaaccaatggatctaaattaatgaatcgtcaaggataa

SEQ ID NO: 31420 - DNA, 2102 bp, Homo Sapiens
cattaaccaaacaaagagaagcagagtggatcctgtgctaatattgggaaaaccaggcaacaggactcatttggggcctttattgtgaaaacatgccccagctttcccaagataaccaagagtgcctccagaaacatttctccaggccgtctatatggacacagtttctgcccctgttcagggctcagagatataatacagacattcaccaaatcacagaaaatgaaggagacctcagggctgttcctgatatcaagtccttcccgcctgcacagctcccagactcgcccgccgccccgaagctgttcggcctcctttctagcccgctttccagcctcgcaaggttcttctctcaccttctccggcgaccccctcccgaggctccccggaggcgcctggacttctcccccctgcttcccgccctgccggccgcccggctctcgagggggcacgaggagctgccgggccgcctctcgctcctgctcggggcggcgctggcactgcccggccgaccctcggggggtcgtccgctgaggcccccccatccggtagccaagcccagggaagaagacgccaccgctgggcagagctcgcctatgccgcagatgggatcagagcggatggagatgcggaagcggcagatgcccgccgcccaggacacaccaggcgccgccccaggccagcccggagcggggagtcgcgggtccaacgcatgctgcttctgctggtgctgctgttgtagctgctcgtgtctcactgttagaaaccaggaagatcagaggcccacaatagcttcccacgaactcagagcagatcttccaacctgggaagaaagccctgctcctactctggaagaagtcaacgcctgggctcagtcatttgacaaattaatggtcactccagcaggaaggaatgcattccgtgaattcctccgaacagaattcagtgaggaaaatatgctcttctggatggcctgtgaggaactgaaaaaggaagctaataaaaacattattgaagagaaagcaaggataatctatgaagactacatttctatactttctcctaaggaggtgagcttagactcccgggtgagagaagtgatcaacagaaacatggtggagccatcccaacacatattcgatgatgctcaacttcagatttacaccctgatgcacagagactcatatcctcgattcatgaactctgctgtctataaggacttgcttcagtccttatcggagaaatctattgaagcataggatttttcaaatatatttattattaataaaataataaaagaattcatgggctacaactagcacagggaatttagaggttgtagcatcttctgctggagtaatactcaggctattctaataacagatgattccttcaacagactgctatatattcaccatgtaaactgcagccacctttagtgatacttttaaaaaaaaaaataaagggatatggctgttgtagaaagatagcgtatttgcatttacaataacagtagcatgttgtcagtggccaaggctacacagaaggctccctgctgcccggagcaggtacatccacagagcaaagggaaccacttttattttgcatgagtttggtaactgattactctcccctcaaagaaaagacattcaggtgtttctcaacgacatcttctgtccagcaagctcggtttgaatacgtcacttaccagtgccattgcaggacccaaattcacagttcataaaagatgtgaccactacatgtaaaaatagcattctacttgatcttacagtatgtatgtatgtatgtatggagacatatgtgtgcgtgtggatgtctacatggttaatggaaagcactgtgctctgaagtggatcagtctcaagtgtctggtaacagcagcaatgcttagaaaattcttttgttgaaaagagttactgttattatcagaatttgccaacctaaagaatgaatttttaaattcataacttggtcatgttcacaacaaaactgtcaaataagcatatttccatttttattactgaaagaaatatgggcattttcattctttaaagaaataaagcacaagaattttatctcaa

SEQ ID NO: 31421 - DNA, 14977 bp, Homo Sapiens
cctgctcgctccatgttgccgcctctcccggtacctgctgctgctcccggggctgcgggaaatgcgagaggctgagccggggaggaggaacccgagcagcagcggcggcggcggcggccgcggcggcgggagccccccaggaggaggaccgggatccatgtgtctttcctggtgactaggatgtcgtcggaggaggacaagagcgtggagcagccgcagccgccgccaccaccccccgaggagcctggagccccggccccgagccccgcagccgcagacaaaagacctcggggccggcctcgcaaagatggcgcttcccctttccagagagccagaaagaaacctcgaagtagggggaaaactgcagtggaagatgaggacagcatggatgggctggagacaacagaaacagaaacgattgtggaaacagaaatcaaagaacaatctgcagaagaggatgctgaagcagaagtggataacagcaaacagctaattccaactcttcagcgatctgtgtctgaggaatcggcaaactccctggtctctgttggtgtagaagccaaaatcagtgaacagctctgcgctttttgttactgtggggaaaaaagttccttaggacaaggagacttaaaacaattcagaataacgcctggatttatcttgccatggagaaaccaaccttctaacaagaaggacattgatgacaacagcaatggaacctatgagaaaatgcaaaactcagcaccacgaaaacaaagaggacagagaaaagaacgatctcctcagcagaatatagtatcttgtgtaagtgtaagcacccagacagcttcagatgatcaagctggtaaactgtgggatgaactcagtctggttgggcttccagatgccattgatatccaagccttatttgattctacaggcacttgttgggctcatcaccgttgtgtggagtggtcactaggagtatgccagatggaagaaccattgttagtgaacgtggacaaagctgttgtctcagggagcacagaacgatgtgcattttgtaagcaccttggagccactatcaaatgctgtgaagagaaatgtacccagatgtatcattatccttgtgctgcaggagccggcacctttcaggatttcagtcacatcttcctgctttgtccagaacacattgaccaagctcctgaaagatcgaaggaagatgcaaactgtgcagtgtgcgacagcccgggagacctcttagatcagttcttttgtactacttgtggtcagcactatcatggaatgtgcctggatatagcggttactccattaaaacgtgcaggttggcaatgtcctgagtgcaaagtgtgccagaactgcaaacaatcgggagaagatagcaagatgctagtgtgtgatacgtgtgacaaagggtatcatactttttgtcttcaaccagttatgaaatcagtaccaaccaatggctggaaatgcaaaaattgcagaatatgtatagagtgtggcacacggtctagttctcagtggcaccacaattgcctgatatgtgacaattgttaccaacagcaggataacttatgtcccttctgtgggaagtgttatcatccagaattgcagaaagacatgcttcattgtaatatgtgcaaaaggtgggttcacctagagtgtgacaaaccaacagatcatgaactggatactcagctcaaagaagagtatatctgcatgtattgtaaacacctgggagctgagatggatcctttacagccaggtgaggaagtggagatagctgagctcactacagattataacaatgaaatggaagttgaaggccctgaagatcaaatggtattctcagagcaggcagctaataaagatgtcaacggtcaggagtccactcctggaattgttccagatacggttcaagtccacactgaagagcaacagaagagtcatccctcagaaagtcttgacacagatagtcttcttattgctgtatcatcccaacatacagtgaatactgaattggaaaaacagatttctaatgaagttgatagtgaagacctgaaaatgtcttctgaagtgaagcatatttgtggcgaagatcaaattgaagataaaatggaagtgacagaaaacattgaagtcgttacacaccagatcactgtgcagcaagaacaactgcagttgttagaggaacctgaaacagtggtatccagagaagaatcaaggcctccaaaattagtcatggaatctgtcactcttccactagaaaccttagtgtccccacatgaggaaagtatttcattatgtcctgaggaacagttggttatagaaaggctacaaggagaaaaggaacagaaagaaaattctgaactttctactggattgatggactctgaaatgactcctacaattgagggttgtgtgaaagatgtttcataccaaggaggcaaatctataaagttatcatctgagacagagtcatcattttcatcatcagcagacataagcaaggcagatgtgtcttcctccccaacaccttcttcagacttgccttcgcatgacatgctgcataattacccttcagctcttagttcctctgctggaaacatcatgccaacaacttacatctcagtcactccaaaaattggcatgggtaaaccagctattactaagagaaaattttctcctggtagacctcggtccaaacagggggcttggagtacccataatacagtgagcccaccttcctggtccccagacatttcagaaggtcgggaaatttttaaacccaggcagcttcctggcagtgccatttggagcatcaaagtgggccgtgggtctggatttccaggaaagcggagacctcgaggtgcaggactgtcggggcgaggtggccgaggcaggtcaaagctgaaaagtggaatcggagctgttgtattacctggggtgtctactgcagatatttcatcaaataaggatgatgaagaaaactctatgcacaatacagttgtgttgttttctagcagtgacaagttcactttgaatcaggatatgtgtgtagtttgtggcagttttggccaaggagcagaaggaagattacttgcctgttctcagtgtggtcagtgttaccatccatactgtgtcagtattaagatcactaaagtggttcttagcaaaggttggaggtgtcttgagtgcactgtgtgtgaggcctgtgggaaggcaactgacccaggaagactcctgctgtgtgatgactgtgacataagttatcacacctactgcctagaccctccattgcagacagttcccaaaggaggctggaagtgcaaatggtgtgtttggtgcagacactgtggagcaacatctgcaggtctaagatgtgaatggcagaacaattacacacagtgcgctccttgtgcaagcttatcttcctgtccagtctgctatcgaaactatagagaagaagatcttattctgcaatgtagacaatgtgatagatggatgcatgcagtttgtcagaacttaaatactgaggaagaagtggaaaatgtagcagacattggttttgattgtagcatgtgcagaccctatatgcctgcgtctaatgtgccttcctcagactgctgtgaatcttcacttgtagcacaaattgtcacaaaagtaaaagagctagacccacccaagacttatacccaggatggtgtgtgtttgactgaatcagggatgactcagttacagagcctcacagttacagttccaagaagaaaacggtcaaaaccaaaattgaaattgaagattataaatcagaatagcgtggccgtccttcagacccctccagacatccaatcagagcattcaagggatggtgaaatggatgatagtcgagaaggagaacttatggattgtgatggaaaatcagaatctagtcctgagcgggaagctgtggatgatgaaactaagggagtggaaggaacagatggtgtcaaaaagagaaaaaggaaaccatacagaccaggtattggtggatttgtggtgcggcaaagaagtcgaactgggcaagggaaaaccaaaagatctgtgatcagaaaagattcctcaggctctatttccgagcagttaccttgcagagatgatggctggagtgagcagttaccagatactttagttgatgaatctgtttctgttactgaaagcactgaaaaaataaagaagagataccgaaaaaggaaaaataagcttgaagaaactttccctgcctatttacaagaagctttctttggaaaagatcttctagatacaagtagacaaagcaagataagtttagataatctgtcagaagatggagctcagcttttatataaaacaaacatgaacacaggtttcttggatccttccttagatccactacttagttcatcctcggctccaacaaaatctggaactcacggtcctgctgatgacccattagctgatatttctgaagttttaaacacagatgatgacattcttggaataatttcagatgatctagcaaaatcagttgatcattcagatattggtcctgtcactgatgatccttcctctttgcctcagccaaatgtcaatcagagttcacgaccattaagtgaagaacagctagatgggatcctcagtcctgaactagacaaaatggtcacagatggagcaattcttggaaaattatataaaattccagagcttggcggaaaagatgttgaagacttatttacagctgtacttagtcctgcgaacactcagccaactccattgccacagcctcccccaccaacacagctgttgccaatacacaatcaggatgctttttcacggatgcctctcatgaatggccttattggatccagtcctcatctcccacataattctttgccgcctggaagcggactgggaactttctctgcaattgcacaatcctcttatcctgatgccagggataaaaattcagcctttaatccaatggcaagtgatcctaacaactcttggacatcatcagctcccactgtggaaggagaaaatgacacaatgtcgaatgcccagagaagcacgcttaagtgggagaaagaggaggctctgggtgaaatggcaactgttgccccagttctctacaccaatattaatttccccaacttaaaggaagaattccctgattggactactagagtgaagcaaattgccaaattgtggagaaaagcaagctcacaagaaagagcaccatatgtgcaaaaagccagagataacagagctgctttacgcattaataaagtacagatgtcaaatgattccatgaaaaggcagcaacagcaagatagcattgatcccagctctcgtattgattcggagctttttaaagatcctttaaagcaaagagaatcagaacatgaacaggaatggaaatttagacagcaaatgcgtcagaaaagtaagcagcaagctaaaattgaagccacacagaaacttgaacaggtgaaaaatgagcagcagcagcagcaacaacagcaatttggttctcagcatcttctggtgcagtctggttcagatacaccaagtagtgggatacagagtcccttgacacctcagcctggcaatggaaatatgtctcctgcacagtcattccataaagaactgtttacaaaacagccacccagtacccctacgtctacatcttcagatgatgtgtttgtaaagccacaagctccacctcctcctccagccccatcccggattcccatccaggatagtctttctcaggctcagacttctcagccaccctcaccgcaagtgttttcacctgggtcctctaactcacgaccaccatctccaatggatccatatgcaaaaatggttggtacccctcgaccacctcctgtgggccatagtttttccagaagaaattctgctgcaccagtggaaaactgtacacctttatcatcggtatctaggccccttcaaatgaatgagacaacagcaaataggccatcccctgtcagagatttatgttcttcttccacgacaaataatgacccctatgcaaaacctccagacacacctaggcctgtgatgacagatcaatttcccaaatccttgggcctatcccggtctcctgtagtttcagaacaaactgcaaaaggccctatagcagctggaaccagtgatcactttactaaaccatctcctagggcagatgtgtttcaaagacaaaggatacctgactcatatgcacgacccttgttgacacctgcacctcttgatagtggtcctggaccttttaagactccaatgcaacctcctccatcctctcaggatccttatggatcagtgtcacaggcatcaaggcgattgtctgttgacccttatgaaaggcctgctttgacaccaagacctatagataatttttctcataatcagtcaaatgatccatatagtcagcctccccttaccccacatccagcagtgaatgaatcttttgcccatccttcaagggctttttcccagcctggaaccatatcaaggccaacatctcaggacccatactcccaacccccaggaactccacgacctgttgtagattcttattcccaatcttcgggaacagctaggtccaatacagacccttactctcaacctcctggaactccccggcctactactgttgacccatatagtcagcagccccaaaccccaagaccatctacacaaactgacttgtttgttacacctgtaacaaatcagaggcattctgatccatatgctcatcctcctggaacaccaagacctggaatttctgtcccttactctcagccaccagcaacaccaaggccaaggatttcagagggttttactaggtcctcaatgacaagaccagtcctcatgccaaatcaggatcctttcctgcaagcagcacaaaaccgaggaccagctttacctggcccgttggtaaggccacctgatacatgttcccagacacctaggccccctggacctggtctttcagacacatttagccgtgtttccccatctgctgcccgtgatccctatgatcagtctccaatgactccaagatctcagtctgactcttttggaacaagtcaaactgcccatgatgttgctgatcagccaaggcctggatcagaggggagcttctgtgcatcttcaaactctccaatgcactcccaaggccagcagttctctggtgtctcccaacttcctggacctgtgtcaacttcaggagtaactgatacacagaatactgtaaatatggcccaagcagatacagagaaattgagacagcggcagaagttacgtgaaatcattctccagcagcaacagcagaagaagattgcaggtcgacaggagaaggggtcacaggactcacccgcagtgcctcatccagggcctcttcaacactggcaaccagagaatgttaaccaggctttcaccagacccccacctccctatcctgggaacattaggtctcctgttgcccctcctttaggacctagatatgctgttttcccaaaagatcagcgtggaccctatcctcctgatgttgctagtatggggatgagacctcatggatttagatttggatttccaggaggtagtcatggtaccatgccgagtcaagagcgcttccttgtgcctcctcagcaaatacagggatctggagtttctccacagctaagaagatcagtatctgtagatatgcctaggcctttaaataactcacaaatgaataatccagttggacttcctcagcatttttcaccacagagcttgccagttcagcagcacaacatactgggccaagcatatattgaactgagacatagggctcctgacggaaggcaacggctgcctttcagtgctccacctggcagcgttgtagaggcatcttctaatctgagacatggaaacttcattccccggccagactttccgggccctagacacacagaccccatgcgacgacctccccagggtctacctaatcagctacctgtgcacccagatttggaacaagtgccaccatctcaacaagagcaaggtcattctgtccattcatcttctatggtcatgaggactctgaaccatccactaggtggtgaattttcagaagctcctttgtcaacatctgtaccgtctgaaacaacgtctgataatttacagataaccacccagccttctgatggtctagaggaaaaacttgattctgatgacccttctgtgaaggaactggatgttaaagaccttgagggggttgaagtcaaagacttagatgatgaagatcttgaaaacttaaatttagatacagaggatggcaaggtagttgaattggatactttagataatttggaaactaatgatcccaacctggatgacctcttaaggtcaggagagtttgatatcattgcatatacagatccagaacttgacatgggagataagaaaagcatgtttaatgaggaactagaccttccaattgatgataagttagataatcagtgtgtatctgttgaaccaaaaaaaagggaacaagaaaacaaaactctggttctctctgataaacattcaccacagaaaaaatccactgttaccaatgaggtaaaaacggaagtactgtctccaaattctaaggtggaatccaaatgtgaaactgaaaaaaatgatgagaataaagataatgttgacactccttgctcacaggcttctgctcactcagacctaaatgatggagaaaagacttctttgcatccttgtgatccagatctatttgagaaaagagccaatcgagaaactgctggccccagtgcaaatgtcattcaggcatccactcaactacctgctcaagatgtaataaactcttgtggcataactggatcaactccagttctctcaagcttacttgctaatgagaaatctgataattcagacattaggccatcggggtctccaccaccaccaactctgccggcctccccatccaatcatgtgtcaagtttgcctcctttcatagcaccgcctggccgtgttttggataatgccatgaattctaatgtgacagtagtctctagggtaaaccatgttttttctcagggtgtgcaggtaaacccagggctcattccaggtcaatcaacagttaaccacagtctggggacaggaaaacctgcaactcaaactgggcctcaaacaagtcagtctggtaccagtagcatgtctggaccccaacagctaatgattcctcaaacattagcacagcagaatagagagaggccccttcttctagaagaacagcctctacttctacaggatcttttggatcaagaaaggcaagaacagcagcagcaaagacagatgcaagccatgattcgtcagcgatcagaaccgttcttccctaatattgattttgatgcaattacagatcctataatgaaagccaaaatggtggcccttaaaggtataaataaagtgatggcacaaaacaatctgggcatgccaccaatggtgatgagcaggttcccttttatgggccaggtggtaactggaacacagaacagtgaaggacagaaccttggaccacaggccattcctcaggatggcagtataacacatcagatttctaggcctaatcctccaaattttggtccaggctttgtcaatgattcacagcgtaagcagtatgaagagtggctccaggagacccaacagctgcttcaaatgcagcagaagtatcttgaagaacaaattggtgctcacagaaaatctaagaaggccctttcagctaaacaacgtactgccaagaaagctgggcgtgaatttccagaggaagatgcagaacaactcaagcatgttactgaacagcaaagcatggttcagaaacagctagaacagattcgtaaacaacagaaagaacatgctgaattgattgaagattatcggatcaaacagcagcagcaatgtgcaatggccccacctaccatgatgcccagtgtccagccccagccacccctaattccaggtgccactccacccaccatgagccaacccacctttcccatggtgccacagcagcttcagcaccagcagcacacaacagttatttctggccatactagccctgttagaatgcccagtttacctggatggcaacccaacagtgctcctgcccacctgcccctcaatcctcctagaattcagcccccaattgcccagttaccaataaaaacttgtacaccagccccagggacagtctcaaatgcaaatccacagagtggaccaccacctcgggtagaatttgatgacaacaatccctttagtgaaagttttcaagaacgggaacgtaaggaacgtttacgagaacagcaagagagacaacggatccaactcatgcaggaggtagatagacaaagagctttgcagcagaggatggaaatggagcagcatggtatggtgggctctgagataagtagtagtaggacatctgtgtcccagattcccttctacagttccgacttaccttgtgattttatgcaacctctaggaccccttcagcagtctccacaacaccaacagcaaatggggcaggttttacagcagcagaatatacaacaaggatcaattaattcaccctccacccaaactttcatgcagactaatgagcgaaggcaggtaggccctccttcatttgttcctgattcaccatcaatccctgttggaagcccaaatttttcttctgtgaagcagggacatggaaatctttctgggaccagcttccagcagtccccagtgaggccttcttttacacctgctttaccagcagcacctccagtagctaatagcagtctcccatgtggccaagattctactataacccatggacacagttatccgggatcaacccaatcgctcattcagttgtattctgatataatcccagaggaaaaagggaaaaagaaaagaacaagaaagaagaaaagagatgatgatgcagaatccaccaaggctccatcaactccccattcagatataactgccccaccgactccaggcatctcagaaactacctctactcctgcagtgagcacacccagtgagcttcctcaacaagccgaccaagagtcggtggaaccagtcggcccatccactcccaatatggcagcaggccagctatgtacagaattagagaacaaactgcccaatagtgatttctcacaagcaactccaaatcaacagacgtatgcaaattcagaagtagacaagctctccatggaaacccctgccaaaacagaagagataaaactggaaaaggctgagacagagtcctgcccaggccaagaggagcctaaattggaggaacagaatggtagtaaggtagaaggaaacgctgtagcctgtcctgtctcctcagcacagagtcctccccattctgctggggcccctgctgccaaaggagactcagggaatgaacttctgaaacacttgttgaaaaataaaaagtcatcttctcttttgaatcaaaaacctgagggcagtatttgttcagaagatgactgtacaaaggataataaactagttgagaagcagaacccagctgaaggactgcaaactttgggggctcaaatgcaaggtggttttggatgtggcaaccagttgccaaaaacagatggaggaagtgaaaccaagaaacagcgaagcaaacggactcagaggacgggtgagaaagcagcacctcgctcaaagaaaaggaaaaaggacgaagaggagaaacaagctatgtactctagcactgacacgtttacccacttgaaacagcagaataatttaagtaatcctccaacaccccctgcctctcttcctcctacaccacctcctatggcttgtcagaagatggccaatggttttgcaacaactgaagaacttgctggaaaagccggagtgttagtgagccatgaagttaccaaaactctaggacctaaaccatttcagctgcccttcagaccccaggacgacttgttggcccgagcccttgctcagggccccaagacagttgatgtgccagcctccctcccaacaccacctcataacaatcaggaagaattaaggatacaggatcactgtggtgatcgagatactcctgacagttttgttccctcatcctctcctgagagtgtggttggggtagaagtgagcaggtatccagatctgtcattggtcaaggaggagcctccagaaccggtgccgtcccccatcattccaattcttcctagcactgctgggaaaagttcagaatcaagaaggaatgacatcaaaactgagccaggcactttatattttgcgtcaccttttggtccttccccaaatggtcccagatcaggtcttatatctgtagcaattactctgcatcctacagctgctgagaacattagcagtgttgtggctgcattttccgaccttcttcacgtccgaatccctaacagctatgaggttagcagtgctccagatgtcccatccatgggtttggtcagtagccacagaatcaacccgggtttggagtatcgacagcatttacttctccgtgggcctccgccaggatctgcaaaccctcccagattagtgagctcttaccggctgaagcagcctaatgtaccatttcctccaacaagcaatggtctttctggatataaggattctagtcatggtattgcagaaagcgcagcactcagaccacagtggtgttgtcattgtaaagtggttattcttggaagtggtgtgcggaaatctttcaaagatctgacccttttgaacaaggattcccgagaaagcaccaagagggtagagaaggacattgtcttctgtagtaataactgctttattctttattcatcaactgcacaagcgaaaaactcagaaaacaaggaatccattccttcattgccacaatcacctatgagagaaacgccttccaaagcatttcatcagtacagcaacaacatctccactttggatgtgcactgtctcccccagctcccagagaaagcttctccccctgcctcaccacccatcgccttccctcctgcttttgaagcagcccaagtcgaggccaagccagatgagctgaaggtgacagtcaagctgaagcctcggctaagagctgtccatggtgggtttgaagattgcaggccgctcaataaaaaatggagaggaatgaaatggaagaagtggagcattcatattgtaatccctaaggggacatttaaaccaccttgtgaggatgaaatagatgaatttctaaagaaattgggcacttcccttaaacctgatcctgtgcccaaagactatcggaaatgttgcttttgtcatgaagaaggtgatggattgacagatggaccagcaaggctactcaaccttgacttggatctgtgggtccacttgaactgcgctctgtggtccacggaggtctatgagactcaggctggtgccttaataaatgtggagctagctctgaggagaggcctacaaatgaaatgtgtcttctgtcacaagacgggtgccactagtggatgccacagatttcgatgcaccaacatttatcacttcacttgcgccattaaagcacaatgcatgttttttaaggacaaaactatgctttgccccatgcacaaaccaaagggaattcatgagcaagaattaagttactttgcagtcttcaggagggtctatgttcagcgtgatgaggtgcgacagattgctagcatcgtgcaacgaggagaacgggaccatacctttcgcgtgggtagcctcatcttccacacaattggtcagctgcttccacagcagatgcaagcattccattctcctaaagcactcttccctgtgggctatgaagccagccggctgtactggagcactcgctatgccaataggcgctgccgctacctgtgctccattgaggagaaggatgggcgcccagtgtttgtcatcaggattgtggaacaaggccatgaagacctggttctaagtgacatctcacctaaaggtgtctgggataagattttggagcctgtggcatgtgtgagaaaaaagtctgaaatgctccagcttttcccagcgtatttaaaaggagaggatctgtttggcctgaccgtctctgcagtggcacgcatagcggaatcacttcctggggttgaggcatgtgaaaattataccttccgatacggccgaaatcctctcatggaacttcctcttgccgttaaccccacaggttgtgcccgttctgaacctaaaatgagtgcccatgtcaagaggtttgtgttaaggcctcacaccttaaacagcaccagcacctcaaagtcatttcagagcacagtcactggagaactgaacgcaccttatagtaaacagtttgttcactccaagtcatcgcagtaccggaagatgaaaactgaatggaaatccaatgtgtatctggcacggtctcggattcaggggctgggcctgtatgctgctcgagacattgagaaacacaccatggtcattgagtacatcgggactatcattcgaaacgaagtagccaacaggaaagagaagctttatgagtctcagaaccgtggtgtgtacatgttccgcatggataacgaccatgtgattgacgcgacgctcacaggagggcccgcaaggtatatcaaccattcgtgtgcacctaattgtgtggctgaagtggtgacttttgagagaggacacaaaattatcatcagctccagtcggagaatccagaaaggagaagagctctgctatgactataagtttgactttgaagatgaccagcacaagattccgtgtcactgtggagctgtgaactgccggaagtggatgaactgaaatgcattccttgctagctcagcgggcggcttgtccctaggaagaggcgattcaacacacc

SEQ ID NO: 31422 - DNA, 4670 bp, Homo Sapiens; identical to SEQ ID NO: 26566

SEQ ID NO: 31423 - DNA, 5061 bp, Homo Sapiens
ggagctctctccgtcgtccggaggagccgcggaggcgctgtcctggccggagatgttcccggcgctggagtccgactcgccgctgcccccggaggacctggacgcggttgtcccagtcagtggagccgtcgccggtggcatgttggatcggatccttctggagtccgtgtgccagcaacagagctgggtccgggtgtacgatggtaaaggaccacccacccaccgtctgtcttgtggtcagtcaccctacaccgagacaacaacgtgggagcggaagtattgcatcctcacagacagccagttggtattgctcaacaaggagaaggagatacctgtggaagggggacaggagcagcagacagattccaccaaagggcgatgcctgaggagaactgtcagtgtcccttccgagggtcagtttcccgagtacccaccagagggcgccactaaactggaggtaccagcagaaaggtcccctcgtagacggagtatctcagggaccagtacatcagagaaacccaactccatggacactgcaaatacctcacccttcaaagtaccaggattcttcagcaagcgcctgaaaggctccatcaagaggaccaaaagccagtcaaagcttgacagaaacacgagctttcggcttccatcccttcgcagtacagatgacaggtctcgtgggctgcctaaactaaaagagtcacgttcccatgaatccttgctgagcccatgcagcacagtggaatgtctggatcttggtagaggggaacctgtatcagtgaaaccacttcatagtagcatccttggacaagacttctgctttgaggttacctacttaagtggaagtaaatgcttcagctgtaattctgcttctgagagagacaagtggatggaaaaccttcgcaggacagttcaacctaataaggacaattgcaggcgagctgaaaatgttcttcgtttatggatcattgaagccaaggaccttgcccctaaaaagaaatatttctgcgaactgtgccttgatgataccctctttgctcgtacaaccagcaagaccaaagcagacaatattttctggggcgaacattttgaattcttcagccttccacctcttcatagtatcacagttcacatttacaaggatgtggaaaaaaagaaaaaaaaggacaagaataattatgtagggctagtcaacatccccactgccagtgtgactggtcgccaatttgtagaaaagtggtatccagtgagtacacctacacccaacaaaggaaagacaggaggaccttctattcggattaaatcacgtttccaaactatcaccattctgcctatggagcaatacaaagaatttgcagaatttgtcaccagcaactacaccatgctgtgttctgtccttgagccagtaattagtgtgagaaataaagaggagttggcttgtgccttagtgcacattcttcaaagtactggcagagccaaggattttctgactgacttggtgatgtctgaggtggatcgttgtggagagcatgatgtcttgatcttcagagagaacactattgccaccaaatccattgaggaatacctcaagttggtgggacaacagtatcttcatgacgcactgggggagtttatcaaagctttgtatgagtccgatgagaactgtgaagtggatcccagcaaatgttcatctagtgaactgatagaccatcagagcaacctgaaaatgtgctgtgagctggctttctgcaagatcatcaactcttactgtgttttccctcgtgagttgaaagaagtgtttgcatcatggaagcagcagtgcctgaaccgtggcaagcaagacatcagcgagaggctcatcagtgcctcattatttctccgttttctgtgtccagccattatgtctcccagtcttttcaaccttatgcaggagtatcctgatgaccgcacatctcggactctaactcttattgccaaggtcattcagaacctggccaactttgccaagtttggtaacaaagaggaatacatggcattcatgaatgattttttagaacatgaatggggtggaatgaagcgctttcttttggagatctctaatccagacaccatctcaaacaccccaggctttgatggttacattgatctgggccgagagctttcagttttgcattccttactgtgggaagtagtttcccaacttgataagggtgaaaattccttcctacaggcgaccgtggcaaaattggggcctctccctcgtgttcttgctgatattaccaagtcattgactaatcctacgccaatacaacagcaactgagacgcttcactgaacataactccagtccaaatgtcagtggaagcctctcctctgggctgcagaaaatatttgaagaccccactgacagtgatttgcataaactaaaatctccaagccaggacaacacagacagctacttcagagggaaaacattattgctggttcagcaagcctcctctcagagcatgacttattctgaaaaggatgaaagggaaagtagccttcctaatggtcggagcgtctccctcatggacctccaggacactcatgctgctcaagtggagcatgcatctgtcatgcttgatgtgcctatacgcttgaccggaagccagctttccataacccaggtggccagcatcaaacagctgcgggaaacccagagcactccccaaagtgcaccccaagtgagaaggcccctgcacccagccttgaaccagccaggtggccttcagcccttgtcgttccagaaccctgtctatcacctcaataacccaattccagcaatgccaaaggcctctatagattccagtttggagaacctaagcactgccagttccagaagccaaagtaacagtgaagacttcaagctcagtggacccagcaatagcagcatggaagatttcactaaacgtagcactcagagtgaggacttctccaggcggcacacggtgccagatagacacatacctcttgctttgccacgacaaaatagtactgggcaggcccagatccgaaaagtggaccagggtgggttaggtgcccgagccaaagccccaccatccctgccacacagtgcttctttacgtagcaccgggagcatgtcagtggtgtccgcagccctggtggccgaacctgtgcagaatgggagccggtcccggcagcagtcctcttcctccagagagagccctgttcccaaagttagagcaatccagagacaacagacacagcaggttcagtcacctgtggactctgccacaatgtccccagtagagaggacagcagcctgggttctgaacaatgggcagtatgaagaggatgtggaagaaactgagcaaaatctagatgaagccaagcatgctgagaagtatgaacaagaaattactaaactgaaggagcgcctgagagtttccagccggcgactggaggaatatgaacgccgcttgctggtgcaggagcagcagatgcagaagctgctgctggaatacaaggcccgactggaggacagcgaggagcggctccgaagacagcaggaagaaaaagatagccagatgaaaagcatcatcagcaggctaatggctgtggaagaggaactgaagaaggatcatgctgagatgcaagcagttattgatgcaaagcagaaaataattgatgcacaggaaaaacggatcgtgtccctggattcagccaacaccagactgatgagcgcgctgacccaagtgaaggagcggtacagcatgcaggtccgcaatggcatctcccccaccaaccccaccaagctttccatcacggagaatggtgaattcaaaaacagcagctgctgacgggctttgtctgtggaaggagacagaaggaaattgacccactctcctatctccagacctttacctagcccctccaggtttacagaatgttgctacttcacaatggcgatgtggtgagaaactcctgaatgaagaaaggaaccttgtctttcagggcataaggcggcgacttccaaggtcaatgcttttcccccacatctctatgtacatagggaacttagttctgggccatgtacagaaaatatcactgtaatataccaaaaggaagttaataatgtagattacctttttgattattgctatttttattattgttttcctcttgttgaaagcactgcagttgttacaggaagtaaagtaggaactgttgtgtgagcgagacatgagcctgtaggttcagtaggtagagaccaagcatctatctgatagaagcacatggagtgcaataggacattgtgagaaggaatttttcagggattcatctactagtttaaaaaccccactctggccctcttgtcctttcagaaaacatgcaaataccaagatccatacaaaacaataatttattccactgatcaaccaagactggttctggttggacagctaatctgatttggggattcactgtttcagaggacacagacaaaagctgttgcatcaaaactggactttaggagtaatttctattgaactcctgtcaatatgtttatttcctctgtctacagcagatgggagtcttctcttttagacaggggctttttgtttttaaccccaattgtaataaagggtgttctttttcctctttagagtttacaaaactataaatatttgtgtctccacataccatcttcatcttcacacattcactgtgctttcctccccatagtgggagctgtcatcaccaacagggtttactctcccctggagaggttatttaaatagctgtccataagccatccagatcaacaccctttcttccatacagaaaagggctaaccataccacagctggaatctctgaatatttcctattaaaaattttttctatgtgttgttataatttttgtttgggataaagactctatccattgtactagcaaatctatggggggtaattttatctccatctttaacttttaaagtacttcttccccttatcccctcaataaagaaaggaaatccaaaaaaaaaaaaaaaaaa

SEQ ID NO: 31424 - DNA, 3091 bp, Homo Sapiens
actcagtgttcgcgggagcgccgcacctacaccagccaacccagatcccgaggtccgacagcgcccggcccagatccccacgcctgccaggagcaagccgagagccagccggccggcgcactccgactccgagcagtctctgtccttcgacccgagccccgcgccctttccgggacccctgccccgcgggcagcgctgccaacctgccggccatggagaccccgtcccagcggcgcgccacccgcagcggggcgcaggccagctccactccgctgtcgcccacccgcatcacccggctgcaggagaaggaggacctgcaggagctcaatgatcgcttggcggtctacatcgaccgtgtgcgctcgctggaaacggagaacgcagggctgcgccttcgcatcaccgagtctgaagaggtggtcagccgcgaggtgtccggcatcaaggccgcctacgaggccgagctcggggatgcccgcaagacccttgactcagtagccaaggagcgcgcccgcctgcagctggagctgagcaaagtgcgtgaggagtttaaggagctgaaagcgcgcaataccaagaaggagggtgacctgatagctgctcaggctcggctgaaggacctggaggctctgctgaactccaaggaggccgcactgagcactgctctcagtgagaagcgcacgctggagggcgagctgcatgatctgcggggccaggtggccaagcttgaggcagccctaggtgaggccaagaagcaacttcaggatgagatgctgcggcgggtggatgctgagaacaggctgcagaccatgaaggaggaactggacttccagaagaacatctacagtgaggagctgcgtgagaccaagcgccgtcatgagacccgactggtggagattgacaatgggaagcagcgtgagtttgagagccggctggcggatgcgctgcaggaactgcgggcccagcatgaggaccaggtggagcagtataagaaggagctggagaagacttattctgccaagctggacaatgccaggcagtctgctgagaggaacagcaacctggtgggggctgcccacgaggagctgcagcagtcgcgcatccgcatcgacagcctctctgcccagctcagccagctccagaagcagctggcagccaaggaggcgaagcttcgagacctggaggactcactggcccgtgagcgggacaccagccggcggctgctggcggaaaaggagcgggagatggccgagatgcgggcaaggatgcagcagcagctggacgagtaccaggagcttctggacatcaagctggccctggacatggagatccacgcctaccgcaagctcttggagggcgaggaggagaggctacgcctgtcccccagccctacctcgcagcgcagccgtggccgtgcttcctctcactcatcccagacacagggtgggggcagcgtcaccaaaaagcgcaaactggagtccactgagagccgcagcagcttctcacagcacgcacgcactagcgggcgcgtggccgtggaggaggtggatgaggagggcaagtttgtccggctgcgcaacaagtccaatgaggaccagtccatgggcaattggcagatcaagcgccagaatggagatgatcccttgctgacttaccggttcccaccaaagttcaccctgaaggctgggcaggtggtgacgatctgggctgcaggagctggggccacccacagcccccctaccgacctggtgtggaaggcacagaacacctggggctgcgggaacagcctgcgtacggctctcatcaactccactggggaaggctcccactgcagcagctcgggggaccccgctgagtacaacctgcgctcgcgcaccgtgctgtgcgggacctgcgggcagcctgccgacaaggcatctgccagcggctcaggagcccaggtgggcggacccatctcctctggctcttctgcctccagtgtcacggtcactcgcagctaccgcagtgtggggggcagtgggggtggcagcttcggggacaatctggtcacccgctcctacctcctgggcaactccagcccccgaacccagagcccccagaactgcagcatcatgtaatctgggacctgccaggcaggggtgggggtggaggcttcctgcgtcctcctcacctcatgcccaccccctgccctgcacgtcatgggagggggcttgaagccaaagaaaaataaccctttggtttttttcttctgtatttttttttctaagagaagttattttctacagtggttttatactgaaggaaaaacacaagcaaaaaaaaaaaaaagcatctatctcatctatctcaatcctaatttctcctcccttccttttccctgcttccaggaaactccacatctgccttaaaaccaaagagggcttcctctagaagccaagggaaaggggtgcttttatagaggctagcttctgcttttctgccctggctgctgcccccaccccggggaccctgtgacatggtgcctgagaggcaggcatagaggcttctccgccagcctcctctggacggcaggctcactgccaggccagcctccgagagggagagagagagagagaggacagcttgagccgggcccctgggcttggcctgctgtgattccactacacctggctgaggttcctctgcctgccccgcccccagtccccacccctgcccccagccccggggtgagtccattctcccaggtaccagctgcgcttgcttttctgtattttatttagacaagagatgggaatgaggtgggaggtggaagaagggagaagaaaggtgagtttgagctgccttccctagctttagaccctgggtgggctctgtgcagtcactggaggttgaagccaagtggggtgctgggaggagggagagggaggtcactggaaaggggagagcctgctggcacccaccgtggaggaggaaggcaagagggggtggaggggtgtggcagtggttttggcaaacgctaaagagcccttgcctccccatttcccatctgcaccccttctctcctccccaaatcaatacactagttgtttct

SEQ ID NO: 31425 - DNA, 2540 bp, Homo Sapiens
cctcgcgcgacgcgaaggttgtcgggatccgcggcagcagcggctgcttgagatctgtttctggggcctctggcggtggcggcctggggcggcgcgacggctggtgcgcaggtacactgatgctgaagtactatgagccttcggaacttgtggagagactacaaagttttggttgttatggtccctttagttgggctcatacatttggggtggtacagaatcaaaagcagccctgttttccaaatacctaaaaacgacgacattcctgagcaagatagtctgggactttcaaatcttcagaagagccaaatccaggggaagtagcaggcttgcaatcttcaggtaaagaagcagctttgaatctgagcttcatatcgaaagaagagatgaaaaataccagttggattagaaagaactggcttcttgtagctgggatatctttcataggtgtccatcttggaacatactttttgcagaggtctgcaaagcagtctgtaaaatttcagtctcaaagcaaacaaaagagtattgaagagtgaagtaaaataaatatttggaattactaatttgtcattaaatcattctatgctgattagcttcataaacattgaactttttgattttatagccacaatgctgcatattcatactttaattcctaaagaataatttttaatgttaaaacgtgataatgcaataaatagaaaaatgtggtttacaaaataaaaacggtcttcactagttaccacctgaagtaagatgtctcgtttggaagctaagaagccatcattgtgtaagagtgaaccactgacaactgagagagtcaggaccacactttctgtcttgaaaagaattgtaacatcatgctatggcccctcaggtaggctgaagcagctgcacaatggctttggaggttacgtgtgtacaacctcacagtcctcagctctgctcagtcaccttttggtcacacatcccattttaaagatcctgacagcctccatacagaatcatgtgtcaagcttcagtgattgtggcttattcacagctattctttgctgcaacctgattgaaaatgttcagagattaggcttgacacccaccactgtcattagattaaataaacatcttttgagtctttgcatcagttatctcaagtctgagacctgtggttgtcgaatcccagtggactttagtagtactcagatcctcctttgtttggtgcgtagtatattaacaagtaaacctgcctgtatgctcaccagaaaggaaacagagcatgtcagtgctttgatcctgagagcctttttgcttacaattccagaaaatgctgaaggccacatcattttaggaaagagtttaattgtacctttaaaaggtcaaagagttatagattccactgtattacctgggatactcattgaaatgtcagaagttcaattaatgaggctattacctatcaaaaaatcaactgccctcaaggtggcactcttttgtacaactttatccggagacacttctgacactggagaaggaactgtggtggtcagttatggggtttctcttgaaaatgcagtcttggaccagctgcttaacctaggaaggcagctaatcagtgaccacgtagatcttgtcctgtgccaaaaagttatacatccatctttgaagcagtttctcaatatgcatcgtattattgccatagacagaattggagtgactctgatggaacccctgactaaaatgacaggaacacagcctattggatccctaggctcaatatgtcctaatagttatggaagtgtgaaagatgtgtgcactgcaaaatttggctccaaacatttttttcatcttattcctaatgaagcaacaatctgcagcttgcttctctgcaacagaaatgacactgcctgggatgagctgaagctcacgtgtcagacggcactgcatgtcctgcagttaacactcaaggaaccatgggctttgttgggaggtggctgtactgaaactcatttggctgcatatatcagacacaagactcacaacgacccagaaagcattctcaaagatgatgaatgtactcaaacagaacttcaattaattgctgaagcattttgcagtgccctagaatctgttgttggctctttagaacatgatggaggtgaaattctcactgacatgaagtatggacacctttggtcagttcaggcagattctccctgtgttgctaactggccagatttgctttcacagtgtggctgtggattatacaatagccaggaagaactcaactggtctttcttaagaagcacacgtcgtccatttgtgccacaaagctgccttccacatgaagctgtgggctcagccagcaacctgaccttggactgtttgactgcaaagcttagtggcctacaggtggctgtagagacagccaatttgattttggatctttcatatgttattgaagataaaaactaagagaatagcatgttcgtattacaagagaaacaaataaactagtctgttggcaattgagaaaaaaaaaa

SEQ ID NO: 31426 - DNA, 1388 bp, Homo Sapiens
gtgcgtgagtttggtggcggccggctgtgcagagacgccatgtaccggctcatgtcagcagtgactgcccgggctgccgcccccgggggcttggcctcaagctgcggacgacgcggggtccatcagcgcgccgggctgccgcctctcggccacggctgggtcgggggcctcgggctggggctggggctggcgctcggggtgaagctggcaggtgggctgaggggcgcggccccggcgcagtcccccgcggcccccgaccctgaggcgtcgcctctggccgagccgccacaggagcagtccctcgccccgtggtctccgcagaccccggcgccgccctgctccaggtgcttcgccagagccatcgagagcagccgcgacctgctgcacaggatcaaggatgaggtgggcgcaccgggcatagtggttggagtttctgtagatggaaaagaagtctggtcagaaggtttaggttatgctgatgttgagaaccgtgtaccatgtaaaccagagacagttatgcgaattgctagcatcagcaaaagtctcaccatggttgctcttgccaaattgtgggaagcagggaaactggatcttgatattccagtacaacattatgttcccgaattcccagaaaaagaatatgaaggtgaaaaggtttctgtcacaacaagattactgatttcccatttaagtggaattcgtcattatgaaaaggacataaaaaaggtgaaagaagagaaagcttataaagccttgaagatgatgaaagagaatgttgcatttgagcaagaaaaagaaggcaaaagtaatgaaaagaatgattttactaaatttaaaacagagcaggagaatgaagccaaatgccggaattcaaaacctggcaagaaaaagaatgattttgaacaaggcgaattatatttgagagaaaagtttgaaaattcaattgaatccctaagattatttaaaaatgatcctttgttcttcaaacctggtagtcagtttttgtattcaacttttggctataccctactggcagccatagtagagagagcttcaggatgtaaatatttggactatatgcagaaaatattccatgacttggatatgctgacgactgtgcaggaagaaaacgagccagtgatttacaatagagcaaggtaaatgaataccttctgctgtgtctagctatatcgcatcttaacactattttattaattaaaagtcaaattttctttgtttccattccaaaatcaacctgccacattttgggagcttttctacatgtctgttttctcatctgtaaagtgaaggaagtaaaacatgtttataaagtaaaaaaaaaaaaaaaaaaaaaaaaaaaaaaaaaaaaaaaaaaaaaaaaaaaaaaa

SEQ ID NO: 31427 - DNA, 2508 bp, Homo Sapiens
taaatgaattccatgcttttccttcctttcccttccctgccttcgtgaaagggaagctaagtctttctcctaccccagattccttgaaggctgtctgagttctctcttccttcccctgcatagagaataagctggtctccaatttcaggtacaaggaaatggtagaactagtgatctcacccagcctcactgtaaacagcgattgtctggataaactgaagtttaaccgtgctgacgctgctgtgtggactctgagtgacagacaaggcatcaccaaatcggcccccctgagagtgtcccagctcttctccagatcttgcccacgtgtcctcccccgccagccttccacagccatggcagcctacggccagacgcagtacagtgcggggatccagcaggctaccccctatacagcttacccacctccagcacaagcctatggaatcccttcctacagcatcaagacagaagacagcttgaaccattcccctggccagagtggattcctcagctatggctccagcttcagcacctcacccactggacagagcccatacacctaccagatgcacggcacaacagggttctatcaaggaggaaatggactgggcaacgcagccggtttcgggagtgtgcaccaggactatccttcctaccccggcttcccccagagccagtacccccagtattacggctcatcctacaaccctccctacgtcccggccagcagcatctgcccttcgcccctctccacgtccacctacgtcctccaggaggcatctcacaacgtccccaaccagagttccgagtcacttgctggtgaatacaacacacacaatggaccttccacaccagcgaaagagggagacacagacaggccgcaccgggcctccgacgggaagctccgaggccggtctaagaggagcagtgacccgtccccggcaggggacaatgagattgagcgtgtgttcgtgtgggacttggatgagacaataattatttttcactccttactcacggggacatttgcatccagatacgggaaggacaccacgacgtccgtgcgcattggccttatgatggaagagatgatcttcaaccttgcagatacacatctgttcttcaatgacctggaggattgtgaccagatccacgttgatgacgtctcatcagatgacaatggccaagatttaagcacatacaacttctccgctgacggcttccacagttcggccccaggagccaacctgtgcctgggctctggcgtgcacggcggcgtggactggatgaggaagctggccttccgctaccggcgggtgaaggagatgtacaatacctacaagaacaacgttggtgggttgataggcactcccaaaagggagacctggctacagctccgagctgagctggaagctctcacagacctctggctgacccactccctgaaggcactaaacctcatcaactcccggcccaactgtgtcaatgtgctggtcaccaccactcaactaattcctgccctggccaaagtcctgctatatggcctggggtctgtgtttcctattgagaacatctacagtgcaaccaagacagggaaggagagctgcttcgagaggataatgcagagattcggcagaaaagctgtctacgtggtgatcggtgatggtgtggaagaggagcaaggagcgaaaaagcacaacatgcctttctggcggatatcctgccacgcagacctggaggcactgaggcacgccctggagctggagtatttatagcaggatcagcagcatctccacctgccatctcaccctcagaccccctcgccttccccacctccccaccgagaactccagagacccagatgttggacaccaggaaggggccccacagccgagacgacgtgtccagtgaccatctcagaagccgtccatcagtccaaatgggggttctgagaaggaaagtacccaacattggcttcggagtatttgactttggggaaaagggctggctcggagtctagactcttctgtaagactcacagaacaaaagcaaggaattgctgatttggggggtgcctggtgatgaggaggggatgggtttgtcttgtcttctttttaatttatggactagtctcattactccggaattatgctcttgtacctgtgtggctgggtttcttagtcgttggtttggtttggttttttgaactggtatgtggggtggttcacagttctaatgtaagcactctattctccaagttgtgctttgtggggacaatcattctttgaacattagagaggaaggcagttcaagctgttgaaaagactattgcttatttttgtttttaaagacctacttgacgtcatgtggacagtgcacgtgccttacgctacatcttgttttctaggaagagggggatgctgggaaggaatgggtgctttgtgatggataaaaggcattaaataaaaccacgtttacattttgaaaaaaaaaaaaaaaaaaaaaaaa

SEQ ID NO: 31428 - DNA, 4098 bp, Homo Sapiens
gcggccgctgggctcaggctgtccgctctgggctccgcggcctcggccccgctgcactccacctccgccccctcggactccctcccctctgcttctactcctcctgctccagtgcggatcgtttcgcaactgcttgccactcgtcccgtgcctggctgtttttccatttcccggccccctcttcttgagtactttaccccctgcatttggggacagggactggaaaaggggcgggtggagcgtccagtggagaagaaggaagcgaggcccgcaggaggaggaggatcggcggactgtggggaggagaccccacgccaccctttctggtcatctcccctcccgccccgcccctgcgcacactccctcgcgggcgagctactttcggaccaggaaagtaagagcggccctgggtgacagcgccgcggggccagtcccggggttagccgcgcgtctgctcgcttctggtccgtcgcgctcccagccagggcacagcccggaccgaggatggcttcgaccacaacctgcaccaggttcacggacgagtatcagcttttcgaggagcttggaaagggggcattctcagtggtgagaagatgtatgaaaattcctactggacaagaatatgctgccaaaattatcaacaccaaaaagctttctgctagggatcatcagaaactagaaagagaagctagaatctgccgtcttttgaagcaccctaatattgtgcgacttcatgatagcatatcagaagagggctttcactacttggtgtttgatttagttactggaggtgaactgtttgaagacatagtggcaagagaatactacagtgaagctgatgccagtcattgtatacagcagattctagaaagtgttaatcattgtcacctaaatggcatagttcacagggacctgaagcctgagaatttgcttttagctagcaaatccaagggagcagctgtgaaattggcagactttggcttagccatagaagttcaaggggaccagcaggcgtggtttggttttgctggcacacctggatatctttctccagaagttttacgtaaagatccttatggaaagccagtggatatgtgggcatgtggtgtcattctctatattctacttgtggggtatccacccttctgggatgaagaccaacacagactctatcagcagatcaaggctggagcttatgattttccatcaccagaatgggacacggtgactcctgaagccaaagacctcatcaataaaatgcttactatcaaccctgccaaacgcatcacagcctcagaggcactgaagcacccatggatctgtcaacgttctactgttgcttccatgatgcacagacaggagactgtagactgcttgaagaaatttaatgctagaagaaaactaaagggtgccatcttgacaactatgctggctacaaggaatttctcagcagccaagagtttgttgaagaaaccagatggagtaaaggagtcaactgagagttcaaatacaacaattgaggatgaagatgtgaaagcacgaaagcaagagattatcaaagtcactgaacaactgatcgaagctatcaacaatggggactttgaagcctacacaaaaatctgtgacccaggccttactgcttttgaacctgaagctttgggtaatttagtggaagggatggattttcaccgattctactttgaaaatgctttgtccaaaagcaataaaccaatccacactattattctaaaccctcatgtacatctggtaggggatgatgccgcctgcatagcatatattaggctcacacagtacatggatggcagtggaatgccaaagacaatgcagtcagaagagactcgtgtgtggcaccgccgggatggaaagtggcagaatgttcattttcatcgctcggggtcaccaacagtacccatcaagtaaatatttccaggctgtcagcttctttgttaatacacccatgctaaatttcaacagtgccacttctgcattctctgttctcaaggcacctggatggtgaccctgggccgtcctctcctcctcttcatgcatgtttctgagtgcatgaagttgtgaaggtcctacatgtaatgcatatgtgatgcatcatcttatcatatattccttcctatacattgtttacacttcaactacggggatgttccacacaaacttaaattactgttggcaaaacaatagggggagattagacaaaaaaaaaaatccacaatattccaagtacaactcttcatcaagtttctctgttaatgccaagatttaacagacttaagaactattgttctctgaatgacagttgtaagagaaatgtaaattttttagaactctttgctgttaatctgttttggtttgtttggtttttttttttttttttaaggtaaaaaaaaaatacaccttcagtttcctggtgtgatcctggttaaaatggatgatttttcattgaaagttttgctgattaacaattaaagtgggatgatatgtgggcaaaatcacttatgaaagtagaagcaagaatcagttggtttgctaccacataaagccatgctgtttttggtcaaactgtgtaaactggaaaaattcacatcatttctgagtttaatcactttaggatatattcacattgttttggtgaatttgctgaattgaattgtttttctttctcaaatctgtgatctcttttctttatcctgtttctttgttcctttcgtttgctttcttatttttcttttgttccattcttttcttacttttttcccttttccttttttggggaggctggctagtagtgtgtgagaaaagaatagaagtgaaatttgcataatgaatgtaaaagggaaataaaagtcttttgaaggtagctatactagcacttttgatcatcttcagggcccacaaaaatgttgtcaagattttaaaggtttataattctgcttaagctctagtttggacttaggtatcctaactatgttggaggtatttgcattgtttaaagttaggataaaagcaagttcctcctgtgactgcaacgtcttactgattgggacagttgccaggaggataccaacttgatagcagagggggttttatgcaaacgcactcacctccgccttggggaatgaaagggtcacttctgcatcatcactagctagttttctagtgttagagaggcttacaaatgtttgccattctcataagtgttttgaacttgatctttgtgacttgtgcttttttagcttctctcttgaatcagagtatcattgtcttcctccaaggagttagaatttcccagtttaaaacaaaaagggaaatgtcctaggttttctttgtgcttctcatttttcctttgttgattcaattcctgtgatttttgttctcttccctgaagtgctttacagtgcatggaatctccatcattgttattttaacgatagtaattcacagtcctcagaagcctatttttaaagcagaagcaaaaaagaaaaacaaaataacaaaaacaacccttcctcttttctctcatctcacctctctgtgttgattactaatcatcttagatattattgctagtggatgtatggtagatgggttgaagcttttctgataattattacacaatttaaaacaacatatatatttaaaataaatatatacagtaaatatattgagccatgttaacctgccaatgagatctgtgaaaaaataatggcctcatttttctctttttaatttcttttacccttttgtgaagcagctatacgtggcatacatgtatttaaagaaaaaaaaatagatgtagagtgttttttttacacttttaacttagcatgtggtgttgaagtattactgtagatcaagtttgtcttccgcactaagatgtgaggaaattgtgatttgttctctccaccacaaatgaattacacatttattatcttctatcattttgaaacactgcagtttaccatgggacactgtatatatttcttgccataatggtaaaggactgattgatatatttaagagttaataaatttgtgatttctgctgaaaaaaaaaaaaaaaaaa

SEQ ID NO: 31429 - DNA, 8615 bp, Homo Sapiens
gagtttgcagaagagagtcttcccgagaaggcagaacgagggtgtgtggagcactgcgggcgagatggagctgagggaaggcagagctgggtctcactctgttgcccaggctggagttcagcggtgcaatcccggctcactgcagccttgactccgtgagctcagggactcatgaagtggcagctaagccctgtccagtggccacccgtcagccaagggccagagaccaggaaaggaagaaaggcagcttcacttcctctttgaggatggagtcgcacagccgcgctggaaagagcagaaaatctgcaaaatttcggtccatctccaggtccctgatgctctgtaatgctaagaccagtgatgatggctctagccctgatgagaaatatcctgatccctttgagatttccttggcccagggcaaggagggaattttccactcatctgtgcagctggcagacacatcggaggctgggcccagcagtgttcctgatctagcactggcctcggaggctgctcaactccaagcagctgggaatgatcgaggcaagacctgtaggaggatattcttcatgaaggaatcttccacagcttcctctcgagaaaagcctggaaaactagaagcacaaagtagtaacttcctgtttcctaaagcctgccaccaaagggcacgcagcaactcaaccagtgttaatccctattgcacaagagaaattgattttccaatgaccaagaaatctgcagcgcccacggacaggcagccttactctctctgcagtaacaggaagtccctctctcaacaattggactgtccagcaggaaaggctgcgggaacttcgagaccaacacggtccctgagcacagctcagctcgtgcagccatctgggggcctccaggcttcagtcatctccaacatcgtgctgatgaagggccaggctaagggtctgggcttcagcatcgttgggggaaaagacagcatttatggccccattgggatttacgtcaaaaccatttttgcagggggagcagcagcagccgatggaaggctacaggaaggtgatgaaattctggagctcaatggtgaatcaatggctggactaacacatcaggatgctttgcagaagttcaagcaagccaaaaaggggctcctcaccctcaccgtgagaacccgcctgacggcgcctccttccctgtgcagccacctgtctcccccactgtgccgctccctgagctccagcacttgtatcaccaaggacagcagctccttcgccttggaaagcccctcggctcccatcagcaccgccaagcccaattacagaatcatggtggaggtttctctgcagaaagaggccggcgtgggcctgggcatcggcctgtgcagcgttccctacttccaatgcatctctggcattttcgtccacacgctgtcaccaggatccgtggcgcacctggacggacgtctccggtgtggggacgagattgtggaaatcagtgattcccctgtgcactgcctgacgctcaatgaagtctacacgatcctgagtcactgtgatcccggtccagtccccatcattgttagccgacatccagacccacaggtctctgaacagcaactcaaagaagctgtggcccaggctgtggaaaacaccaagtttggaaaggagaggcatcagtggagtctggaaggtgtcaaaaggctggaaagcagttggcacgggcggcccaccttggagaaggaacgagagaagaactcagcacccccgcatcgcagggctcagaaggtcatgatccgctccagcagtgacagcagctacatgtctgggtccccagggggaagtcctgggagtggcagtgctgagaagccgtcctctgacgtggacatcagcacacacagccccagcttgcctctggcacgggagccagtggtgctttctatagcatcctccaggctgccccaggagagcccacccctcccagagagccgggacagccacccgccgctgagactgaagaaatcctttgagattttggaagcgagagagctgctgccactgctgctaccacaggaagacacagcagggagaagccctagtgcctctgccggctgcccaggacctggtatcggcccacagaccaagtcctccacagagggcgagccagggtggagaagagccagcccagtgacccaaacatccccgataaaacacccactgcttaagaggcaggctcggatggactatagctttgataccacagccgaagacccttgggttaggatttctgactgcatcaaaaacttatttagccccatcatgagtgagaaccatggccacatgcctctacagcccaatgccagcctgaatgaagaagaagggacacagggccacccagatgggaccccaccaaagctggacaccgccaatggcactcccaaagtttacaagtcagcagacagcagcactgtgaagaaaggtcctcctgtggctcccaagccagcctggtttcgccaaagcttgaaaggtttgaggaatcgtgcttcagacccaagagggctccctgatcctgccttgtccacccagccagcacctgcttccagggagcacctaggatcacacatccgggcctcctcctcctcctcctccatcaggcagagaatcagctcctttgaaacctttggctcctctcaactgcctgacaaaggagcccagagactgagcctccagccctcctctggggaggcagcaaaacctcttgggaagcatgaggaaggacggttttctggactcttggggcgaggggctgcacccactcttgtgccccagcagcctgagcaagtactgtcctcggggtcccctgcagcctccgaggccagagacccaggtgtgtctgagtcccctcccccagggcggcagcccaatcagaaaactctcccccctggcccggacccgctcctaaggctgctgtcaacacaggctgaggaatctcaaggcccagtgctcaagatgcctagccagcgagcacggagcttccccctgaccaggtcccagtcctgtgagacgaagctacttgacgaaaagaccagcaaactctattctatcagcagccaagtgtcatcggctgtcatgaaatccttgctgtgccttccatcttctatctcctgtgcccagactccctgcatccccaaggaaggggcatctccaacatcatcatccaacgaagactcagctgcaaatggttctgctgaaacatctgccttggacacggggttctcgctcaacctttcagagctgagagaatatacagagggtctcacggaagccaaggaagacgatgatggggaccacagttcccttcagtctggtcagtccgttatctccctgctgagctcagaagaattaaaaaaactcatcgaggaggtgaaggttctggatgaagcaacattaaagcaattagacggcatccatgtcaccatcttacacaaggaggaaggtgctggtcttgggttcagcttggcaggaggagcagatctagaaaacaaggtgattacggttcacagagtgtttccaaatgggctggcctcccaggaagggactattcagaagggcaatgaggttctttccatcaacggcaagtctctcaaggggaccacgcaccatgatgccttggccatcctccgccaagctcgagagcccaggcaagctgtgattgtcacaaggaagctgactccagaggccatgcccgacctcaactcctccactgactctgcagcctcagcctctgcagccagtgatgtttctgtagaatctacagcagaggccacagtctgcacggtgacactggagaagatgtcggcagggctgggcttcagcctggaaggagggaagggctccctacacggagacaagcctctcaccattaacaggattttcaaaggtggacacagaggacttcgtgccagaggcaagatccctgtaaatattgttgcacaaaaatctcactagctctcttcccataccacccaatgctgatgtcctcaccacatgcggagaacaaatgtgaagggagtaggatattgggtcagtgtccaaagcagggtctgggcaggactcagctccccagagtcctctatgaactatggacggtgctccaggcaggctaaggcgtggagctgcctgatatttccctcccctggggacagcaagggctatccctttccaaaggccatggagagctggagcctggtgccctaacctctgagtcaccatcttaagagatgcctcattttagaaccaccaacaagcaagctcccaagggatggtgccctgttctctaccaagctatcctggctctttggagatcaaggagaggaggcaactttccttgttccccatcatctgtggaacccattaccttctccctcatttcaggagcagcctcagaacaaagtgagacagtccagcctggagatgaaatcttgcagctgggtggcactgccatgcagggcctcacacggtttgaagcctggaacatcatcaaggcactgcctgatggacctgtcacgattgtcatcaggagaaaaagcctccagtccaaggaaaccacagctgctggagactcctaggcaggacatgctgaagccaaagccaataacacacagctaacacacagctcccataaccgctgattctcagggtctctgctgccgccccacccagatgggggaaagcacaggtgggcttcccagtggctgctgcccaggcccagaccttctaggacgccacccagcaaaaggttgttcctaaaataagggcagagtcacacgggggcagctgatacaaattgcagactgtgtaaaaagagagcttaatgataatattgtggtgccacaaataaaatggatttattagaatttcatatgacattcatgcctggcttcgcaaaatgtttcaagtactgtaactgtgtcatgattcacccccaaacagtgacatttatttttctcatgaatctgcaatgtgggcagagattggaatgggcagctcatctctgtcccacttggcatcagctggcgtcatgcaaagtcatgcaaaggctgggaccacgtgagatcattcactcatacatctggccgttgatgttggctgggaactcacctggggctgctggcctgaatgcttataggtggcctctccttgtggcctgggcctcctcacaacatggtgtctggattcccaggatgagcatcccaggatcgcaagagccatgtagaagctgcatcttgtttatacctttgccttggaagttgcatggcatcacctccaccatactccatcagttagagctgacacaaacctgcctgggtttaaggggagaggaaatattgctggggtcatttatgaaaaatacagtttgtcacatgaaacatttgcaaaattgtttttggttggattggagaagtaatcctagggaagggtggtggagccagtaaacagaggagtacaggtgaagcaccaagctcaaagcgtggacaggtgtgccgacagaaggaaccagcgtgtatatgagggtatcaaataaaattgctactacttacctaccacatgccaagcactgtgctcagggctaaacgggcattgcctttagtgatcacagcagcttctacggtgtatggttctgtgccaatgtattgataagagggcacacactgtgtacagtaaatggcttatccagctggtgagtgatgcggcagattgagttttcttctgtgattcggtggagactatcagcccaagatgctttaagtgcacaacattacagggaatgcctgagtgcctggccaaagggatatttggtttggccatctctggatgcctgattgccaagctcaggaccaggcaatgtgactttgcatcagcaacaaccagcatcccttgaccaggcctgggccagagtattggtctcctctcagcccctgatcctgtgaagtaaggatgtgggggaagacctggcaaggacacagatgaaacacaaacaatagtaattctcaggccatcatcagtggagccatgttaatgtaatctgatggcttctccagggtccacaggaagtgaagaatctgtttcccagcagtggactcaaaacccatctgggctcctaaccttcctgtaaacccctttagtggcttcattagagcaggcgttcagctcactgttctattcatctcaaggaataatgggcttagagcagtttctgtcctgctggttaacttgtttggcctattccattctggattttgtcaagcagtagacaagcaattagacaagaacttggaggcaccatttgtatccactttttagacttaatagaaacattgaagatgaacataatctaccaacgaaagacgtgattcaattcaacactcccttcccatgacccaggctgggcaaggaggccacgtgatgtggagggcacattccttgcctgcacaaactcaccatctgtgcacgcagtggccttccctaaaatcagggaattgttttaagtcttatcaagcagccaagggatgaaagagaaggtgggttttcatcaagactggaaggtggggacagggatgagcatggagctggccgtgggcctggggtaccaagagactccttgagagaccaggcaaagcaagtgattgggacagaggttatctgtcccaggttatctgggcatagatgcaggtgagcccatggccctcccagtacctcctgtctctggcctgttttagaaggttctctcctccccaaggagacacaacaactcctagggccactgaagatataactattgcccaggtttctggtctctaggctggggaagtcctctgggtaggaatcagcaagaagatcctaaaacaaaagctcatccatttgcgttccatgatgctgggatttacacttgaggcttagctttgctctgccaacttcttcagagctgacacaggatgaaggcaatgccatcctcaaacactgcaggcatcacagctaacaattgtgaagtcgtcttaactcaccataaaaaggaatccactcccaggcagccctacttctttgctttgcccagcattttactgattcatacattatctcacttgtgccaacactcaagaagcaggctacactgacactggtattcctgcctccatattttctttaaaagacaaatcaaagcagatatattaagtgactgttcaagagcacacttggcccaagtggcagagcttggactggatgcatgttttccagctcctcatccagggctctgaccagtttaacctgatgcagtcacgtggaggagcagtgcaggcacagtatgtcccataggcccagtgagatgcattcttggttggctggccttccacttggctacacagggatgtacaaggcgatcccatcttgataagaccaccacctcagagtatggagctcagagagggcaggcatgaagtttccttggctggtgcacctagaattggctgaactcatgagaagttgatatagaacagtgcttgccacagagcggggactcggtaagcacttaatgaatgaatgaattctaagtcaatccaagagtctgatgatttcttgaaaagggtgttagctaaaggatcttaggcatgactgtagaatttgtagttgcaatagaacagagaaagaggaagctttctgtctccttaacactgagctgtcatgttttaaagcttgctcacatcttggcacatttaagagacagtcaccccaggactcaaaaatagggaagtaacagtaacgcaggggaaacgttttctgtttggaggagcaaaggctgagaacactgtgaaaacattttgcgcgcacaatagtaacctgggtaaatgcagcgtgaagggattttagtcacacgtggtctttcttacaaggaaggtggtgggggtgcagatgaggttgctagagaatgttagaggatccctctctggattggagatagggaaagaaagttgcacggctgctgaggccccttctaggtggcaaggctgtgctccctggttctgatgatgtgcctgggtggacatggcccctgtgagtttgtacagtcttgcagcaggatctagaggggggatttccagccagggctgctagacggaggcctactcttccatctttcctgatggcaggatggcctggccagggcctggaagacagagacctcctgcctccgcctcagtaagacgacaaggaaaggcaaatgcccaagggaaagaaaaggaaggctcttctccccagagttccccatgcagacatgagtgcgtgctcagttcagaatcacttctgagaactcatccctaatgctgcagatttgggctggaacagattcacactgtctggtttcaccgaggacatgaaactccaccttgcggggataaagagagaaaaacaaattcatcaaatggaagacacattgaaagtgtttttccttaatgcttatcctgtttttaaaccattatttccaagttgacaccttttttaaggaaaaataaatattttgcggcattaaagccataaaaaaaaaaaaaaaaaaaaaaaaaaaaaaaa

SEQ ID NO: 31430 - DNA, 1524 bp, Homo Sapiens
cttccctccccgactgtgcgccgcggctggctcgggttcccgggccgacatgggcgccgccgcgtgggcacggccgctgagcgtgtctttcctgctgctgcttctgccgctcccggggatgcctgcgggctcctgggacccggccggttacctgctctactgcccctgcatggggcgctttgggaaccaggccgatcacttcttgggctctctggcatttgcaaagctgctaaaccgtaccttggctgtccctccttggattgagtaccagcatcacaagcctcctttcaccaacctccatgtgtcctaccagaagtacttcaagctggagcccctccaggcttaccatcgggtcatcagcttggaggatttcatggagaagctggcacccacccactggccccctgagaagcgggtggcatactgctttgaggtggcagcccagcgaagcccagataagaagacgtgccccatgaaggaaggaaacccctttggcccattctgggatcagtttcatgtgagtttcaacaagtcggagctttttacaggcatttccttcagtgcttcctacagagaacaatggagccagaggcgtgagaatcactcctgtgttaccttactcttcccaaggtgaaactggaagcagcttctagagaacagcttcaggtgcagaccgagaaatgacgtcatcctgataattattggacgtgtttattaattgcaccccattagcccctgtttttaaaaaatataggttagcaggacgtgggcacaggccgtgaaacatttatagggcgcctgtcacgtgtgagacatagtaatcagaggccaatggtgatgtgtgaaaatgaggatgaccagctctggttttctaggagctatggtctcataatgacaataatcagcatagtgtacttgtccttaatgttatagcatggcaggaaagaccatgggcttagaaggcagacattggttaggaggtgcagggaacatactaattcatgtgcggtcaaagcacttggcatttaatagggcaaaggtaaacagatgtagagaaatgagtctcatgcctgtaatcccagcactttgggaggccaaggtgggtggatcacttgagcctaagagatcaaggctgcagtgagccatgatggtacccctgcactccagcccaggttacagagcaagggcctgtctcagcaaaacaaaacaagcacaggccaaggagtgagatagccagcgctgatggtatctgcctcgtagtgcatgaagtgcatgtcatacactaagcagccagccagtgttggctgtcagtgttattactcacatgctttattttatttaagactttgagatagttcatgaagtgggtattattatcaatttccattttataggtgaggaaactgagcccagtgaagttaaataacttcccaaggtcattgagctgttgagtggacagctcaggtctgtttgtaaatctttaataaataacaacagctaagattcaaaaaaaaaaaaaaaaaa

SEQ ID NO: 31431 - DNA, 1473 bp, Homo Sapiens
ggaggtcacaatcacattgagccaaaacgcatccagtgttttctccagttacaaataaaacgaatatgcccatgctgctaccacatcctcaccagcatttcctaaaaggccttttaagagcacctttccgatgttaccacttcatctttcactcaagtactcatctcggatcaggaatcccatgtgctcagccgtttaattctcttggactccattgtacaaagtggatgctgctgtcagatggcttaaagagaaaattatgtgtacaaacaaccttaaaggaccacacagaaggactttctgataaagagcaaagatttgtggataaactttatactggtttaatccaagggcaaagggcctgtttagcagaggccataactcttgtagaatcaactcacagcaggaaaaaggagttagcccaggtgcttcttcagaaagtattactttaccacagagaacaagaacaatcaaataaaggaaaaccactagcatttcgagtaggattgtctgggccccctggtgctggaaaatcaacatttatagaatattttggaaaaatgcttactgagagagggcacaaattatctgtgctagctgtggacccttcttcttgtactagtggtggatcactcttaggtgataaaacccgaatgactgagttatcaagagatatgaatgcatacatcaggccatctcctactagaggaactttaggaggcgtgacaaggaccacaaatgaagctattctgttgtgtgaaggagcgggatatgacataattcttattgaaaccgttggtgtgggtcagtcggagtttgctgttgctgacatggttgacatgtttgttttactactgccaccagcaggaggagatgagctgcagggtatcaaaaggggtataatcgagatggcagatctggtagctgtaactaaatctgatggagacttgattgtgccagctcgaaggatacaagcggaatatgtgagtgcactgaaattactccgcaaacgttcacaagtctggaaaccaaaggtaattcgtatttctgcccgaagtggagaggggatctctgaaatgtgggataaaatgaaagatttccaggacctaatgcttgccagtggggagctgactgccaaacgacggaagcaacagaaagtttggatgtggaatctcattcaggaaagtgtgttagagcatttcaggacccaccccacagtccgggaacagattccacttctggaacaaaaggttctcattggggccctgtccccaggactagcagcagacttcttgttaaaagcttttaaaagcagagactaataaaattcatcctgtataataattttacatatcatttcataaagtattttaatagaaaaatcacttgtatgcttatattttcagtaattattgtatggtgctcttgtcttctttgtttgtgacccatgcttgaaaacttgaaggaagttag

SEQ ID NO: 31432 - DNA, 5359 bp, Homo Sapiens
gagaggagaggccagcggattaaagggtttcatgttgccacagcctctcccccagtccctgtctccgaggcctgcttgctaggtggggcgactcttctgtgagctgcagctgtggggcagagagaagccctccccacccaggactgagaggctggagaccccaggctcgccaaggcacggaagacaaaggcctggggcgtcctggggtctgggaggaaggcagacagagctcatggtctgtggctgctctgccctccttcccctccccaaccccaggcccaccatgcctgcaactcccaacttcctcgcaaaccccagctccagcagccgctggattcccctccagccaatgcccgtggcctgggcctttgtgcagaagacctcggccctcctgtggctgctgcttctaggcacctccctgtcccctgcgtggggacaggccaagattcctctggaaacagtgaagctatgggctgacaccttcggcggggacctgtataacactgtgaccaaatactcaggctctctcttgctgcagaagaagtacaaggatgtggagtccagtctgaagatcgaggaggtggatggcttggagctggtgaggaagttctcagaggacatggagaacatgctgcggaggaaagtcgaggcggtccagaatctggtggaagctgccgaggaggccgacctgaaccacgaattcaatgaatccctggtgttcgactattacaactcggtcctgatcaacgagagggacgagaagggcaacttcgtggagctgggcgccgagttcctcctggagtccaatgctcacttcagcaacctgccggtgaacacctccatcagcagcgtgcagctgcccaccaacgtgtacaacaaagacccagatattttaaatggagtctacatgtctgaagccttgaatgctgtcttcgtggagaacttccagagagacccaacgttgacctggcaatattttggcagtgcaactggattcttcaggatctatccaggtataaaatggacacctgatgagaatggagtcattacttttgactgccgaaaccgcggctggtacattcaagctgctacttctcccaaggacatagtgattttggtggacgtgagcggcagtatgaaggggctgaggatgactattgccaagcacaccatcaccaccatcttggacaccctgggggagaatgacttcgttaatatcatagcgtacaatgactacgtccattacatcgagccttgttttaaagggatcctcgtccaggcggaccgagacaatcgagagcatttcaaactgctggtggaggagttgatggtcaaaggtgtgggggtcgtggaccaagccctgagagaagccttccagatcctgaagcagttccaagaggccaagcaaggaagcctctgcaaccaggccatcatgctcatcagcgacggcgccgtggaggactacgagccggtgtttgagaagtataactggccagactgtaaggtccgagttttcacttacctcattgggagagaagtgtcttttgctgaccgcatgaagtggattgcatgcaacaacaaaggctactacacgcagatctcaacgctggcggacacccaggagaacgtgatggaatacctgcacgtgctcagccgccccatggtcatcaaccacgaccacgacatcatctggacagaggcctacatggacagcaagctcctcagctcgcaggctcagagcctgacactgctcaccactgtggccatgccagtcttcagcaagaagaacgaaacgcgatcccatggcattctcctgggtgtggtgggctcagatgtggccctgagagagctgatgaagctggcgccccggtacaagcttggagtgcacggatacgcctttctgaacaccaacaatggctacatcctctcccatcccgacctccggcccctgtacagagaggggaagaaactaaaacccaaacctaactacaacagtgtggatctctccgaagtggagtgggaagaccaggctgaatctctgagaacagccatgatcaatagggaaacaggtactctctcgatggatgtgaaggttccgatggataaagggaagcgagttcttttcctgaccaatgactacttcttcacggacatcagcgacacccctttcagtttgggggtggtgctgtcccggggccacggagaatacatccttctggggaacacgtctgtggaagaaggcctgcatgacttgcttcacccagacctggccctggccggtgactggatctactgcatcacagatattgacccagaccaccggaagctcagccagctagaggccatgatccgcttcctcgccaggaaggacccagacctggagtgtgacgaggagctggtccgggaggtgctgtttgacgcggtggtgacagcccccatggaagcctactggacagcgctggccctcaacatgtccgaggagtctgaacacgtggtggacatggccttcctgggcacccgggctggcctcctgagaagcagcttgttcgtgggctccgagaaggtctccgacaggaagttcctgacacctgaggacgaggccagcgtgttcaccctggaccgcttcccgctgtggtaccgccaggcctcagagcatcctgctggcagcttcgtcttcaacctccgctgggcagaaggaccagaaagtgcgggtgaacccatggtggtgacggcaagcacagctgtggcggtgaccgtggacaagaggacagccattgctgcagccgcgggcgtccaaatgaagctggaattcctccagcgcaaattctgggcggcaacgcggcagtgcagcactgtggatgggccgtgcacacagagctgcgaggacagtgatctggactgcttcgtcatcgacaacaacgggttcattctgatctccaagaggtcccgagagacgggaagatttctgggggaggtggatggtgctgtcctgacccagctgctcagcatgggggtgttcagccaagtgactatgtatgactatcaggccatgtgcaaaccctcgagtcaccaccacagtgcagcccagcccctggtcagcccaatttctgccttcttgacggcgaccaggtggctgctgcaggagctggtgctgttcctgctggagtggagtgtctggggctcctggtacgacagaggggccgaggccaaaagtgtcttccatcactcccacaaacacaagaagcaggacccgctgcagccctgcgacacggagtaccccgtgttcgtgtaccagccggccatccgggaggccaacgggatcgtggagtgcgagccctgccagaaggtatttgtggtgcagcagattcccaacagtaacctcctcctcctggtgacagaccccacctgtgactgcagcatcttcccaccagtgctgcaggaggcgacagaagtcaaatataatgcctctgtcaaatgtgaccggatgcgctcccagaagctccgccggcgaccagactcctgccacgccttccatccagaggagaatgcccaggactgcggcggcgcctcggacacctcagcctcgccgcccctactcctgctgcctgtgtgtgcctgggggctactgccccaactcctgcggtgacaccacccagcctgacctgtgttttggcaaggtgatccttccagagccatcccacaaagtcagcactgacatgggatgcagctaactgcagttgggtcgcccccaggccaacgctcctctcaatcctgggctggtggcccctggctccggagaatgctggatggaacaggaaaccaatcacctggcaccactttcaagatgcttcatggtgcccggtaccatctgccctaggtctcaacatgagcatacttctgacctaaccttcctgtctcctcttcgggaagccagcgtgagctcagcttggaccaagacaaaataatttagttcttcctgtactccagagtccagacccagccaagaaagggtcagttgtttctgaccctttctgtcggagtggtctctggtagaacccaaggacttctgggtactgagaagcagcagcagaatgaggccaaatgcagagatgaggctaaggcaagaatatgccccaactaaagcatagattccccaaagtgaggctcatggtgggaggccactcaccttcctagctgctgctcgaaaaggttttgactgtgttggggtgggggttgggtaagggaatggtcaagactgagaaaggaatgaaatccattcaggaaatatcgacagggctacacatgatgtccccaaactgctgctattgaagaacttcccaaaacttctttacaaagccctaaaggaaagtttgcatctatgaaaagccaataggctgagacatccaattgctgcatggaaattgatgtacattcaggggacggcaaaaatagctgtaaaatagtgaaaaagagcagtggttgtgctcttttctggccaatgatttacaaaagaatctacttgactctgtccctggagtgaaatccttagggttggaacttgtgggaacattccaacttgctaagcagggtccactgggagggaagctctatctgggaactcacccccagcgcacacacatctcccccagggtcccaaggccccgcagcttcctcccccgaccaaaccccaagacctggatcccaggagacaacagtctccacagtgagagcaacattaagggcaaagccatggagaaatgtgggagaggccggcctcaaatctttccatttaacaaaccccagtgatgggtatggacagcatgcagggcttttggggcgcttcccccggtcctccatcaccctcagcctccacacttcaaagttcaagttcaaagctgttcaagtttcctaccagcaaatagccctaacttgcctctagagtaggccaaatgccaactctgtaaaacacacttacattataggttacagaatgtcactcttaccgtcatgtcttgcaacaaccctgtgaggacagtattaatgcccccttacagcagaagacactgcagctcggagaagacagcttaagtggcagaataatgctagaacagctaaggtttacatgtaccaaataacatgtttcagctcattccatcctcacaacagccccctgaaagtgggtactatcattagtcccatgttatagaaactgcagcagagttgaaaattgcctccaaattaccggaagagtgtatgaagattgaatgtgatgtattcacgtaacatgcttgaaactgcctggcatatactaaacgctaaataaatacatgctaactgcaaaaaaaaaaaaaaaaaaaca

SEQ ID NO: 31433 - DNA, 4621 bp, Homo Sapiens
gccgggagaaccgaacccctggcggccgcgaccccggctcccgccccggccccggcccgacccgccatgacggggctggaggaccaggagttcgacttcgagttcctcttcgagtttaaccagcgcgacgagggcgccgccgcggccgccccagaacactatggctatgcatcctccaacgtcagccccgccctgccgctccccacggcgcactccaccctgccggccccgtgccacaaccttcagacctccacaccgggcatcatcccgccggcggatcacccctcggggtacggagcagctttggacggtgggcccgcgggctacttcctctcctccggccacaccaggcctgatggggcccctgccctggagagtcctcgcatcgagataacctcgtgcttgggcctgtaccacaacaataaccagtttttccacgatgtggaggtggaagacgtcctccctagctccaaacggtccccctccacggccacgctgagtctgcccagcctggaggcctacagagacccctcgtgcctgagcccggccagcagcctgtcctcccggagctgcaactcagaggcctcctcctacgagtccaactactcgtacccgtacgcgtccccccagacgtcgccatggcagtctccctgcgtgtctcccaagaccacggaccccgaggagggctttccccgcgggctgggggcctgcacactgctgggttccccgcggcactccccctccacctcgccccgcgccagcgtcactgaggagagctggctgggtgcccgctcctccagacccgcgtccccttgcaacaagaggaagtacagcctcaacggccggcagccgccctactcaccccaccactcgcccacgccgtccccgcacggctccccgcgggtcagcgtgaccgacgactcgtggttgggcaacaccacccagtacaccagctcggccatcgtggccgccatcaacgcgctgaccaccgacagcagcctggacctgggagatggcgtccctgtcaagtcccgcaagaccaccctggagcagccgccctcagtggcgctcaaggtggagcccgtcggggaggacctgggcagccccccgcccccggccgacttcgcgcccgaagactactcctctttccagcacatcaggaagggcggcttctgcgaccagtacctggcggtgccgcagcacccctaccagtgggcgaagcccaagcccctgtcccctacgtcctacatgagcccgaccctgcccgccctggactggcagctgccgtcccactcaggcccgtatgagcttcggattgaggtgcagcccaagtcccaccaccgagcccactacgagacggagggcagccggggggccgtgaaggcgtcggccggaggacaccccatcgtgcagctgcatggctacttggagaatgagccgctgatgctgcagcttttcattgggacggcggacgaccgcctgctgcgcccgcacgccttctaccaggtgcaccgcatcacagggaagaccgtgtccaccaccagccacgaggccatcctctccaacaccaaagtcctggagatcccactcctgccggagaacagcatgcgagccgtcattgactgtgccggaatcctgaaactcagaaactccgacattgaacttcggaaaggagagacggacatcgggaggaagaacacacgggtacggctggtgttccgcgttcacgtcccgcaacccagcggccgcacgctgtccctgcaggtggcctccaaccccatcgaatgctcccagcgctcagctcaggagctgcctctggtggagaagcagagcacggacagctatccggtcgtgggcgggaagaagatggtcctgtctggccacaacttcctgcaggactccaaggtcattttcgtggagaaagccccagatggccaccatgtctgggagatggaagcgaaaactgaccgggacctgtgcaagccgaattctctggtggttgagatcccgccatttcggaatcagaggataaccagccccgttcacgtcagtttctacgtctgcaacgggaagagaaagcgaagccagtaccagcgtttcacctaccttcccgccaacgttccaattataaaaacagaacccactgatgattatgagcctgctccaacctgtggaccggtgagccaggggttaagtcctctcccaagaccatactacagccagcagctcgcgatgccacccgaccccagctcctgcctcgtggccggcttcccgccctgtccgcagagaagcaccctgatgccagcggcccctggcgtgagccccaagctccacgacctttctcccgctgcctacaccaagggcgttgccagcccgggccactgtcacctcggactcccgcagccggccggagaggcccccgccgtccaggacgtgcccaggccagtggccacgcaccccggctcgcccgggcagccacccccggccctgctgccacagcaggtgagtgcgcctccaagcagtagctgcccccctggtctcgaacactcgctctgccccagcagcccctctcctccactcccgcctgccacccaagagccgacctgcctgcagccctgcagcccagcgtgcccgcccgccacgggccgcccgcagcacctgccgtccacggtccgcagggacgagtctccgactgccgggccacggctgctgccagaggtgcatgaggacggtagtcctaatttggcccctattcctgtaacggtcaagcgagagcctgaagagttggaccagttgtacctggatgacgtaaatgaaataatacgaaatgacctctccagcacgagcacccactcctagttgccacattggagcactcagttcagcaggggtatgctgacttcagcagacaaagacttttgaataaataaactgaactcacacctggtaccactcagaacctccaactgactgaatgccaggagctgaacattaatatgtgcaaagattggctctccaacaagaaggaaagcagggaggaagggagaccactgtgtcacctggaggagaagtcatctcatgacaacagaagggaggtggccgggctgagcacgggagacccaccgtgcaggggcctttcatgggaacggcccacacgcagtttgaccccacgcccagcccttctggcacccctggggttcaatactggaagtgccttatttaaccagaccatcagggcatcatagaattgagcattgaatttgctactgtaggagtatttttaggagcagaaactgcaaacacatttcattgtgaggttttaccctctgtatgaatgaagagaacgctggaaggctgcgagaggactctagtatgagtctccaacatttggaacgtttcctgggctgtcacgtacactcctgctgccttacacagtgcattttagaatcttccagtctgtcatctcagctcttttgtaacatgcttcccttgtctgcgcggttgaaaccgtaggcttgttcatagtcgcatgctcgcatctttgtttttaatctggcttcgaacatagcacaagtaacttgaatagcacatcaataggttactggacaaaagcagaaaaacctgttacaggatagcctgcatttgcatgtgtgtacatatctaggcatctatttatgtataaataataacagagccgacgtgtcctcgcccaggagggcttccctgtcagcaataaccggcatccgttttggaacctgcgtctggggctccagtcgctgctcttgctggcgtccatcgccgcctcggacggccgtgcattttctcgtctcacgcagttcgaggaggaccctagaaagccaggagctgtgattgacagtagctgtaggttaccagacggcaacattagaaagtgattgtaaataacatgcaacctaagtgtaatatatttgttcagttataagatgattgtttcacagaagccttaccactctctgcttcatctaagaaaaccaataccaaaaacgccactttaatgctcagccctgcgttgtgtgttttcagatgagttactgttaacaggtaggtttgtgtaggccttgctgggcactctgtacaattagttgcttattacgtatgattactcacagcgatctattgttccatataaccaaaaagcatggtttattcattgaaacacggttgacctgaactcgtgccttaggaattaatgcccccttatggaacctgcctgaattgcacctgcgggtggaggctccggctgtgaagtcactgaacagaacgtcgctgatggagaaagggctcccgcagaaggaacggcctgtaccgtgcgctccggcacaatcgcgtctcttgtgtctcactcacggaaagaaacaacctgaaggccatcccgtcggtctgcacgtaaccgtgaagacgtgtggccgcgtcccacctgcggctgggtaccctgcacccggcactgtaggagtcacgtgcagcctttctcaggggactgtcattgaaaaggaaacgtttgatgtctgtgtcagctgtctttgtagttaggaaatagatccaataaagccgtatttttttgctggaaaaaaaaaaaaaaaaa

SEQ ID NO: 31434 - DNA, 4296 bp, Homo Sapiens
cactcagagagctgggctggagctccaagcggaaaccgcgggagccgagcccagctaggaatgcagacctcctgaaaaccaagccgaggactgcggggtccggtgtccacgcagagtgtcagcttcctctggtgcaaccagcaagtcttccagtatgaatcccacagaaaccaaggctgtaaaaacagaacctgagaagaagtcacagtcaaccaagctgtctgtggttcatgagaaaaaatcccaagaaggaaagccaaaagaacacacagagccaaaaagcctacccaagcaggcatcagatacaggaagtaacgatgctcacaataaaaaagcagtttccagatcagctgaacagcagccatcagagaaatcaacagaaccaaagactaaaccacaagacatgatttctgctggtggagagagtgttgctggtatcactgcaatatctggcaagccgggtgacaagaaaaaagaaaagaaatcattaaccccagctgtgccagttgaatctaaaccggataaaccatcgggaaagtcaggcatggatgctgctttggatgacttaatagatactttaggaggacctgaagaaactgaagaagaaaatacaacgtatactggaccagaagtttcagatccaatgagttccacctacatagaggaattgggtaaaagagaagtcacaattcctccaaaatatagggaactattggctaaaaaggaagggatcacagggcctcctgcagactcttcgaaacccatagggccagatgatgctatagacgccttgtcatctgacttcacctgtgggtcgcctacagctgctggaaagaaaactgaaaaagaggaatctacagaagttttaaaagctcagtcagcagggacagtcagaagtgctgctccaccccaagagaagaaaagaaaggtggagaaggatacaatgagtgatcaagcactcgaggctctgtcggcttcactgggcacccggcaagcagaacctgagctcgacctccgctcaattaaggaagtcgatgaggcaaaagctaaagaagaaaaactagagaagtgtggtgaggatgatgaaacaatcccatctgagtacagattaaaaccagccacggataaagatggaaaaccactattgccagagcctgaagaaaaacccaagcctcggagtgaatcagaactcattgatgaactttcagaagattttgaccggtctgaatgtaaagagaaaccatctaagccaactgaaaagacagaagaatctaaggccgctgctccagctcctgtgtcggaggctgtgtgtcggacctccatgtgtagtatacagtcagcaccccctgagccggctaccttgaagggcacagtgccagatgatgctgtagaagccttggctgatagcctggggaaaaaggaagcagatccagaagatggaaaacctgtgatggataaagtcaaggagaaggccaaagaagaagaccgtgaaaagcttggtgaaaaagaagaaacaattcctcctgattatagattagaagaggtcaaggataaagatggaaagccactcctgccaaaagagtctaaggaacagcttccacccatgagtgaagacttccttctggatgctttgtctgaggacttctctggtccacaaaatgcttcatctcttaaatttgaagatgctaaacttgctgctgccatctctgaagtggtttcccaaaccccagcttcaacgacccaagctggagccccaccccgtgatacctcgcagagtgacaaagacctcgatgatgccttggataaactctctgacagtctaggacaaaggcagcctgacccagatgagaacaaaccaatggaagataaagtaaaggaaaaagctaaagctgaacatagagacaagcttggagaaagagatgacactatcccacctgaatacagacatctcctggatgataatggacaggacaaaccagtgaagccacctacaaagaaatcagaggattcaaagaaacctgcagatgaccaagaccccattgatgctctctcaggagatctggacagctgtccctccactacagaaacctcacagaacacagcaaaggataagtgcaagaaggctgcttccagctccaaagcacctaagaatggaggtaaagcgaaggattcagcaaagacaacagaggaaacttccaagccaaaagatgactaaagaaatacaagttaaggtatctggtatctgcatgtaaaatcttcagctggtggatggtgacttttgaagaacaaaaggctttggcaacagaaaacaattgttctgggtgatttctagaatggtttttgttgagtctctgaacatcctaaatattggtttgttattcttttccagaaagaaaatgaatttgactggttcacctgtgtactgagtattgataaactttgaatttttttaattgccttcaattgggagagaaagctttatatttgtaagaaatatatttgataaagtttcttaaagcaacaccaaaaaaacaaaagaaaagctaagtgaatttttgcacattctacacacagtgcctgtaaatctcatttgtattttcagtttgcccttaattttttttgttagtgtttagaaaacaatgttttaaacattcttcagtgttctgatttcttattaccccctttcctcttgggcttttgaactgtatttgatgttgctttgggataatgtttataagtcaaacataagatattgtacattgggcacatatctcctcttgggctgctaataataaattaataacaggtaacctggacaaaccaggaagcaccaaaccccttttcagtttgaactcttctttgccaggtgtgaggacttctgcatcttacagtcagcacagaacacactgagacttgaatcaagtcagcaacagagcaaaataaaggttagataagtccttgtgtagcaaatttcgagcataagaaataaaatctaattaattcttagggtactcatctgacttgaactctgttggtttactgtgttagtaaactgtgctttctattatctatacataaaacctgagcagcaactgtgtctttagagctattgccacattagcctttgcactgtatagcgtctggctttatggaacttaagtttaccaaatataaaaagaaacttctgcttttaaaaaaattatatatatatattaaatttgaaacctgcatttctcccacagcaatgtaagaagtaggctctgatgtcctaccactttgaatggttttctaatatcttaatgaatagttcctgaacattgcactgatatcatcgattagaattttgatatttaatttcatctttatttcctggtagagaatgcaggaaaagatgtcaggtacataacataaaacagattgggaatttattgtttccaaagggcatggccttccttagcatcagtttgaagcttttgttatgacttagctgacttgtggcagcggggcaagcaaaaacaataacactgcttataaatggcaccacatcttgttaacctcccccccaaatactctctgaaagtcatgcacatacctatgggattttacacaccaccagcttaaaatgctatgtctctatccatcagaaatagtcattattctatttttaaggcagcaacaagaaaagaaaaaacacttttcctgagggatttctaaccatgtatctaatcctcccatttgggcagtataggtgtttgcttttttgttttctttttttaagaaaaaccttgaaacctttgacactgacagatgtgtttgcaaggatacggcttcagtattactaatttccatgtgtatctggaagtatttttaaatggcataccaaaatccagaagtttaaagatgcctataaaagtaaacaacatttatttaaaaagaactctgaatatgccttcttttttaattagaaatatcttcgagacttgggtgtttgttaataactaataactggagtaagctacaggatctaaagcagccctttttacagtctagttaggagagagaaaataattgcaaatatccacttagaggcaaagaacaattttttattatcaaaaaggtttctgcacattgttgtggcaatattgtatctgtttagaaaatgggcttttccaaaagcaaacaaagataggttcctcaggtgaccaaaactgaaaatcaatatttccatgtttcattaatcaaggcataaaatacaattaaagcaaaatattttacattaaaaaaaaaaaaaaaaaa

SEQ ID NO: 31435 - DNA, 4418 bp, Homo Sapiens
cggcaggaaggccatggcggggcccgagcgctggggccccctgctcctgtgcctgctgcaggccgctccagggaggccccgtctggcccctccccagaatgtgacgctgctctcccagaacttcagcgtgtacctgacatggctcccagggcttggcaacccccaggatgtgacctattttgtggcctatcagagctctcccacccgtagacggtggcgcgaagtggaagagtgtgcgggaaccaaggagctgctatgttctatgatgtgcctgaagaaacaggacctgtacaacaagttcaagggacgcgtgcggacggtttctcccagctccaagtccccctgggtggagtccgaatacctggattacctttttgaagtggagccggccccacctgtcctggtgctcacccagacggaggagatcctgagtgccaatgccacgtaccagctgcccccctgcatgcccccactggatctgaagtatgaggtggcattctggaaggagggggccggaaacaagaccctatttccagtcactccccatggccagccagtccagatcactctccagccagctgccagcgaacaccactgcctcagtgccagaaccatctacacgttcagtgtcccgaaatacagcaagttctctaagcccacctgcttcttgctggaggtcccaggacttttctggacacacacaccctgtggcaacctttcagcccagcagaccagagtccgtgaatgacttgttcctctgtccccaaaaggaactgaccagaggggtcaggccgacgcctcgagtcagggccccagccacccaacagacaagatggaagaaggaccttgcagaggacgaagaggaggaggatgaggaggacacagaagatggcgtcagcttccagccctacattgaaccaccttctttcctggggcaagagcaccaggctccagggcactcggaggctggtggggtggactcagggaggcccagggctcctctggtcccaagcgaaggctcctctgcttgggattcttcagacagaagctgggccagcactgtggactcctcctgggacagggctgggtcctctggctatttggctgagaaggggccaggccaagggccgggtggggatgggcaccaagaatctctcccaccacctgaattctccaaggactcgggtttcctggaagagctcccagaagataacctctcctcctgggccacctggggcaccttaccaccggagccgaatctggtccctgggggacccccagtttctcttcagacactgaccttctgctgggaaagcagccctgaggaggaagaggaggcgagggaatcagaaattgaggacagcgatgcgggcagctggggggctgagagcacccagaggaccgaggacaggggccggacattggggcattacatggccaggtgagctgtcccccgacatcccaccgaatctgatgctgctgctgcctttgcaaggactactgggcttcccaagaaactcaagagcctccgtacctcccctgggcggcggaggggcattgcacttccgggaagtccacctagcggctgtttgcctgtcgggctgagcaacaagatgcccctccctcctgtgacccgccctctttaggctgagctataagaggggtggacacagggtgggctgaggtcagaggttggtggggtgtcatcacccccattgtccctagggtgacaggccagggggaaaaattatccccggacaacatgaaacaggtgaggtcaggtcactgcggacatcaagggcggacaccaccaaggggccctctggaacttgagaccactggaggcacacctgctatacctcatgcctttcccagcagccactgaactcccccatcccagggctcagcctcctgattcatgggtcccctagttaggcccagataaaaatccagttggctgagggttttggatgggaagggaagggtggctgtcctcaaatcctggtctttggagtcatggcactgtacggttttagtgtcagacagaccggggttcaaatcccagctctgctgttcactggttgtatgatcttggggaagacatcttccttctctgcctcggcttcctcatctgcagctacgcctgggtgtggtgagggttctaggggatctcagatgtgtgtagcacggagcctgctgtgtcctgggtgctctctacgtggtggccggtagaattctccatctatccaggctccaggagacccctgggcatctcccacctgtggcccctaaacccagagtgactgagagcacttaacattcagcttgtctcatccccagtctacctccttccttctaccctcactgcctcccagtcaggagagtgagctctcagaagccagagccccacccaaggggaccctggtctctccgccttcacctagcaatgggaaccctgcttcccaggggaggaaccaactgctccaccttctagggacccagtttgttggagtaggacagtaacatggcaggaatcggacttctgggcctgtaatcccagtttggatggcacgttagactcttggttgaccgttgtggtccttagaagtcccattctcccttccagttatgagaaaccaatgccttctagattcaggtgactatccttacctgggggtgctgatgcatcctcagttaacctacacccacctgaatatagatgagcgtagctgagttttcacccgtaggaccgaagtgttttgtggtggagtatctgaacaaccttggctctgtggccattcaacctgccaggactaacatttctggatttgtgaagaagggatcttcaaagccattgaacccacagagctgtgttgctttaaagccaccacaagggtacagcattaaatggcagaactggaaaagcttcttagggcatctcatccagggattctcaaaccatgtcccccagaggccttgggctgcagttgcagggggcgccatggggctataggagcctcccactttcaccagagcagcctcactgtgccctgattcacacactgtggctttccacgtgaggttttgtttagagggatccactactcaagaaaaagttagcaaaccactccttttgttgcaaaggagctgaggtcaagggtggcaaaggcacttgtccaaggtcgcccagcagtgctgctctgatgacttgtgcacatccccaagggtaagagcttcgatctctgcacagccgggccaacctctgaccccttgtccatgtcagtaaaatatgaaggtcacagccaggatttctaagggtcaggaggccttcaccgctgctggggcacacacacacacatgcatacacacatacgacacacacctgtgtctccccaggggttttccctgcagtgaggcttgtccagatgattgagcccaggagaggaagaacaaacaaactacggagctggggagggctgtggcttggggccagctcccagggaaattcccagacctgtaccgatgttctctctggcaccagccgagctgcttcgtggaggtaacttcaaaaaagtaaaagctatcatcagcatcatcttagacttgtatgaaataaccactccgtttctattcttaaaccttaccatttttgttttgttttgtttttttgagtcggagttttgttctttttgcctaggctggagtgcagtggtacaatctcggctcactgcaacctccacctcccgggttcaagtgattctcctgcctcagcctcccaagtagctgggattacaggcacccgccaccacacctggctaatttttttgtatttttagtagagacggggtttcaccatgttggccaggctggtctcgaactcctgacctcaggtgatccgcccgcctcggcctcccaaagtgctgggattacaggcgtgagccaccgcgcccagccaaaccttactatttttttaaagaattttttccagagtttaatttctgacatagcttaagttttccagtaactctaaactccatctcctttatcgtcattaagtcattcacaaaaagccaggagaagcatttggaaagggcatgataatcagtataataatttgccttgtgtggtcagcacttaactgtttacaaagccctttcacgtgcacagcaggtgggaactgcgcggtgtgggctgggcctgcgctggaagcatatcccgtgaaaagtgttagtgccttaggtgaaagcaacatgtatccctttagactactaacggtatatgttgttcttatgtatttgtatttatttctattttttctatgtttatgtcatatttaaacgatatcctactgcttgttggtattaccctaaactgtttaaataaagagctctatttttaaagaaaaaaggtacaattga

SEQ ID NO: 31436 - DNA, 1842 bp, Homo Sapiens
ggaggcagcaccacatccagagctcgctcagctgctgcccagcctcggctgtgaggataggctggctgggcagcacgtctctccccacagggctccctgagaccaccaggaagagcccccaaccaatcttgggattctcccttcgtgcggttgtctgggacctttttccagggtcaaagcagatcgtgaggaggaagctgagatgccctgtatccaagcccaatatgggacaccagcaccgagtccgggaccccgtgaccacctggcaagcgaccccctgacccctgagttcatcaagcccaccatggacctggccagccccgaggcagcccccgctgcccccactgccctgcccagcttcagcaccttcatggacggctacacaggagagtttgacaccttcctctaccagctgccaggaacagtccagccatgctcctcagcctcctcctcggcctcctccacatcctcgtcctcagccacctcccctgcctctgcctccttcaagttcgaggacttccaggtgtacggctgctaccccggccccctgagcggcccagtggatgaggccctgtcctccagtggctctgactactatggcagcccctgctcggccccgtcgccctccacgcccagcttccagccgccccagctctctccctgggatggctccttcggccacttctcgcccagccagacttacgaaggcctgcgggcatggacagagcagctgcccaaagcctctgggcccccacagcctccagccttcttttccttcagtcctcccaccggccccagccccagcctggcccagagccccctgaagttgttcccctcacaggccacccaccagctgggggagggagagagctattccatgcctacggccttcccaggtttggcacccacttctccacaccttgagggctcggggatactggatacacccgtgacctcaaccaaggcccggagcggggccccaggtggaagtgaaggccgctgtgctgtgtgtggggacaacgcttcatgccagcattatggtgtccgcacatgtgagggctgcaagggcttcttcaaggtaccgcgcagccccaggtggggccttttgttggaaatggagagaggctggcctcatcccattgggacctgtggtctccccctgggttctcctcctagctaagtcctgtcctgcagggtgggatcagccctgccaggtgggccgccttcctggagacccgtagatgccagggctggaagctttcatttgccgggacactcgggcccatgggattgcacagagctggagggaggggtgagataggggcagataggagctgcaggggtgcctggcgagcctctggttttcctctgctcctctgcctgtcctctcccaactcaaggttctagtgggaaggggtgcccccaggctctcatgttcctggcgtgagatgaaaggatccctgcggagggtttggttcttgagggctgggggtggacttgggaacaggctgtgtgtttgtcccagcgatggtgcctgcttagcttcccgtccccaccccccagccccttggccctctcctgtctgccctagggagaaggcaggtggacaagggcccatgaaaaaatacaggtgtctagactgccagggagaccctggcccccagtagtgtgtcctggggacttcctcagagcgagaaacctcccccaatgtcttcaagacttttctctccccccgcccaaccccgtctctccctcccttgccacccaaatgttagaaaaatagctgtgaacagagagcgcttttgtctgcaatggcagcaggatctggacggtcccctcccc

SEQ ID NO: 31437 - DNA, 3769 bp, Homo Sapiens
cggctgcggttcctggtgctgctcggcgcgcggccagctttcggaacggaacgctcggcgtcgcgggccccgcccggaaagtttgccgtggagtcgcgacctcttggcccgcgcggcccggcatgaagcggcgttgaggagctgctgccgccgcttgccgctgccgccgccgccgcctgaggaggagctgcagcaccctgggccacgccgatgactactgcaaactgtggcgcccacgacgagctcgacttcaaactcgtctttggcgaggacggggcgccggcgccgccgcccccgggctcgcggcctgcagatcttgagccagatgattgtgcatccatttacatctttaatgtagatccacctccatctactttaaccacaccactttgcttaccacatcatggattaccgtctcactcttctgttttgtcaccatcgtttcagctccaaagtcacaaaaactatgaaggaacttgtgagattcctgaatctaaatatagcccattaggtggtcccaaaccctttgagtgcccaagtattcaaattacatctatctctcctaactgtcatcaagaattagatgcacatgaagatgacctacagataaatgacccagaacgggaatttttggaaaggccttctagagatcatctctatcttcctcttgagccatcctaccgggagtcttctcttagtcctagtcctgccagcagcatctcttctaggagttggttctctgatgcatcttcttgtgaatcgctttcacatatttatgatgatgtggactcagagttgaatgaagctgcagcccgatttacccttggatcccctctgacttctcctggtggctctccagggggctgccctggagaagaaacttggcatcaacagtatggacttggacactcattatcacccaggcaatctccttgccactctcctagatccagtgtcactgatgagaattggctgagccccaggccagcctcaggaccctcatcaaggcccacatccccctgtgggaaacggaggcactccagtgctgaagtttgttatgctgggtccctttcaccccatcactcacctgttccttcacctggtcactcccccaggggaagtgtgacagaagatacgtggctcaatgcttctgtccatggtgggtcaggccttggccctgcagtttttccatttcagtactgtgtagagactgacatccctctcaaaacaaggaaaacttctgaagatcaagctgccatactaccaggaaaattagagctgtgttcagatgaccaagggagtttatcaccagcccgggagacttcaatagatgatggccttggatctcagtatcctttaaagaaagattcatgtggtgatcagtttctttcagttccttcaccctttacctggagcaaaccaaagcctggccacacccctatatttcgcacatcttcattacctccactagactggcctttaccagctcattttggacaatgtgaactgaaaatagaagtgcaacctaaaactcatcatcgagcccattatgaaactgaaggtagccgaggggcagtaaaagcatctactgggggacatcctgttgtgaagctcctgggctataacgaaaagccaataaatctacaaatgtttattgggacagcagatgatcgatatttacgacctcatgcattttaccaggtgcatcgaatcactgggaagacagtcgctactgcaagccaagagataataattgccagtacaaaagttctggaaattccacttcttcctgaaaataatatgtcagccagtattgattgtgcaggtattttgaaactccgcaattcagatatagaacttcgaaaaggagaaactgatattggcagaaagaatactagagtacgacttgtgtttcgtgtacacatcccacagcccagtggaaaagtcctttctctgcagatagcctctatacccgttgagtgctcccagcggtctgctcaagaacttcctcatattgagaagtacagtatcaacagttgttctgtaaatggaggtcatgaaatggttgtgactggatctaattttcttccagaatccaaaatcatttttcttgaaaaaggacaagatggacgacctcagtgggaggtagaagggaagataatcagggaaaaatgtcaaggggctcacattgtccttgaagttcctccatatcataacccagcagttacagctgcagtgcaggtgcacttttatctttgcaatggcaagaggaaaaaaagccagtctcaacgttttacttatacaccagttttgatgaagcaagaacacagagaagagattgatttgtcttcagttccatctttgcctgtgcctcatcctgctcagacccagaggccttcctctgattcagggtgttcacatgacagtgtactgtcaggacagagaagtttgatttgctccatcccacaaacatatgcatccatggtgacctcatcccatctgccacagttgcagtgtagagatgagagtgttagtaaagaacagcatatgattccttctccaattgtacaccagccttttcaagtcacaccaacacctcctgtggggtcttcctatcagcctatgcaaactaatgttgtgtacaatggaccaacttgtcttcctattaatgctgcctctagtcaagaatttgattcagttttgtttcagcaggatgcaactctttctggtttagtgaatcttggctgtcaaccactgtcatccataccatttcattcttcaaattcaggctcaacaggacatctcttagcccatacacctcattctgtgcataccctgcctcatctgcaatcaatgggatatcattgttcaaatacaggacaaagatctctttcttctccagtggctgaccagattacaggtcagccttcgtctcagttacaacctattacatatggtccttcacattcagggtctgctacaacagcttccccagcagcttctcatcccttggctagttcaccgctttctgggccaccatctcctcagcttcagcctatgccttaccaatctcctagctcaggaactgcctcatcaccgtctccagccaccagaatgcattctggacagcactcaactcaagcacaaagtacgggccaggggggtctttctgcaccttcatccttaatatgtcacagtttgtgtgatccagcgtcatttccacctgatggggcaactgtgagcattaaacctgaaccagaagatcgagagcctaactttgcaaccattggtctgcaggacatcactttagatgatggtaagttcatctctgatatgttcttgaagtagtgaagattcagggactttattctcccaagtgtcatgaaaaagtttctatggattgcttattggcatatggttgggcttttaaataagttgttattagaaatatatgttaatatataactttgccaggtaccacggctcacgcctgtatcccagcactttggaaggctgaggcgggtggatcacaaggtcaggagttcaagaccagcctggccaacatggtgtaacgctgtctctactaaaaatacaaaaaattagccaggcatggtggtgtgtgactataatcccagctactcgggaggctgagacaggagaatcacttgaacccgggaggtggcagttgcagggagctaagatcgcgccattgcactccagcctgggcggcagagcaagactccgtctcgggaaaaaaaaaaaaaaaaaa

SEQ ID NO: 31438 - DNA, 14185 bp, Homo Sapiens
tgcaacggaaacttttggctccacgaacagaaaagcaagagcaaaaactcagttaaatgcgttcttcctccatctttgcctagtccaaaaggaaaaaaaaagaaacagaaaaaagaaaaactgtttggaagagtagcgttgaggtttgctttttacctgtttttcctctagaacagccaggtggattcacatgatccaattttttaattgtcttctatgtcccactccgaataacccggatgccccagcacaatcagagagatcgttttttttaaaaaaaatttcagcctccaaaggtaggaggggagtgttaggggagaaagtactttaattaaaaatcaataactcgaggtttttgggatacggtttgccatttcctaattaagaaatgggtttgacagtccctttgtacacactgctatgcaaaccccaaagggttggcggctgtccgggcgatgacactccggtcccctgcgagaccccgggccagccaggcccgtccgccgccggcctctggggtccgtccccggctcgcgcagacctctcgcttctctcggctctgtctcctgcgctcagctctgctcggggccggccgcctcaggctcgccgccaccaggtcgttgcaaataccttttccctccccggggccccagcgcgcggccacctcccagcctccccccctcccaccctggcagcggggccctttcccggctcaggaacagcagcagcccgggccgcgccggcaggaagcgaggcccatgttgctgctgttccctggcgcgcctccccgccctccgggggccgccacggctcttccgcgctcccgggcacccccctccgcgcctgcgctgtgccccacgggggcggggctcagattcctgtcagcggcggcggcggtggcggcgaccgtcagttttcgctgaggagaaacacgaaacggaccctttggctctcccccttccccttccccgtcctgaacccctctcctggtcaccgagaatcagtccccgtggagttccccctccacctcgccatcgtttcctcggtcctcggcccagtggaagtcactaccctcgaggaggaggcagcggcagccgccctcgcgtcgccgcccccggttcggtgcccgcggtcccggagaggaggtgccgccgccaccgccgctccccccctcccgctgccctcgggccgggctgggtcgagctgcgatgccctcggacttcatctcattgctcagcgcggacctagacctggaatcgcccaagtccctctactcgcgagaatctgtctatgatcttctcccaaaggagttacagttacctccatctagagaaacatctgtagcatcaatgagtcagacaagcggtggtgaggcaggctcgcctcctccagctgttgttgctgctggatttgcctctgaagcagggagtgtctgcattaaaaatgacctgtagttctctgcttcatagatgcttcttcagctccctcctcttcctccatgggcggtgcttgcagctcctttaccacctcttccagccctaccatttattctacctcagtcaccgacagcaaggctatgcaagtggagagctgctcctcagccgtgggggtaagtaacagaggggtaagtgaaaagcagttaaccagtaacacagttcagcagcatccatcaacaccgaagaggcacacagtcttgtacatctcaccaccacctgaggacttgctggataacagtcggatgtcctgccaggatgaggggtgtggattggaatctgagcagagctgcagtatgtggatggaggattccccctccaacttcagtaacatgagcaccagttcctacaatgataacactgaggtacctcgtaaatcacgaaaacgaaatccaaagcagaggccgggggtcaaacgacgagattgtgaagaatctaatatggatatatttgatgccgacagtgccaaagcacctcactatgtgctttctcagcttaccacggacaacaaaggcaactcaaaagcgggaaatggaacattggaaaaccaaaaaggaactggagtaaagaagagccctatgttgtgtggacaatatcctgttaaaagtgagggaaaggagctgaagatagttgtacaacctgagacacagcaccgagctcggtacctgactgagggcagccgtggctcagtgaaagatagaacacagcaaggctttcctacagtaaagctggaaggccataatgaacctgtagtgttgcaagtgtttgtgggcaacgactctggacgagtgaaaccacatggattttatcaggcctgcagagtaactggacgaaatacaactccttgcaaagaagtggacattgaaggcactactgttatagaagtcggccttgatcctagcaacaacatgacactggcggtggactgcgtagggatattgaaattgaggaatgctgatgtcgaagccagaataggaattgctggttccaagaagaaaagcactcgtgccagattggtttttcgagttaatatcatgaggaaagatggctccactttgacactgcaaacaccctcttctccaattttgtgtactcagccagcaggagtgccagaaatcttaaagaaaagcttgcatagctgttcagtgaaaggagaagaagaagtgtttttaatcggcaagaactttctgaaaggaactaaagttattttccaagaaaatgtttctgatgaaaactcttggaagtcagaagctgaaattgatatggaactatttcatcagaatcatcttattgtgaaggttcctccctatcatgaccaacatataactttgcctgtgtcagtgggaatatatgtagtgacaaatgctggaagatctcatgatgttcaaccattcacttacactccagacccagcagcagctggtgctttgaatgtaaatgtgaagaaggaaatatctagtccagcaagaccttgctcttttgaagaggccatgaaagcaatgaaaactactggatgtaatttagataaggtaaatattatccctaatgccctgatgactccactcataccaagcagtatgattaagagtgaagatgttactccaatggaagtaacagcagaaaaaagatcttccactatttttaagactacaaagtctgttggatcaactcagcaaacattagaaaacatctcaaacatagcaggaaatggctctttttcatcaccatcatcttcccacctaccttctgaaaatgaaaaacagcagcagattcagcccaaggcatacaacccagagaccctgacaactattcaaacccaggacatctcacagcctggtacttttccagcagtttctgcttctagtcagctgcccaacagcgatgcactattgcagcaggctacacagtttcagacaagagaaactcagtctagagagatattacagtcagatggtacagtggttaatttgtcacaactgactgaggcatcacaacaacagcagcagtcaccactacaagaacaagcacagactttacagcagcagatttcatcaaatatttttccatcaccaaatagtgtgagtcagcttcagaatactattcagcagctgcaagcagggagtttcacaggcagtactgctagtggcagcagtggaagtgttgacttggtccaacaagttttagaggcacagcagcagttatcttcagttttattttctgctccagatggtaatgagaatgttcaagagcagcttagtgcagatatttttcaacaagtcagtcaaattcagagtggtgtaagccctggaatgttttcctcaacagagccaacagtccataccagaccagataatttattacctggaagagctgaaagtgttcatccacagtctgaaaacacgttatctaatcaacagcagcagcagcagcagcaacagcaagtgatggaatcttcagccgcaatggtgatggagatgcaacagagtatctgccaggcagctgcccagattcagtcagagttattcccttcaactgcttcagcaaatggaaaccttcagcaatcgccagtttaccagcagacttctcacatgatgagtgcattgtctaccaatgaggatatgcaaatgcagtgtgaattgttttcttctcctcctgcagtttctggaaatgaaacttctacaactaccacacagcaggttgcaacccctggcactaccatgtttcagacatcaagttcaggagatggagaagaaactggaacacaagcaaaacagattcagaacagtgtctttcagaccatggtccaaatgcaacatagtggggacaatcaacctcaagttaaccttttttcatccacaaaaagtatgatgagtgttcagaatagtggtacccaacaacaaggtaatggtttattccagcaagggaatgagatgatgtcacttcaatctggaaattttttgcagcagtcttctcattcacaggcccaactttttcatcctcaaaatcctattgccgatgctcagaacctttcccaggaaactcaaggttctctctttcatagtccaaatcctattgtccacagtcagacttctacaacctcctctgaacaaatgcagcctccaatgtttcactctcaaagtaccattgctgtgttacagggctcttcagttcctcaagaccagcagtcaaccaacatatttctttcccagagtcccatgaataatcttcagactaacacagtagcccaagaagcattttttgcagcaccgaactcaatttctccacttcagtcaacatcaaacagtgaacaacaagctgctttccaacagcaagctccaatatcacacatccagactcctatgctttcccaagaacaggcacaacccccgcagcagggtttatttcagcctcaggtggccctgggctcccttccacctaatccaatgcctcaaagccaacaaggaaccatgttccagtcacagcactcaatagttgccatgcagagtaactctccatcccaggaacagcagcagcagcagcaacagcagcagcaacagcagcagcaacaacaacagagcattttattcagtaatcagaataccatggctacaatggcgtctccaaagcaaccaccaccaaacatgatattcaacccaaatcaaaatccaatggctaatcaggagcaacagaaccagtcaatttttcaccaacaaagtaacatggccccaatgaatcaagagcaacagcccatgcaatttcagagtcagtccacagtttcctcacttcagaacccaggtcctacccagtcggaatcatcacagacccccttgttccatagctctcctcagattcagttggtacaagggtcacctagttctcaagagcagcaagtaactctcttcttatctccagcatccatgtctgccttgcagaccagtataaatcaacaagatatgcaacagtctcctctttattcccctcagaacaacatgcctggaattcaaggagccacatcttcgcctcaaccacaggctactttatttcacaacacagcaggaggcacaatgaaccaactgcagaattctcctggctcatctcagcagacatcaggaatgttcttatttggcattcaaaataactgtagtcagcttttaacctctggaccagctacattgcctgatcagttgatggccataagtcagccaggccaaccacaaaacgagggccagccacctgtgacaacacttctttctcagcaaatgccagagaattctccactggcatcctctataaacaccaaccagaacatcgaaaagattgatttgcttgtttcattgcaaaaccaagggaacaacttgactggctccttttaactggatataaattccacgaagaaaatcctgattccaagatgtcctgagatcttgtggttccatgagaattattactttaaaaacaaaacaaaatataaaaaactgtgtttgagtaaactgatagattttactctgactgcaaaagagcacacctatgctgcttgttgcagtaactaaccaccaatgttaacatcttcatattttatattcctaataacagtgatgactgagaatctatttgagtttccagctggcagaattaattgttattattttcctaggcgcaatttccttaaacgtacagtttaaattcaaggctggaccactcagttattattgctattagaaaataatatatcatgtttacttttgttcttcattattttctttcctgcattgttttagtcaagtaatggcttttgaaaaagtaaagttcaataataactaaggctgtgatttttttcaatataaaaggcacagctgttggccaaagtgaaggaatcttttttcagttttattggagaaactgaagggtaacattctaacaagtaaactgtatgtgcagataaaagtactcttgatttaacacaaaggcagatgatacacttataaaactgggaacagctggaatgcttcttgattttattttttcagagagttgttagttctctgggtttctactaaggggtttagccataactgtgcatagaaaaataattatctgtaaaaaatgaaggggataatatatgataaattatgttctgatatcctcctacagtagtttaaattgacagaaaaatttgaatgttttcttcttaacccagtcttaggctggtattccctttttatatatatctatattacttttcacctctttttcactttactttagagaactattaatatactactggcttcatgaccctgtagcatctttggccactttaatctagggtgacctagcaatcctgcagcacagggcagagagtactgtcttaggaattattaggagttgattcctgagaaacaacacatttttccccatgaacggtgctgttctgaagtcttcaaatttttccctctaataggaaacagtataaattttaattaaaaaaaaaaggcaaactaaaatttcttgaaatatcacttctccctgatctgcagtgagtataaattcacttgtcacctcagtgctttacagtttgaagtggtcacttacctgatggttcccacaagccttaggctttacagggttgtatcattgacttaaaatgaagaattaacttgtgttacatctataaagagcaaaataacacactccagaacttggcagttgtagcattagttatacagttttgggtgttcttgccacccgtgggatgcctgcttctcactaccacctgtgtctggacacatgcttatgtctcattttccttttggcatgtggaaagctgtcaatgcagtgtaaggccaacgtgtgtgtggcttctatgtgttgagataatgttttggtatccttgtccgtttcatttattttttaagtgtacaaaaaataacctgttaattgttgaaggctacttttctgttctttttttttttttttttctatcctgtacatttagttgaactgtgcggaattgtggtgttggttttgtttacacagccagatttttccttctttttgttttgtgatgatcttcctttgttctttgaatgtgctcttttgtctttttctcttttttctcatgttttcttccctccacctccacccctttctttctttctctctctgattgagaggcattgaattacgttttcagtagtacaggcttcttgccgatatgaagggaacttttcagaaagagacctactctgggtcatttaattttgaatacagttttcaatcgttcaagttttggatggtttatatctaatgtgtgtttcatttttttggaaagctatattttgtatttaggaaatggtatactattttgctatttgtactgagtgagtacattggcataaatatagaaatttatatatatacatatatataaactattcttttttgccacacatttttgtggtaaatttgtgagtttgtctgatgttctaccacaacgtggcgtctgataacagtgagggggggtggggtttgttatgtctttattgagtatttaagtatcttttgaaacaaatgacctgttcatctgtggccattccatcaggcagttagttccttgatgtcagtagtgggctaaaggcagcttactgtgtgtttgctggagctttcactcagccaagtgttagagtcaggaaacccattgaggcaatggcgtcaaatggtgtttcacaagaatgagccattcagtctttgctcactatatatttaatattttattattgttgttattgttattattaattggctttctgtattctatgccttttatttataaagacactaagaaaacccatgtttgtaattttaataacatttttcccatcttgtaatatccagagctactttataaattctctgaaccaaaagtattttcctcagtgtatctcttctcccccagcccctattgggaaaaattacccagtatagttcaggttatgaggaggatcagccacacaatccagtgcttcagtttgaaaatgtaaaattctaaccctaaagtagggttggttgaaatttcagacaaagcaaacccagcaggtataaaaagtagtataaatacaaatctgtaagttatttttgaattttctgaacttttttctaagagattacataggagactaaagaaatctatctgttcaagttctaattaggatgattgttaatactgcactgtggatgaagtggcgactggcttgtgtgctgacttctgtggtttagcaagaggtttattgttatcaaatgctaattggcaatgccaagtcactgggaccaattttctgttttataatatctaagtttagaacagaatatatacctgaactgtagtggtttgatcggatggagacagaaaacccgatttttattctcataaattttgtggttatttatacaagggctgtgctatgctaccatattcttgttcaataataataggtttgttgttttttttacattgttaaatgttccttacccctaaaggtcaatgttaagtacaacattctgaaaatacaatttggctacgaagagtattcatcttctttgaagctcagtggttgatatttgtgctaataatgcaatttcctgattactgttacaagttatagctacatatgggagagactcagtgagccagcaaaggccatagaaacaacaatttattaaatgtatttatggcagaaggacctaaataaactgtgagccaccttttcttctttatattgttacatttaagtgttcttgctttcagcaactcacattaatgcttggagcttatctctttctctctctctctctctctctctgtgtgtgtgtgtgtatgtgtgtgtgtgtgtgtgtgtgtttccttattgtcattccattatatatccacaccaacatgggtgacgataattcaaagtcatattttgcctctaagcttgatcatgttacctttatgattaaagtatcatgttatttagccaatgcaaatctgttttaaaacaaatagtttaaaaaaagaacaagtttttaagggctttattatagaagaagtattaatgaaggactttccttcctccctccctttcctcccctccctgcctcccttcttcccttccatctccccctcctccctgccttctttgtttctccttcccttattcctccctccctcctttctcccttccttcctttcttccattcatccttccttgccttttatttttattttttgtaatatcacatgtgctgtagtttggaattttattctagtgcatttcttgctcatcagaacctcagctaatctacctaggaaaaatagtatcaaaggaaatgagaaagttgtatctgagtccctccagaactaagataattctttttgaccatttaagcctttataaatgcgttttgaccatttaagcctttataaatgcttgttttaggaaagtgaatctgttagatgcatcaacaaataatgaccaggacaaaacgatttaataattaaagtctcaaatcaccatggttatacattttcaccagaaatagtaatcttacaatttttcatttttctgatgaagatttctgttccaatatctgtttcctaatagattttttaaattaattagctttcctctgctttatgaccacaggttttatccctaaccgagacagctgtcttatatctgcatgccttagactgtgtggagggactccatgaagaaagaccataggttagaaaaataactcatagtatataccctagtaagtgggttagtagaatctcataacatgtattaaaaagaggttttcttctctgcttgtttgtgtcactagagcaaaattgtagagataatgctcataatgcagtaaatatcagaataatatctacaatatcatttgtggatggtcccaggtcccagtgctctagttactttacttctttttttttttttgagatggagtcttgctctgtctctcaggctagagcagtgtgcgatctcagctcactgcagcctccacctcccaggttcaagcgattctcctgcctcagcctcccaagtagccaggattacaggcaccctccactaggcccggctaattttttttgtatttttttagtagagatggggttttgccatgttggccaggctggtttcgaactcctaacctccagtgatccacctgcctcggcgtcccaaagtgctaggattacaggcatgagccaccacatccggcctaattacttctttaatccccatttatttttatgccattctagcctcatttattaataaaattatgtttttactttctctttcaggaaattttttaaattaatattttatatctagatctaatgctatggaaaagtgcctttttatcatttataatttcatttttcactatttccaaaaacacataaacaaatagtttcagtaggtcccagcttttactttttccatttaaaccttcttttctccatttcttccctttggcttaagaataaaagaaaaggtacattgctagaattgtttctttgggagagggtaaaagattacagaattagactgttcagcctttatataaactaaatttgtcttcatctcaaccagctaatggtaggtcttatctgaatactcatgagaattttagcatctgtgaaactccatgcaccagatgtgtgtaaatttcaggaagaaagtgttgaaagcattttctctgatgttaattagatggaaataaatcactaaaacatagtttaggtaaagcctgattatgccacttttttttaactagacagggcaaagttgtttatgttagtgtacttcttgtctatcctcagttaatttacctagacaaaaagtgtcaaaggaaatgagaaaaaggttatatctgactccctccagacctaagataattccttttgatcagatacagtcagatggagtgccttggtttttgttaattttgcctctattccagctccttaccacagcggtggtgcttaaagaaaggatcatcagcaacaggtcaggatagttctacctttgggatagggctgctttccccgtgctagtatttctgtgactgttagtggcactgaggactgcaaacttttatgcaatattcttaataccctattgatattatgcactttaatcattccaaagaagccaagaatgctgtatagtgatgattccttcctaatgaattcatcttaactatttagaatgttatgtcccttttcttttggatagccaacttggtataaatgttatatggatttttctaaaatgactatataggacttaagactttgaaatgtaatttacttataaggggaaataattatgctttagcacatcattttagaaacgtcacattttagaaacattcagcttgctaacctacatgtttgggaattcattaaaaccagttgtctatatattttgtgccatgtatataagaacattacaatatatctttttctacatatgtagtatgtgcaaccagtggttctcagagtatggttctcagcccaccagctagtatcagtatcacctgggaactagttagaaatgtaaattctttggccccatcccagacatactgagtcagaaactctggaatagggcccccgcaatctgttttcacaagccctccaggtgattctgatgcacactttaaagtttaggaaccactgggctaagactctgttgagatatagagtttttcttccactcagactgatatagttatacattgttcttcatgtaaattcagcttaacctggttatctataatcttttattggcaaaagttaattctcagtactgcctatagagatacagtgtattttatgtacatacacaattagtctaattcttgataattcagttaatttagtttggcattttcctaccacttactaaaaggtttacattaaatgactgatttaaatatataggtgcaatgttctatgtttattttaattgttatgacatttaagtagctaatataattgaccggtgctaaagtctcctgtttatccataaaatgggtacattatgggcagtgtaatacaagctttcttttcattgcctagtactttaccagcagaccacagttttgccctggctagaccaaccctcagaacaaaatcatcattccttgtatttatatttgtatctgagatagtaaacaagatggctggccaggtcaacatggcaccttaacttatttttttaataggtaaaacttcttcaaaagtagcttgctttgtataagaactaagctatcagtatagatatagctatccttggagcttatgtttcagacaagaattatttactaaaataaataataaacaagataatgcattatacaatttgggcatttctcgtttctcaagtgtatgcatcatggtaaatataaactaaccacaagataggtagattgattcatttcattttaatctccttgtgtaattcagtacctccataattgttctaatcttcttcccactgtttacaaattaccagttaattaactcgtgaaagaaaaattcacatatcagaataaaaataaatgtatactcactttataaaaatcaccactgctgtctttccttaatactagcagtggaaatgtaagtggcttactctacaaattttggtgctggcaaatacataggcaaactgttgggagctgctctagttacattcctcccttcttattccctttttctcttcctcactttattgcataacatattcctgtacccaaagcattctaccacagttctatttgactcccacttgtaataactcctttaaaaaattccatgtttaaccatatgaccctgcttgcttactcatattctccctccctctccccttcctttctctctcttccagaagtcatttgcctggtttgaaatattttgtagggattgcttattatattattttagctgatgaacctcaggacaacgtctacacacacacacatacatacacgcacacaaaatctcagctgttgaagagtgggcttggaatcagacttctgtgtccagtaaaaaactcctgcactgaagtcattgtgacttgagtagttacagactgattccagtgaacttgatctaatttcttttgatctaatgaatgtgtctgcttaccttgtttccttttaattgataagctccaagtagttgctaattttttgacaactttaaatgagtttcattcacttcttttacttaatgttttaagtatagtaccaataatttcattaacctgttctcaagtggtttagctaccattctgccatttttaatttttatttaattttatttgcttgagcacactgatcaaccactgaactgccttcttccattgtcctgcaatgatataagggttacatttttgtgtatatggctttcatagttgggatttcagagcactgataccagatattttcagtttgttctctgggggaatttcatttgcatctatgtttttagctatctgtgataacttgttaaatattaaaaagatattttgcttctattggaacatttgtatactcgcaactatatttctgtaaacagctgcagtcaaaaataaaacactgaaagttaaaaaaaaaaaaaaaaaaaa

SEQ ID NO: 31439 - DNA, 5799 bp, Homo Sapiens
cgacggagcggccctggctgcagcctcccggcgccagcgaagacaggctgagatgcggctgctcctgctcgtgccgctgctgctggctccagcgcccgggtcctcggctcccaaggtgaggcggcagagtgacacctggggaccctggagccagtggagcccctgcagccggacctgtggagggggtgtcagcttccgggagcgcccctgctactcccagaggagagatggaggctccagctgcgtgggccccgcccggagccaccgctcttgtcgcacggagagctgccccgacggcgcccgggacttccgggccgagcagtgcgcggagttcgacggagcggagttccaggggcggcggtatcggtggctgccctactacagcgccccaaacaagtgtgaactgaactgcattcccaagggggagaacttctactacaagcacagggaggctgtggttgatgggacgccctgcgagcctggcaagagggatgtctgtgtggatggcagctgccgggttgtcggctgtgatcacgagctggactcgtccaagcaggaggacaagtgtctgcggtgtgggggtgacggcacgacctgctaccccgtcgcaggcacctttgacgctaatgacctcagccgagctgtgaagaatgttcgtggggaatactacctcaatgggcactggaccatcgaggcggcccgggccctgccggcagccagcaccatcctgcattacgagcggggtgctgagggggacctggcccctgagcgactccatgcccggggccccacctcggagcccctggtcatcgagctcatcagccaggagcccaaccccggtgtgcactatgagtaccacctgcccctgcgccgccccagccccggcttcagctggagccacggctcatggagtgactgcagcgcggagtgtggcggaggtcaccagtcccgcctggtgttctgcaccatcgaccatgaggcctaccccgaccacatgtgccagcgccagccacggccagctgaccggcgttcctgcaatcttcacccttgcccggagaccaagcgctggaaggcagggccatgggcaccctgctcagcctcctgtggaggaggctcccagtcccgctccgtgtactgcatctcgtctgacggggccggcatccaggaggccgtggaggaggctgagtgtgccgggctgcctgggaagccccctgccattcaggcctgtaacctgcagcgctgtgcagcctggagcccggagccctggggagagtgttctgtcagttgtggcgttggcgtccggaagcggagcgttacttgccggggtgaaaggggttctttgctccataccgcagcgtgctccttggaagaccggccacctctgactgagccctgtgtgcatgaggactgccccctcctcagtgaccaggcctggcatgttggcacctggggtctatgctccaagagctgcagctcgggcactcggaggcgacaggtcatctgtgccattgggccgcccagccactgcgggagcctgcagcactccaagcctgtggatgtggagccttgtaacacgcagccctgtcatctcccccaggaggtccccagcatgcaggatgtgcacacccctgccagcaacccctggatgccgttgggccctcaggagtcccctgcctcagactccagaggccagtggtgggcagcccaggaacacccctcagccaggggtgaccacaggggagaacgaggtgaccccaggggcgaccaaggcacccacctgtcagccctgggccccgctccctctctgcagcagcccccataccagcaacccctgcggtcgggctcagggccccacgactgcagacacagtcctcacgggtgctgccccgatggccacacggcatctctcgggcctcagtggcaaggctgccctggggccccctgtcagcagagcaggtacgggtgctgccctgacagggtatctgtcgctgaggggccccatcacgctggctgcacaaagtcgtatggtggtgacagcaccgggggcaggcccaggtcaagggcagtggcttctacagtccacaacacccaccagccccaggcccagcagaatgagcccagtgagtgccggggctcccagtttggctgttgctatgacaacgtggccactgcagccggtcctcttggggaaggctgtgtgggccagcccagccatgcctaccccgtgcggtgcctgctgcccagtgcccatggctcttgcgcagactgggctgcccgctggtacttcgttgcctctgtgggccaatgtaaccgcttctggtatggcggctgccatggcaatgccaataactttgcctcggagcaagagtgcatgagcagctgccagggatctctccatgggccccgtcgtccccagcctggggcttctggaaggagcacccacacggatggtggcggcagcagtcctgcaggcgagcaggaacccagccagcacaggacaggggccgcggtgcagagaaagccctggccttctggtggtctctggcggcaagaccaacagcctgggccaggggaggccccccacacccaggcctttggagaatggccatgggggcaggagcttgggtccagggcccctggactgggtggagatgccggatcaccagcgccacccttccacagctcctcctacaggattagcttggcaggtgtggagccctcgttggtgcaggcagccctggggcagttggtgcggctctcctgctcagacgacactgccccggaatcccaggctgcctggcagaaagatggccagcccatctcctctgacaggcacaggctgcagttcgacggatccctgatcatccaccccctgcaggcagaggacgcgggcacctacagctgtggcagcacccggccaggccgcgactcccagaagatccaacttcgcatcatagggggtgacatggccgtgctgtctgaggctgagctgagccgcttccctcagcccagggacccagctcaggactttggccaagcgggggctgctgggcccctgggggccatcccctcttcacacccacagcctgcaaacaggctgcgtttggaccagaaccagccccgggtggtggatgccagtccaggccagcggatccggatgacctgccgtgccgaaggcttcccgcccccagccatcgagtggcagagagatgggcagcctgtctcttctcccagacaccagctgcagcctgatggctccctggtcattagccgagtggctgtagaagatggcggcttctacacctgtgtcgctttcaatgggcaggaccgagaccagcgatgggtccagctcagagttctgggggagctgacaatctcaggactgccccctactgtgacagtgccagagggtgatacggccaggctattgtgtgtggtagcaggagaaagtgtgaacatcaggtggtccaggaacgggctacctgtgcaggctgatggccaccgtgtccaccagtccccagatggcacgctgctcatttacaacttgcgggccagggatgagggctcctacacgtgcagtgcctaccaggggagccaggcagtcagccgcagcaccgaggtgaaggtggtctcaccagcacccaccgcccagcccagggaccctggcagggactgcgtcgaccagccagagctggccaactgtgatttgatcctgcaggcccagctttgtggcaatgagtattactccagcttctgctgtgccagctgttcacgtttccagcctcacgctcagcccatctggcagtagggatgaaggctagttccagccccagtccaaaatagttcatagggctagggagaaaggaagatggactcttggcttcctctctctggctggcaaagggagttatcttctggaatacattagctctttcaaaaacccacccagtgtttagcctcaacggcagccagttaccagcttctctctgtagccttcagcagtgtttgcatctctgacataaccacaggctgctgttttcaagaagagcaatctgtttggataagaaaaacctttactttacagcttccctttataatttgttacacaggaatagttaaatgcatttgtttgtttgttttttgagacagagtttcactcttgttgcccaggctggagggcaatggcgcgatctcagctcactgcaacctccgtctcctgggttcttgattctcctgtgtcagccttctgagtagctaggattacagatgcctatcaccatgcctgggtaatttttgtatttttagttgagatggggtttcaccatgttggccaggctggtctcgaacttctgacctcagatgatctgcccgcctcagcctcccaaagtgctgggattacaggcatgagccaccacgcccagccatcaatgcattttttttattttttttttgagacagagtttcgcacttcttgcccaggctggagtacaatggtgcgatcttggctcactgcaacctccacctcctgggttcaagcgcttctccagcctcagcctcctgagtagctgggattacaggtatgtgccaccatgcctggctaattttgtatttttagtagagacggggtttctccatgttggtcagactggtcttgaactcccgacctcaggtaatccgcccgcctcggcctcccaaaatgctgggattagaggtgtgagccactgtgcccagcccatcaatgtgttttaaagctagctgtcagggttccacttaatttaaagctgggcagggagatgtgtaatgatttcaaagttaacacctgtttgttttctaaagggcatgccaagtcctgctgtatcagggaagtattctgtgctaaaatcagcgatggttcattgctctagtctctctcacccttctaggcagtgcatcagtcagctctaaatctggtgcagagggttaacagcataacccttgttggcaaaatggaatagatgttaagacctcaaatagggatttgggatgaaacagctgcagttagcactgttatctgagcatgaaagaactggaaacgctccttacgtcgagatgttggaccttgaagccctcctgaggccaacatgcaaatctggctgtgacggttcatctgacacctgtgtaaagctgaccagcctgctctgtacagtgacaatgaggagcccctctcttccttaagtaggaatctgtgaagcaaaatgtttgctgccaaagacaaatcagactgtcagtcattaaaaacagcattagcaggatgaggatagcaatggggaagggttgtgggcaatgcagtaacagggaaatggcttcagaaatggtttgagttggaagacaacattcttcatctctcaggacttctaattccttgatgctaaaagaagaggcatggattctatgagcttccaagtccctttccactttaaccttctacaaatctttcagaggactgcctagtagcaaaggttattcctggacacaggaaagacgggcattacagggaccaaagctctgaaaggtgacttttattaccaacacactggctggaaaagggacaaaccacatcacgggtgagtgatacttctcagtcttctctactcattcaacaaaggaaatgtgggctggggcagaggtcttttttcatttaatactggaaaaatattgaagagcatccatgttcacttatggctggttttgctatagaaattggaaaataaaggccacttttttgaaatccccagtttaattaaaaaaaaaaaaaaaaaa

SEQ ID NO: 31440 - DNA, 4534 bp, Homo Sapiens
gggggcagcggcgccgcagcctgggctggcggaacctcgcgctccgactcgccccccgcctgtagctcggtcggcgttgcgggcaggcgccgctccgctggggattgctatgctatgccttgtatgactaagacctcttaccaagaatacgtgtcagaccataaaaccactgccaaggagtgcgggggtggcaatgaaacagcccaacaggaaaaggaagcttaatatggattccaaagagcgtttggatcaggacggacgcttggagcaagctgaagaggaaaagaagcccaaggatagcacaacccctttgagtcacgtcccttcagcggctgcacagggagcatggtcttgggagtggtacttgaaagaacagaaggctgtcgcagcacctgttgagctgttttccaaggatcagtcctttccagagcatgaaaatggttttcagattggaatgagattagaaggcattgatccccgacatccatcggtattctgtgtgctttctgtagcggaggtttgtggttaccgtctaagacttcattttgatggttatttaagttgctatgatttttggaccaatgctggttcccctgacattcatccagtaggatggtgtgaaaagaccaaacatgaactgcacatccctaagggttatagaaaagataaatttgtttggatggattacttgaaggcctgcaaattgcaaaatgctccaaagaaattattcagaaacagaagtcctaatgggccaatgtctaaagaatttcaggttggaatgaagctggaggccgtggacaggaagaacccttccttggtgtgtgtggcgaccatagcagatattgttgaagatcgcttactagtgcattttgacaactgggatgatagttacgattactggtgcgatgttaatagcccttatgtccagccagttggttggtgtcaggagaatggaagaactctgatagcaccccaaggttatcccaatccagaaaatttttcctggacagaatacctggaagctactcaaaccaatgcagttcctgccaaagtttttaaaatgaggttgcctcatggttttctgccaaatatgaaacttgaagttgtggataaacggaaccccaggttaattcgtgttgctacgattgtagatgttgatgaccaaagagtaaaggttcattttgatggttgggaccataagtatgactactgggtggaggcagacagccctgatatccacccgatcggatggtgtgatgtcacagggcatccactggaagtgccacagcgaacgaatgacctgaagatccttccaggtcaagctgtctgtcctactcccgggtgccgaggaataggccatatccgtggtccacgttattcgggacatcacagtgcttttggctgcccgtattcagacatgaacttgaaaaaggaggcaacacttcacgatcgtttgagagaacaaacacaggcaaatttggaatcagactcttcacattcaaaatcaaaaagcctctgtagtttgaacttcaatggaaaacatgaaaaggtgaacagtcagcccagacttgtacagcaggcaaagtgtttgaaaatcaaaggaaaagaagatattgacttggataatctcttcagaggccgagtgcggtggctcatgcctgtaatcccagcactttgggaggccgaggcaggcagatcacgagatcaggagatcaagaccatcctggccaacgcagtgaaaccccgtctctaccaaaaatacaaaaaattagccaggcgtggtggcgggtgcctatagtcccacctactggggaagctgaggcaggagaattgcttgaacctgggaggcagagattacactgacctgagattgcaccactgcactccagcctgggcaacagagcaagactccgtctcaaaaaaaaaagaaagaaagaaaaaatggtggaaagggtggagaaattccttttaatgggtacaaaccacacaatgcaggtgaccattactctaaaagcccaggcttcatcactatgcaatatatctgtgtaacaaaactgtacttgtgcctgctaaatctgtgaaattaaaaaaaaaaaaaaccatgaatctgatttgcctttagtcaccagatgactgcagataggcacacagaggtgtgagacagcactttccatttgcccttcatctcttgttcctctgccattccccatgaagccgtgctggggctgacctgctggaggatgagacctgtgaagctgagtcagctgccctggtcatcccagccaaggccatgtcctctctgctcagccaacaactgtccaacaaacatgtgaatgagccctgctgaaatcagaactgaccggcccacctgagcctaaattcctgacaaacagatgtgtgaactaagtaaatacttaaaaaaatgagatgctgatggtccctgaatttctcaagaggcaaagaatggtcccacctcgcaacttataaatgttcagaagttagacggccacaaagaagtagcacctcatatacattctcttgctatctacaataaggtgaaggaaggcatttatcttctctgcaaccagaaaacctataacccaaatgcccaggaacacaagaacactgttcaccattctgctgtgcttattagcagaagatatatcagctcacaaaatcccctttgaaacagaaactaaaataatgctcaatgatcattctactcccacgggggaggagggagaggagcataaatcaggacaagagctgggtttagaacttggatcacgtgtggcttttctccatgatcacaaaccccagcttcctataattaataattggatgtattaagtgttttatggagcagtccagccagagagcaactataaaatggaaacatggaccagcttggtaaagggaaagatgaaattgtagaattaatttgtttgttcgttcattgagtatttcataacaataaacttattgtatttataaagggaaaaacctctgggtgtaatttggctgcctggttgtttatatcctacagtgcagtttcagtatgtttcatgttagtgtgcctgttttaaaatgttttacttcattatcgtaagacgtttttaatgcaatgaaacttcaagccagaaaaatcttagaaaattaacgaaatagggagtagagagaaatggagatagcattaaactaaatacaaagaaaaaattgaaacaaatttttttatttgacaaaaattagccgggtgtggtggcaggcacctgtaatcccagctactcaggaagctgaggcgagagaatcgcttgaacctgggaggtggaggcagtgagctgagatcgtgccactgtacatcaccagcctgggcgacagagtgagactccttctccaaaaaaaaaaagagtctcttcattaaaataaacctaatacttcacttgtttagtaaagcaatgcaaattaatacctgatgataaagtcagaagatgtatatatgtttgtgttcctgctttctttcatttcacagtctaattctcccagactaggatttttgctagctatttgttctatcacccagaattttgagaaggcttaaaagcatattattgatttgtgcatttggtgcaaaattcaacaggtataagggggtatctctccctgaacctgatcctcagccttcagtttcctcccttggaataatcactgtatacttctcttgtgtgtctttctaaaaatatgttctgtttatttaaatatatgtgtgtatgtgtatttacacaagtgatggcataccacatacattgttaaacagtttcctcgtgtcctttagcaataaaatctgacgagcagttcttaacacatggagcggcacactataagtgaccagtccctgcccatggccatctggatggttttcatgttgctgtgtaaaggaggcttcaaagtgtcttctgtaggtgtcagcttgactggaaaataaaaagtgtcttctgtactcatcactcatgcttgtgagaatctacaggatagattctgtgtgtgaatctatcctattctaatccttttcggcatttcctcagctacccttactcgttcatttttccaaatgaactttaatatcagtttttctggtacaacttttttccattccagttggttaatttttggattgcaataaatttatgatttaacttttaattttaccctttgtgaacttgaccatagtaagctgttcccatactcaaatatttcctgtcctgtaattgcattttaagttttcctttatgtagaacttgcgtccttcttacgaagtttattcctaagcagtttatcgtttttgttgctgcaataaatggacgtatttcttccttgatgtcctccacctaagattgtctgtatggaaagattgtatatttctgtgtattacatttaatcctgccactgtaatctcttctaatttgtaatttttttcatgtaattattttgggtttctaggtaaataaacatgtcacctacaaaaaaaaaaaaaaaa

SEQ ID NO: 31441 - DNA, 3005 bp, Homo Sapiens
cagtggtggaagaagaggcggcggcggcgggggtagggagcctggaaacgcgagcggggatggtaggtggtttggacccgccgggccgccgtcgtttccagaaagggtttgactggaggaacctctggagcagctgttggctggctcctctggctgatggcatgttgaggtacatgggccagcggcagcgagggcatccaatccagaggggtccactctagaggccaggccaccagcaccatgggccagtgtgtcaccaagtgtaagaatccctcatcgaccctgggcagcaaaaatggagaccgtgagcccagcaacaagtcacatagcaggcggggtgcaggccaccgtgaggagcaggtaccaccctgtggcaagccaggtggagatatcctcgtcaacgggaccaagaaggccgaggctgccactgaggcctgccagctgccaacgtcctcgggagatgctgggagggagtccaagtccaatgccgaggagtcttccttgcaaagattggaagaactgttcaggcgctacaaggatgagcgggaagatgcaattttggaggaaggcatggagcgcttttgcaatgacctgtgtgttgaccccacagaatttcgagtgctgctcttggcttggaagttccaggctgcaaccatgtgcaaattcaccaggaaggagttttttgatggctgcaaagcaataagtgcagacagcattgacggaatctgtgcacggttccctagcctcttaacagaagccaaacaagaggataaattcaaggatctctaccggtttacatttcagtttggcctggactctgaagaagggcagcggtcactgcatcgggaaatagccattgccctgtggaaactagtctttacccagaacaatcctccggtattggaccaatggctaaacttcctaacagagaacccctcggggatcaagggcatctcccgggacacttggaacatgttccttaacttcactcaggtgattggccctgacctcagcaactacagtgaagatgaggcctggccaagtctctttgacacctttgtggagtgggaaatggagcgaaggaaaagagaaggggaagggagaggtgcactcagctcagggcctgagggcttgtgtcccgaggagcagacttagtggctctgtcccaggagcagcagcaaggatctgccagctgccctgcagccaactgaggaattggaccattttggaaattaccgaagatccggatattttctactttacacctttctctgccttgtatctgaaagggctctaaaatgctgtatcatgttttaggcactttcttcatttttttggttattttggttatttcctttttggggggatctcccagaatatttgaacctggttacatgttgtgtatctttttttgaagccttcagatagaataagcctgccatttcttgcacaaatttaggttttttttttgtttttttttgttttttttttttttttttggtaggggagggcatagagcagggcggggggatgggactgttaggttgaattaacattacaaaatgatacagtgccagatctcagtttcgcatattgtttttcagggcaggtctgtactgtgtgtagtgctgtttacatagatgaatttaggttgtaataattatttttaaagatttacacagatttgaatagcagtgttaactgttaaccacattgcattaattcccaggcgatttagagctcttggagagccaaggccagccaagagcatttgtagtctggtgacaacccccttttaagctaatttatccagaaccctgatttccctcacttcttgctcattccttctttgacctattgcatttcatgttgagtttttccatcaacatgctgcacctgtcagtcaagtgagcattttttaagaacacattgtactgagaaccacttaagcattgaatgcggagaaagcagtgctacctcagttttgctggaagtagacttctttgatagttttctttctttgatgaagtttctgtattttcatgttgtaagtggaaatacttttttttgtttgtttgtttcatttgccttggagccaaagtttctgttcctggtggtcgggaaactgcctgccggccaactgacttgaaggaaaactgtggtatggagctctgcttgaatttttttttttttaatatttttatttttttctttgaatatcatcagcttacttgtctggcaagggcagaagcctggggttggcctgaactctgccaaacaaatatcaaagtgtatttaatagttaaatttgtgccctttcccttcttgctgcacccatgttgtcacttaacccccaggagttatttattatctttttgttaaagtcaggctcatttggggtaatgtgatgactgtttaggtttacatgaccctcctctcctttccctacccccaaatatgtatatatacatatataaaatatgtatatattttacctatataaaatatatatatatacacatatatgtatctatattcctttgtttctttgcctgcttatactggccataaaagagggagctgccttcaatgtataaagtataagaagagtgccagggaatgccataatggaggcttttggatctgaatttggaccatttcactaaagagaacatgagtttgctcagccctttcctcacaagagggagggccccggttccccagacttctccacgcgctggctccataaaggccagctttggccaggctgccacaggggcctgaggagctcactctgggcctacctggtttcagttagagggtcctcctgttatttttccatttaaaaagtatgtcctcagaaaactgtactggaaggatgggtggcaggaacttgtatagttcagcttccaacactttggaacagattaaaaagggaatcttttaaataaaaacgtataaaaataaaaaaaaaaaaaaaaaaaaaaaaaaaaaaaaaaaaaaaa

SEQ ID NO: 31442 - DNA, 1131 bp, Homo Sapiens
gtttaggggtgggatcgggtcgggatccggaccagccaaggaagggtccaggtgccgcggatcttgagaaggaggcgtggcctggcgctgggattggcgccggatgcaccccgggttgtggagtttggggatcctcatccggcgccctctccccttccaggagtgcacagtctgcgggtggaccggggaaagaagacgtacttcatcgtcatgcagagcgtcttctaccccgccggccgcatctccgagaggtatgacatcaaaggctgcgaggtgagccgctgggtggatcccgcccctgagggcagcccccttgttctggtgctgaaggacctcaactttcagggcaagaccatcaacctggggccccagcggagctggttcctccgccagatggaactggataccaccttcctccgggagctcaacgtgctggattacagcctcctgatagccttccaacgtctccacgaggatgagaggggcccgggcagcagcctcatcttccgcacggccaggtctgtgcaaggggcacagagcccggaagagtcgagagcccaaaaccgccggctgctgcccgacgcccccaacgccctacacatcctggacgggcccgagcagcgctatttcctgggcgtcgtggatctcgccacagtctacgggctccgcaagcggctggagcacctgtggaagacactgcgctacccaggccggaccttctccactgtcagcccggctcgctacgcccgtcgcctctgccagtgggtggaggcgcacacggagtgacgggcgcccggccccactctccggatctggacgatgggctcacgccaggaacgccggttcccccgggcccgggcatctcgcctgcgcttcctcctgatggtcgccagagggcagcatcccctaactaataccgtaaccgcgcagtcccgtttgacggtggtgccgtgcccagcatcgtgccaaggactcccctactttagctcatttaatcctcaaaaaatgctattattctctttttacagaccatgaaatggaggctcagggggtgaagggactgatcaagatcattcagcaataaatgctggaaccaggactcaaaaaaaaaaaaaaaaaaaaaaaaaaaaa

SEQ ID NO: 31443 - DNA, 2158 bp, Homo Sapiens
atgaacagcaggttctcctaggctttgaacaaaatttagcttctccaaggccaaaagcctcattgtgaagagaaagaaaggtatagcagtcttggcagttgctgaactgaattcctggctgatttccttactgcataaactcaactgctctcactgaggtcgtcattaagtcctgtgtgtgtttgggcaggccgacttgatttacagccagcactccactgcggaaacggcttacaaaatatacagatcttggtagacaacgtggctgcaggctgttgaattggaattccctgtggctgtccgaaggcagggtgtccggagagcggtgggctgacctgttcctacaccttgcatcatgccagctttgtcaacgggatctgggagtgacactggtctgtatgagctgttggctgctctgccagcccagctgcagccacatgtggatagccaggaagacctgaccttcctctgggatatgtttggtgaaaaaagcctgcattcattggtaaagattcatgaaaaactacactactatgagaagcagagtccggtgcccattctccatggtgcggcggccttggccgatgatctggccgaagagcttcagaacaagccattaaacagtgagatcagagagctgttgaaactactgtcaaaacccaatgtgaaggctttgctctctgtacatgatactgtggctcagaagaattacgacccagtgttgcctcctatgcctgaagatattgacgatgaggaagactcagtaaaaataatccgtctggtcaaaaatagagaaccactgggagctaccattaagaaggatgaacagaccggggcgatcattgtggccagaatcatgagaggaggagctgcagatagaagtggtcttattcatgttggtgatgaacttagggaagtcaacgggataccagtggaggataaaaggcctgaggaaataatacagattttggctcagtctcagggagcaattacatttaagattatacccggcagcaaagaggagacaccatcaaaagaaggcaagatgtttatcaaagccctctttgactataatcctaatgaggataaggcaattccatgtaaggaagctgggctttctttcaaaaagggagatattcttcagattatgagccaagatgatgcaacttggtggcaagcgaaacacgaagctgatgccaaccccagggcaggcttgatcccctcaaagcatttccaggaaaggagattggctttgagacgaccagaaatattggttcagcccctgaaagtttccaacaggaaatcatctggttttagaagaagttttcgtcttagtagaaaagataagaaaacaaataaatccatgtatgaatgcaagaagagtgatcagtacgacacagctgacgtacccacatacgaagaagtgacaccgtatcggcgacaaactaatgaaaaatacagactcgttgtcttggttggtcccgtgggagtagggctgaatgaactgaaacgaaagctgctgatcagtgacacacagcactatggcgtgacagtgccccataccaccagagcaagaagaagccaggagagtgatggtgttgaatacattttcatttccaagcatttgtttgagacagatgtacaaaataacaagtttattgaatatggagaatataaaaacaactactacggcacaagtatagactcagttcggtctgtccttgctaaaaacaaagtttgtttgttggatgttcagcctcatacagtgaagcatttaaggacactagaatttaagccctatgtgatatttataaagcctccatcaatagagcgtttgagagaaacaagaaaaaatgcaaagattatttcaagcagagatgaccaaggtgctgcaaaacccttcacagaagaagattttcaagaaatgattaaatctgcacagataatggaaagtcaatatggtcatctttttgacaaaattataataaatgatgacctcactgtggcatttaatgagctcaaaacaacttttgacaaattagagacagagacccattgggtgccagtgagctggttacattcataactaaaaaaaaaaaaaaaaaaaaaaaaaaaaaaaaaaaaaaaaaaaaaaaaaaaaaaagaaaaaaaaaaaaaa

SEQ ID NO: 31444 - DNA, 2810 bp, Homo Sapiens
acttggctctgcctccgctgactctagcgccatggcccggcacctgctcctcccccttgtgatgcttgtcatcagtcccatcccaggagccttccaggactcagctctcagtcctacccaggaagaacctgaagatctggactgcgggcgccctgagccctcggcccgcatcgtgggggggctcaaacgcgcagccgggcacctggccttggcaagtgagcctgcaccatggaggtggccacatctgcgggggctccctcatcgccccctcctgggtcctctccgctgctcactgtttcatgacgaatgggacgctggagcccgcggccgagtggtcggtactgctgggcgtgcactcccaggacgggcccctggacggcgcgcacacccgcgcagtggccgccatcgtggtgccggccaactacagccaagtggagctgggcgccgacctggccctgctgcgcctggcctcacccgccagcctgggccccgccgtgtggcctgtctgcctgccccgcgcctcacaccgcttcgtgcacggcaccgcctgctgggccaccggctggggagacgtccaggaggcagatcctctgcctctcccctgggtgctacaggaagtggagctaaggctgctgggcgaggccacctgtcaatgtctctacagccagcccggtcccttcaacctcactctccagatattgccagggatgctgtgtgctggctacccagagggccgcagggacacctgccagggcgactctggggggcccctggtctgtgaggaaggcggccgctggttccaggcaggaatcaccagctttggctttggctgtggacggagaaaccgccctggagttttcactgctgtggctacctatgaggcatggatacgggagcaggtgatgggttcagagcctgggcctgcctttcccacccagccccagaagacccagtcagatccccaggagcccagggaggagaactgcaccattgccctgcctgagtgcgggaaggccccgcggccaggggcctggccctgggaggcccaggtgatggtgccaggatccagaccctgccatggggcgctggtgtctgaaagctgggtcttggcacctgccagctgctttctggacccgaacagctccgacagcccaccccgcgacctcgacgcctggcgcgtgctgctgccctcgcgcccgcgcgcggagcgggtggcgcgcctggtgcagcacgagaacgcttcgtgggacaacgcctcggacctggcgctgctgcagctgcgcacgcccgtgaacctgagtgcggcttcgcggcccgtgtgcctaccccacccggaacactacttcctgcccgggagccgctgccgcctggcccgctggggccgcggggaacccgcgcttggcccaggcgcgctgctggaggcggagctgttaggcggctggtggtgccactgcctgtacggccgccagggggcggcagtaccgctgcccggagacccgccgcacgcgctctgccctgcctaccaggaaaaggaggaggtgggcagctgctggaatgactcgcgttggagccttttgtgccaggaggaggggacctggtttctggctggaatcagagactttcccagtggctgtctacgtccccgagccttcttccctctgcagactcatggcccatggatcagccatgtgactcggggagcctacctggaggaccagctagcctgggactggggccctgatggggaggagactgagacacagacttgtcccccacacacagagcatggtgcctgtggcctgcggctggaggctgctccagtgggggtcctgtggccctggctggcagaggtgcatgtggctggtgatcgagtctgcactgggatcctcctggccccaggctgggtcctggcagccactcactgtgtcctcaggccaggctctacaacagtgccttacattgaagtgtatctgggccgggcaggggccagctccctcccacagggccaccaggtatcccgcttggtcatcagcatccggctgccccagcacctgggactcaggccccccctggccctcctggagctgagctcccgggtggagccctccccatcagccctgcccatctgtctccacccggcgggtatccccccgggggccagctgctgggtgttgggctggaaagaaccccaggaccgagtccctgtggctgctgctgtctccatcttgacacaacgaatctgtgactgcctctatcagggcatcctgccccctggaaccctctgtgtcctgtatgcagaggggcaggagaacaggtgtgagatgacctcagcaccgcccctcctgtgccagatgacggaagggtcctggatcctcgtgggcatggctgttcaagggagccgggagctgtttgctgccattggtcctgaagaggcctggatctcccagacagtgggagaggccaacctcctgccccccagtggctccccacactggcccactggaggcagcaatctctgccccccagaactggccaaggcctcgggatccccgcatgcagtctacttcctgctcctgctgactctcctgatccagagctgaggggctagggtcccagcaccacttcccccttctccaccctctacttcccgcccagtggggctggaatgtggcccagccggctggaacctcaagggccccacccaccgagattgcagcggctctggctaattgggcctctgtgcccgggctattttgaacccaggaatccttgggggtggtgggaggagcggacaataaaggtgtaaacac

SEQ ID NO: 31445 - DNA, 3263 bp, Homo Sapiens
aactttgcaacccgagcgcgcacgctctgcgctcggccctgccagggcggcacgggagggcggcgcaggaggtgggacctgcgccgggaaggctccgggacgccagcgcacgcggagcggggaccccggagagccagcaggcgagaagaccggccgagggagagccgatcgcgcctcgagagatccgaggaagtggtcgcgggccgggaggctcccgtgccgagccgaggccaggggtctggggtcgcagcccggcgtgcctgcagctgccgtcgctcgggagcagcagctgtgcccgggatcccggcggcggcgggggaaggaggagctgcagctggactgtggcagctggagggagagggccgggctcccctggcggagccgcgctgggacgactggctgaccgcggccatgcagtcttgacggagtcgctcgggcgcaggggagcagccgcgggcgcgccctcccgggaaggggcaccggagcgcaggcagcagcactttatctgcgactctccagcccagcgagaggcgaagcggtttaccatggaacccgtgaccaagtggagccccaaacaagtggtggactggactagagggttggatgactgcctgcaacaatatgtccacaagtttgaacgagagaagatcaacggcgagcagctgctgcagatttcccatcaggacctggaggagctgggggtcacacggatcggacaccaggagcttgtgttggaggctgtggaccttctctgtgcactgaattatggcctcgaaactgataatatgaagaacttggttctgaaactgagagcatcttcccacaatttacagaattacataagtagccgacggaaaagtcccgcttacgatggcaacacctcccgcaaggcccccaatgagttcctgacctcggtggtggagctcatcggcgccgccaaggccctgctggcgtggctggaccgggctccgtttacagggatcactgatttctcagtcacgaagaacaaaattatccagctttgcttggacctgaccactacagtccagaaggattgctttgtagcggaaatggaggataaagttttaactgtggtcaaggttttaaatggcatctgtgacaaaacaatccgatctaccacagatcctgtgatgagccagtgtgcatgtctggaggaagttcacttaccaaacattaaacctggggaaggcctgggcatgtacatcaaatcaacctatgatgggttacacgtgattactggaaccacagaaaattctcctgcagacagatctcagaagattcatgctggtgacgaagtcactcaagttaatcagcaaactgtggtgggatggcagctgaaaaatctggtgaagaaattgagagagaatcccaccggagttgtgttactgcttaagaagcgccccaccgggtctttcaactttactcctgctcccctgaaaaacctacggtggaagccacctcttgtacagacctcacctccacccgcgacaacccagtcccctgaaagcactatggatacctcactgaagaaggagaagtcagccatcctggatctttatattcctcctccgcctgctgttccctactctccccgggatgagaatggcagttttgtttatggagggtccagtaagtgcaaacaaccattgcctggtcctaagggttcagagtccccgaattccttcttggaccaggaaagccggagacgaagattcaccattgcagactcggatcagttgcctgggtactcggtggaaaccaacattctgcccacaaaaatgagagagaaaacaccatcttatggcaagccacggcctttgtccatgcctgctgatgggaactggatggggattgtggacccttttgccagacctcgaggtcatggcaggaaaggggaggatgccctttgccggtatttcagtaacgagcggattcctccgatcattgaagagagctcctctcccccataccggttctccagacccacgaccgagcggcatctggtccggggtgcggactacatccgaggaagcaggtgctacatcaactcagatctccacagcagcgccacgattccattccaggaggaagggaccaaaaagaaatctggctcctcagctacgaagtcctcgtccacagaaccgtccctcctggtcagctggtttacgcgcctcaaactgttgactcactgagagggaccctgctcaggccacctgcctggctcctgccccaagtgccttgcttttacagtggacagcctcttctcgtttcagcctcagtattatgtagggaccttatgcaatttctttttcttttgaaaagttatctactgcccttcttggaagtttgcaggattggatgggaacaaattcagaggatcttaggtgctggcttgtggagacaaaaggagggaaatgggtagagcctgtttgtcttgcttccccagagatagaatgtgaagacacgcgctagaaatcgcagtcctggccagagacgttatggtcattgtgagggactggtggcattgttcctttttgaggggctggggggactcaaattggtggctgttttcacacagatgtgttggtttgtggtccaacttctttatctgaaaaagccagtgagaaaacatttttgatttgatttttctaaactaccatattttaagtgtagcagctttgactttgcaataacgtggcaggtatctgatttctcctttgaggcagaggtttaagtgtaggcctgttacacttgtttgatacctttttcatgacagtctcagtatagatcagttggtacagaaatacatgaacacattttgatagggcttatttcacacaaagaagtttatggttatttgtgtggggtggtgttgttatatattattgtctttaagggaaaagaagctataagattcgctgacagccaaagtatcatttagaaaagtgaagcaacaagatttaggttgatgaaagatacatgagtttgcattttgacctgttcagtgtctgtcttccagcacggtgtgtacacttcttcaaaattgtacacagtttgctaattagaaatatcttggaaagcctcatggtcactaattttcaactagcatcaggtattttgaaaacgtgtgtctggatattaactcttgtttaaactgaatgtatgatattttgttagaatggaaaagtactatcttgttaatttaagtattttaaatatagttgtatatttttcttactctt

SEQ ID NO: 31446 - DNA, 1876 bp, Homo Sapiens
gagggtgctgcgagctgctgggctgcacacgcacacgcacacgcacacgcacactgatgcacacggacctggacacagacatggacatggacacagaaaccacagcactctgcccctctggcagccgccgggcctcccctccagggacgcccacaccagaagcagatgccacgctactaaagaagtcagagaaactgttggcagagttggaccggagcgggttaccctctgcccctggggcccccagacgaagaggcagtatgcctgtcccctacaagcaccagctccggcgggcccaggctgtagatgaacttgactggccacctcaggcctcatcctctggctcgtctgactccttgggctcaggggaggcagcccctgctcaaaaggatggcatcttcaaggtcatgctagtgggggagagcggcgtgggcaagagcaccctagcaggcacttttggtggtctccagggagacagtgctcacgaaccggagaacccagaggatacctatgagagacgcatcatggtggataaggaggaagtgactctagtcgtttatgacatctgggaacagggggatgcaggagggtggctgcgggaccactgccttcagaccggggacgcctttctcatcgtcttctcagtcaccgaccgacggagtttctccaaagttccagagaccctacttcggctccgggctgggaggccgcaccacgacctacccgttatcctcgttggaaacaagagcgacttggcccgctcccgggaggtatcactggaggagggccgccacctggccgggacgctgagctgcaagcacatcgagacgtcggccgcactgcaccacaacacgagggagctcttcgagggcgcggtgcgccagatccggctgcggcggggccgaaaccacgccggaggccagaggcccgatccgggcagccccgagggccctgcgccacctgcacgccgcgagagcctcaccaagaaagccaagaggttcctcgccaacctggtgccgcgcaacgccaagttcttcaagcagcgctccaggtcgtgtcacgacctctcggtgctctgagccgcggtcgccatggccactgcggtcgccatggtcaccgcgccctccgctcgccccccctcgccccgccccgcccccgtccggcttccttggtggaggccgtctaggaaaccaaaaactcccaggatgccccggtgtgaccgccgggggcggcccggggccgctcggcggcacctccacacccgccccaacgcgttctctggagctttgggcctcagggcgcctagaaggcgaggacgcagacctgaaggcggccggtgagcggggcgggttctgctgggtcgggaagaaaaataattctgcaaggtattttgttttttattaattcgcgcttggccacctcatctgtaaagagattctaaaagcaagatctggaaaagtgcttcgtagactccttgacggagtttgcctcctttgtacgctgcgtgaacatgcctcacctttaagagagtcttaaaggtaaagacacgaaaacacttcctccagggaccttcccgaaaacgttctggctctcatctggtgcggcatgtgtccactttgcctttaaggagttcttaaaggcaagggcctggaagtgctgttcctgagatggattctcttgacttaccagtccaccacggcacttcccctttaaggttattaaaggtaaggggtggacagactttctgcattcagataatgagcagtggcaaccccttttggccagggccaggggggcaccagcaaggggccaccctttcccttttcaataaataatttttgtactgcctcaaaaaaaaaaaaaaaaaaaaaaaaaa

SEQ ID NO: 31447 - DNA, 5016 bp, Homo Sapiens
taacattctgttcttccgcgtgatggattttcttttggagattcgaactgaagcctgtacggaggaaatgttgtttttaagggaaatgaatagaaacaatccactttgaagaagccatggcgaaatcaaagacaaaacatagactttgttctcaggaatcttcagtatctgccctgctggcaagctgcaccctgagtggtagtaattcctctaattctgatggctcgtttcactataaagataagctgtacagatctgcttctcaagctctacaggcttatattgatgattttgatctaggccaaatatatcctggtgcaagcactggaaaaattaacattgatgaggattttactaatatgtcacagttctgcaactatatttacaaaccaaacaatgcttttgaaaaccttgatcacgaaaagcactcaaacttcatatcctgtagaagacacatcgttaatgacatagactccatgagcctaacaactgatgatctattaagactcccagcagatggatcattttcttatacttatgttggaccgagtcaccgaacgagcaagaaaaacaagaaatgccgtggaaggctgggttcattggacattgagaagaatccacattttcaaggaccctacacttccatgggcaaggataactttgttactcctgttatacgctcaaatataaatggaaagcaatgtggtgacaaaattgaattgcttatcttgaaggccaagagaaatctagagcagtgtactgaagaattaccaaagtccatgaaaaaggatgacagtccttgctcattagataaacttgaagcagacagatcatgggaaaatattcctgttactttcaaatctcctgttcccgttaactctgatgatagtcctcaacaaacttcaagggcaaagagtgctaaaggggttcttgaagactttctaaataatgataatcagagctgtactctctctggaggcaaacatcatggtcctgttgaagccctgaaacaaatgttatttaaccttcaagcagtacaagaacgttttaatcaaaataagaccacagatccaaaagaagagattaaacaagtttcagaagatgatttctctaaattacagttgaaggaaagtatgattcctattactaggtcacttcagaaggctttgcaccatttatctcgcctgagagacctggttgatgatacgaatggagaacggtcaccgaaaatgtgaagaggaaaatgaaactgtcaccacgataaatagtcaccacagaacaaataggcattttttctattacttaaactgacaaagtaaatataagccatacattattttgtggttggttcaaggattatatatttctaaaacactaaacttgaaaatacccataggttttgggacctatctttattttgtgccaacatactagaatgtgaactgcaaggacccacaatgtatcctgaagtcttactttcgccttctggccagcaaatgtctaatatttaaagatggatgacttctgttcttgaagcttacctggatttaaccttcttcagcatcctcaacattttattacctggttcaggatcattaagaaacttactggtttttatccaaaatcttttacgttaaatagacttttttaaagatatagttagcatcacttttaaacagcttaaaggaatatcaaaattgttattgtgtatctcatctataaggaagtctgttactttgaaattttcataaatttaatatttaagatacattgtatttgaaaattgcattaatagtggggtgatactgtgttaaaaggaacgttgtgttgtgacattcaagagaacctcctcatttaattagtactttgattctgtgtaagataatcttggtagtgcttgacagtttccaaacctttttttggagagatatttaagaatttaatattttgatattagattgtttcccagattttaattttggggttggctcaaactagtgaaaactatgactcaatggccaattgctttatcaaatttgataactaaaacttaaaatgaatatggaaaatcagaaagcaactctattttagagctattttgtaagagttgtgctttctttaacaccatctgtagtcttaagtttgtctctagctagaactgaacaaagctctataatttttaccaagcacttattattaatacttcttataagtagtaagcatctttactaacacaactgagaattaagtcataaaacataactaatacagcacattactgcctgacaaaattaaagagtactgtgtgtatgtataactactacaggttaacacttcacccaaatgatagcgtttttcctcagtagattattgtcaaataggaatttctaagcacattgagtcaaagcattttttccaggttaataaagtgttatttactatctttgttagaggtgacatgtcaaacactacagtgagctctgtggggtttttttttttttttttgcccgtgagttttttaccatgctgctctgaccagtttgagtggcaattaccaatagatttgttttctttattctatggagatgtttttaccactgacactgttttctgattatagtctgcttcatagaaaatagcctgcataatcaaacaaggagttactttgaaattaaagtatgcctggctattaaaaatgcagattttaggtgggtaaacatcaggtaggtctgggtgggtcatgttctaggcctagaaaaatacactattagacaagttctaaagaaggcaaggagataaaggcatcaggtggtaacttctaattgaatattatatgttgatcatacataatatatactatgcctggaaattatgactgaaaagcacctattcggttagtgctcctattcatgagaacatatctccaatactaaatgagataagcctgttctaaaatcttatagccagtattttaagaaacttgattatacttaccaaaggaacattgtttgttttctcttgttttaaatatggagaggtttaatcctttacataacaaaggaattaattttagcaaaatgattcattccaaccttcttataagaaatatctaggagagtcaagtaagaaaaataacgaatctaagtgataaacattcaagaaattctctaaataagagatttatttataattttaatatctcagggttctttttaggtttccaggggaaaagagcaggataacagtgtggagactgctaagttgagaatttaaaacaaatgagaacataagatttttaaaattgcattgtgaatgtaaaatttttatcaatcctttgctcttttagacatattgagaaaatgttaaatagaaaaaattaagaaattttaataagatgtttcagatctttgagtatgaaaaacataacaaaaaagcctaatttcaaaaaactatttgagatcaagggacaatggtgtgaccaatatgaagggtcaagactgaaatgtattgtctttactatcaagaactctactttcagttgtttctcagacagttaatttcagcttcatagagatttctgagcaaattaagaaacactgttttcctgggtttgttttgggtatatgtcattatagttatgttatttcttgttgaaatttataattgtaggttttttgtattgttttggtatttaatggtgtataatgtgttattacattatatgtagttataccaaaatattgcctgaagagaaatcatgacaaggtcccctgtttattcctgtgttacagacgcatggaattgctcctgtagatttgaatttttgtttcatttttttctgtcccacccttcactctctctgtttcagaacatttttggtagaagtgctatccagaagtgaacttgtcaaaaggcaagtagcatgaaagaagacagaagaagcaaaaggctaatacagtggataatttctgagcacttgaagtttcttcaaatgtgcaagactgtgtgtcttcctattagatgtataaattggatatttcatgcctaattaaatgttgcgttggattgcagtgcctatcatacagtgattggagtaaattgaggcctaatcctgaacacatatagagcatattgttagatatttttcctgtgacatttgaagttattattctcccatttcctttttctttttttgtttataatcatatgtccctaagattgttttccttttttggaccaaaaaaaagaaaaaaaaaatcttagcttttcatcctcccagtgtattctgcattgtccttaccctagatcagccccttctgtgtaacagtttttctcacaatgtagcaacttttatccacccttcaggaccttcactgggactagttcattcattttcaaatagctatttcaacctttaacatctactgtcttagtcttttacacagaagccagagtgactggtcttggcaagactctgttgtgtatcaccactctaaccttactgatttgtttcagcaaatttgctttagttaaattgctttactcagattcccccaaactttatatgtgtattgtcatctttgtgcatattatttctcatgcatgaaatactcaatttttattcttttatctaacgcttactcttacatttctttaaagctctggccaagtattttatttcgtccctaaacattctaactatccaccaaactggtaagttggcttttctttttcctccccctgtcattcatttagctgttatatttcattttaatgttttgggtggtgcctcttatactatgttgtattcctagacaaggaaatgtatatcaaaatatgttagatgattgattgttttatctccttgatgatagcacctcttatactgctttacagaatcaggaaaaagtaaactgcattttacatagtggttttaaatattgattgattgatattctaaacctggtttcctatataaagttgtaagttcaagataaaaaaaaaaaaaaaaaaaca

SEQ ID NO: 31448 - DNA, 5668 bp, Homo Sapiens
ctgctcctaggggcctagcctgtgtggccctctgacctgcagatattgggagatccacagctaagacgccaggaccccctagaagcctagaaatggatgacccgaggtatggaatgtgtcctctcaagggagcaagtggatgccctggggctgagaggagtcttctggtgcagtcttattttgaaaaggggccattgacgtttagggatgtggccatagaattctctctggaggagtggcaatgcctggacagtgctcagcagggtttgtataggaaagtgatgttagagaactacagaaacctggtcttcttggcaggtattgctctcactaagccagacctgatcacctgtctggagcaaggaaaagagccctggaatataaagagacatgagatggtagccaaacccccagttatatgttctcattttccccaagacctttgggcagagcaggacattaaagattcttttcaagaagcgattctgaaaaaatatggaaaatatggacatgacaatttacagttacaaaaaggctgtaaaagtgtggatgagtgtaaagtgcacaaagaacatgataacaaattaaaccagtgtttgataactacccagagcaacatatttcaatgtgatccatctgcaaaagtctttcatacattttcaaattcaaacagacataagataagacatactagaaagaaacctttcaaatgtaaaaaatgtgaaaaatcattttgcatgcttttacacctaactcaacataaaagatttcatattacagagaattcctaccaatgtaaagattgtggcaaagccttcaactggttctcaacccttactacacacaggagaattcatactggagagaaaccctacaaatgtgaagaatgtgggaaagcatttaaccggtcctcacaccttactacacataagataattcatactggagagaaaccatacagatgtgaagaatgtgggaaagcttttaaccggtcttcacaccttactacacataaaagaattcatactggagtgaaaccctacaaatgtacagaatgtggcaaagcttttaaccggtcctcacaccttactacacacaggataattcatactggagagaaaccctacaaatgtgaagaatgtggcaaagcctttaaccagtcctcaacccttactacacataagataactcatgctggagagaaaccttacaaatgtgaagaatgtggcaaagctttttaccgattctcataccttattaaacataagacaagtcatactggagagaaattctacaaatgtgaagaatgcggcaaaggctttaactggtcctcagccctcactaaacataagagaattcatactggagagaaaccctacaaatgtgaagaatgtggcaaagcttttaatgagtcctcaaaccttactacccataagatgattcatactggagagaaaccctacaaatgtgacgaatgtggcaaagcctttaaccggtcctcacaactaactgcacataagatgattcatactggagagaaaccctacaaatgtgaggaatgtggcaaagcttttaaccgatcctcaacccttactaaacataagataactcatactggagagaaatcttacaaatgggaagaatgtggtaaagactttaaccagtccctaagccttattaaacaaaataactcatactggagagaaaccctacaaatgtgaaaaatgtggcaaagccttttaccagtcctcaactcttactaaacataaaaaaattcatactggagggaactcctgtgactgtgaagaatatggcaaagcctttaataaattctcaattcctaacagacataattcatactagagagaaattctacaaaccagaaagatgtgacagtgctttgaaaacacctcaaacttttcaaaacataaatcatagtgttgagaaatcctagaaatgtgaagaatgtgataaagttttaaatggttgtcacacttgattgtaggtaaggtaagttatactggagaaaacttctacatgtgtgaacagtgtgacaaaacttttaactaatgctcacaccttcacaggaaagcatttatacttgagaaatattgtacaaatataaagactgtgaaaaagccattaatacatgctcacatcttactcaacatcagagagttcatactcaataaaaacataagtgcaactactgtcaaaatatctttaagaaaatataagcttttaaagtgaagagtattttgaagaagaacattgtagtagaattgtaatatgtttacttgtatcacagatcttactgtacacgttttgtattagaggaaacctctgaagcagttgctcaaactttgttcaatatcagggaatttatattgaaaaaaactgcgaatgtaataaagttggaaaaatactttttcaaaaactacagcttagaaaacaccagagagttcatactaaaacatatttttgcagatacaggaaaaattttttaaaaattttaatcattaagtctgtaaatatcagagaatttacagtagaaatatgtaaggcactgatgcttcaggtattttactaaatcagagtgctgagtatagaaaataatctaaaactaaaattggtaaaatatttgtatataactttaaaagtagaaattttttgcagttattgcattcaaagtatgcttaactttttgaaaaaattagattttttgaaaagtgagtaataatgtaattcaactcttaaattatttcctgccttttcttcactcctatttacatgtgaaagcatgtgatcaattgttgctgcatcagatatgagagattcttttttattaggtgagcattatttataaactttgctatgaaaaagacattaaaatatgagatgtatgatgaaaatctaagtgaagagacttttatggttaacttataatattaagcaatgtgtgcgttaggcattcagagtaatattctgcattatgagaaaacttaatttcatttataagtaaattaaaattagtatattttactaatacttttatataaaatgcagtatattttttaaatttcagattatatgtgatgttaatatattcaacctttttaacatgttaaatactattgtgcattcagtgaagtgttattatgccacagacattaacctattccaccttactcaagggtgtacgtaaaacatggtaacagtatactatttggtaacataatggattaacatctctagtaatctcttttgctagtggctttgactgcaaataagttaaagaatattatttctgtaggttaaatttttgtttttattttattttatttttgagaggtagtcttgctctgtcacccaggctggagtgcagtggcacgatctcggctcactgtaacctccacctcctgggttcacgcaattctcctgcctcagcctcctaagtagctgggattacaggcacccaccaccatgcccagctaatttttgtattttagtagagacagggtttcataatgtaagtcaagctggtctcgaactcctgaccttaaatgatttgcctgcctcggcttcccaaagttctgggattacaggcatgagccaccgtgcccagccaaatgtttattttatttaaatttatttttcttaattatttggggtacataatatgagtatatattcatgcaatatatggcatattttgatacaagaatacagtatataataatcacatcagggtaaatgaggtatccatcacctctagtatttatcctttgtattacaagcaacccagttttatacttttagttattttaaaatgtaaaattaaattgttattgattacagtgttatttttatggtcataataaaagttatgtagaagtataataaaatccctacatttctgaggcctgaataagtatttttaaagttttctaatatttattttttgagcatgtttcctgtctgcctgcaaacacatgcagacatttagttttgatttacatatagttaaatatatgttagtctaaagataaaccttaagtgtaagaaaattatagagtgagtttgtgtgtatgaatttgtacctgttttccgaagaaaaaagcaatactgaacaaaacaaatcattttaacaagatgactactagaaaactaaaagcctcaaaaatgctaaaagaaaatgtattctctgctttgtattgaatttattactgtacattctgtggcttatagttctgaatctccccatgaaaattctgtttatacttgcctggtactcatgatagacccctaattattttgtatcttttttcatataaatattttacagattatgaagtattcattatgtgagctggtctgtgattataagaataatttttacaaaatttagtgcatacaaaatttttaaatgtaattccacaattagtgtattaagttacattttatttagttagaacacttcattttgtttttagttggagaactctatagccctttagttatttttcttttcactttttatagttgacataagtaaatttatttattgagtcaatttgttcaggtaagtactagggaagctttataagtcgtgaggatgtttttatatttaaatgtagcaaacatacatgacagttcttgctgtgtaacagatgctccatagtaagccataagtattcctgctaaagttagcttgtaacttcagttcagagatggaaaacatcagtggtgaagaaataaaattgattcttcatgtggagaggacatagtttccaggctgcaatgctgaatcttgctgaatttaaagagaagttctgcatcttttatttcttaattatcttcagatttctctgtatttattatgtgtatccccagctatgtatgcagcacagcccatctcctttttctgtgttatggcttcagttttctcactgttgtcttaatgccatttcatttcacatggtactttgtaaattttgacgagaaagttggttgttttttttttttttttttttttgagacagagtctcactcttgttgcccaagctggagtgcagtggtgcaatgtgggctcactgcaacctctgccttccaggttcaagcaattatcctgcctcagcctcccaagtagctgggattacaggcacctgccaccacatctggctgaattttttttttttttttaattttttgtagagacgaagtttcaccatgttggccaggctggtttcaaactcctgacctcatatgatccacctgcctcagcctcccaaagtgcttggattacaggcataagccactgcacccagctgaaagttggtattttttaatgcactgaataattgtttttaactggagagtttggttatcaatataactttcggattagttaagataaaagcatacattgtccacaggtgagaagattaaatcagaatagttgttctttgttaaaaaaaaaattagattcttaaagtgtggcaaacataaaatttgcaagaaaatgtagaaattaaatttttaagagttaatggtaagtgaacaattttaaatttattttttattatgtaacatacttttattaaaatatatacttatataataaaagtataacaattaaaaaaaaaaaaaaaaaaaaaaaaaaaaaaaa

SEQ ID NO: 31449 - DNA, 2069 bp, Homo Sapiens
ggggtcggtgctggccgagggggcgccggctgccggagtggacatggcggccggccccattagggtggtgttggtccttctaggggtgctcagtgtctgtgcagccagcggccatgggtccgtagcggagagggaggccggcggggaggcggagtgggcggaaccgtgggatggcgcggttttccggccgcccgcggcgctgggcgcagtgggggtgacgcgcagctctgggacgccgcggccagggagggaggaggcgggggacttgccggtactgctgtggtggagcccagggctattcccccacttcccgggagactcggagcgcatcgagtgtgcgcgcggcgcgtgcgtggcgtcccggaaccgccgagcgctgagggactcgcggacgcgcgcgctgctcttctacggcacagacttccgcgcgtcggccgccccgctgccgcgcctggcgcaccagagctgggcgctcctccacgaggagtcgcccctcaacaacttcttgctgagccacggcccgggcatccgcctcttcaatcttacctccaccttcagtcgccactcggattacccgctgtcgctgcagtggctgcccgggaccgcctatctgcgccgcccggtgcctccgcccatggaacgcgcggagtggcgccgccgcggctacgcgccgctgctctatctgcagtcacactgcgacgtgccagcggaccgggaccgctacgtgcgcgagctcatgcgccacatcccggtagactcctacgggaaatgcctgcagaatcgggagctgcctaccgcgcggctacaggacacagccacggccaccaccgaggatccagagctcttggctttcttgtcccgctataagttccacttggccctggaaaatgccatctgtaacgactacatgacagaaaaactgtggcgtcccatgcacctgggcgctgtgcccgtgtaccgcggttctccctctgtgagggactggatgccgaacaatcactccgtcatcctgattgatgattttgagtctcctcagaagctggcagagtttattgactttctggacaagaatgatgaggagtatatgaaatacctggcatacaagcaacctgggggcatcaccaaccaatttcttctggatagtctgaagcatcgggagtggggagtgaatgatcctttgctgcctaactacctcaacggcttcgagtgtttcgtctgtgactacgaactggctcggctggatgccgagaaagcccacgcggcctctcccggggacagccccgtctttgagccccacattgcccagccctcacacatggactgcccagtgcccacacctggctttggcaatgtggaagagattcctgagaatgacagttggaaagagatgtggctgcaagattattggcaaggtctggaccagggggaagctctcactgccatgatccacaacaatgaaacagagcagacgaaattttgggattacctacatgaaatcttcatgaagaggcaacatctctaagtgcccttgcaagagcctttaacttggcggagctaaggagatcttattctaccatgggacataaggagcatccactgcacaaacccttaatgaacactgtcttttcatggattcaaggaattccagttttatctattaagattttatcttaatgatgagtagccaaggtctaacatagggcctctcctcaaggagagatggagggatacaattcttggttcagtgggaaacagaaccctaaaacatccatttgattcaaggtgctggtccaacagagtttttaaactactcacttctttatttcatcctttcgactgtacttgattaccagtgaagtaagatgggtcaggttacgacttacaacttttgttctattccccagactcctcattattcagtacatttcccaataatctctttttctcatctcttgctttataaattgttacgttggtggagaagcaaaacatttggtgagttgtattctggttttccggagttggatttttttatattatatactttcatgtcaaaaaaaaaaaaaaaa

SEQ ID NO: 31450 - DNA, 2584 bp, Homo Sapiens
ggggtgcggggcgcagcattgtgcggtcatggtgggccagatgtactgctaccccggcagccacctggcccgggcgctgacgcgggcgctggcgctggccctggtgctggccctgctggtcgggccgttcctgagcggcctggcgggggcgatcccagcgccggggggccgctgggcgcgcgatgggcaggtccctccagcctcccgcagccgctcggtgctcctggacgtctcggcgggccagctgcttatggtggacggacgccaccctgacgccgtggcctgggccaacctcaccaacgccatccgcgagactgggtgggccttcctggagctgggcacaagtggccaatacaatgacagcttgcaggcctatgcagccggtgtggtggaggctgctgtgtcggaggagctcatctacatgcactggatgaacacggtggtgaattactgcggccccttcgagtatgaagtcggctactgcgagaggctgaagagcttcctggaggccaacctagagtggatgcaggaagagatggagtcaaacccagactcaccttactggcaccaggtgcggctgaccctcctgcagctgaaaggcctggaggacagctacgaaggccgtgtgagcttcccagctgggaagttcaccatcaaacccttggggttcctcctgctgcagctctctggggacctggaagacctggagctggccctgaacaagaccaagatcaaaccttctctgggctctggctcctgttctgccctcatcaagctgctccctggccagagtgacctcctggttgcccacaacacctggaacaactaccagcacatgctgcgtgtcatcaagaagtactggctccagttccgggaaggcccctggggggactacccgctggttcccggcaacaagctggtcttctcctcctaccccggcaccatcttctcctgcgacgacttctacatcctgggcagtgggctggtgacactggagaccaccattggcaacaagaacccagccctgtggaagtatgtgcggcccaggggctgtgtgctggagtgggtacgcaacatcgtggccaaccgcctggcctcggatggggccacctgggcagacatcttcaagaggttcaacagcggcacgtataacaaccagtggatgatcgtggactacaaggcgttcatcccgggtgggcccagccccgggagccgggtgcttaccatcctggagcagatccccggcatggtggtggtggctgacaagacctcggagctctaccagaagacctactgggccagctacaacataccgtccttcgagactgtgttcaatgccagtgggctgcaggccctagtggcccagtatggggactggttttcttatgacgggagcccccgggcccagatcttccggcggaaccagtcactggtacaagacatggactccatggtcaggctgatgaggtacaatgacttcctccatgaccctctgtcactgtgcaaagcctgcaacccccagcccaatggggagaatgctatctccgcccgctccgacctcaacccggccaatggctcctaccccttcaaggccctgcgtcagcgctcccatgggggtatcgatgtgaaggtgaccagcatgtcactggccaggatcctgagcctgctggcggccagcggtcccacgtgggaccaggtgcccccgttccagtggagcacctcgcccttcagcggcctgctgcacatgggccagccagacctctggaagttcgcgcctgtcaaggtttcatgggactgaagttctgtccctgctctgctgctttcgcccctgctgaccctcgtcagggtcacccccgtcccaaggccaccggacttctaactccagcccctcctgggggcttcgttctctgatctggggtctgagtcatctcctcctagagtgggtcacgaacctgatggggctcagaactgaccccctctctcccccgaggtgggtgggcaccgtggcgtctcttctgccctgccctaaatctcccactctctgtttctgtctgtttcctactgctgctctctcaacctcattcccacctctggggccccttcctcgtgcttctccttcctgagggtttgggaaggtcctggggcagactctggggctcccatggggtggaaggagcctgttccagcacccttctcccagctgcattcccacgggtggccctggagctggtgagctttgtctgggcgttgtcttcggctggcattgctcctcccagctctggcccctctgctccctcaggaagcagtcccctcgtctccctttctgggcagcttccttgaggacagaaacttgaaaacaaacacaaaccaaagtttctggccatctgtggctggagggttctgaatgtcctctctccatgtcaggcagagggtcagcccccatgcttctgcctcaggccccaccccaccccaccccaggcctgcccctcacctcagggccatacccacagcgccctgatggaggaaccagaccgcaggctgtgccaccattaaacaagagcggctgtgaaaaaaaaaaaaaaaa

SEQ ID NO: 31451 - DNA, 1993 bp, Homo Sapiens
cggaggcggaacggcggaccccgtaccctggcagcatcggagcaccggcgggtgaaggcaaggtccctggactggtcatatacctcttgtggccctggcagaatcaagatgaggccctgtcatgcctccccagtgaggcctacagtctgagcagacagcatggcctgccactggcagtgaacaccatgtctgcaggaggtggccgggcctttgcttggcaagtgttcccccccatgcccacttgccgggtctatggcacagtggcacaccaagatgggcacctgctggtgttggggggttgtggccgggctggactgcccctggacactgctgagacactggacatggcctcgcacacatggctggcactggcacccctgcccactgcccgggctggtgcagctgcggtagttctgggcaagcaggtgctagtggtgggtggtgtggatgaggtccagagcccggtagctgctgtagaggccttcctgatggatgagggccgctgggagcgtcgggccaccctccctcaagcagccatgggggttgcaactgtggagagagatggtatggtgtatgctctggggggaatgggccctgacacggccccccaggcccaggtacgtgtgtatgagccccgtcgggactgctggctttcgctaccctccatgcccacaccctgctatggggcctccaccttcctgcacgggaacaagatctatgtcctggggggccgccagggcaagctcccggtgactgcttttgaagcctttgatctggaggcccgtacatggacccggcatccaagcctacccagccgtcgggcctttgctggctgcgccatggctgaaggcagcgtctttagcctgggtggcctgcagcagcctgggccccacaacttctactctcgcccacactttgtcaacactgtggagatgtttgacctggagcatgggtcctggaccaaattgccccgcagcctgcgcatgagggataagagggcagactttgtggttgggtcccttgggggccacattgtggccattgggggccttggaaaccagccatgtcctttgggctctgtggagagctttagccttgcacggcggcgctgggaggcattgcctgccatgcccactgcccgctgctcctgctctagtctgcaggctgggccccggctgtttgttattgggggtgtggcccagggccccagtcaagccgtggaggcactgtgtctgcgtgatggggtctgaaggcttggtgggagctgtccactggagcagctcattgccagaggcagctatttctatggctccttttgctgctgaggacactcactgtggctctgtgggatgagagaggcatgggggtgagcacttgaaacactgccttggggccttgggttaggggagcctttgtctttagtgcaggacacacatatgcttacacctacctttatcaccattcgttcatgaatcatgcctagctccatccttgccctgggacctactaggccttccatccaactgggaaatggggagaagcaaagctggcctcatgctcttcagggtcagttcctatctggagttgaccaggcctaccccagttgccattcctgaaaaatctcagctgccaggctgcctttagggtccctgtagacccaggagagttgagagggtgggggacacagagagaatagagaggatgtgggaactgccagagggccggagcgcaggagttcaagtggaggaatgctggctttgagccctctacactgctggttgtatgaccttggacaagtcacttcacctctctgtgcctcagcatcctcatctataaatggggatctctgaaaccttcctaccctacctacctcacagggctgttgtgaggacccagggagtttggatgtggaagtaaaagtgctgctaaaacctaaaaaaaaaaaaaaaaaaaaaaaaaaaaaaaaaaaaaaaaaaaaaaaaaaaaaaaaaaa

SEQ ID NO: 31452 - DNA, 2272 bp, Homo Sapiens
agacacgttattgacaaccatgcttcgaaacggagctcccctcaccagactcccgagtgacaagctgaaagcagtcatccccccattcctacccccttccagttttgagctgtggagctctgatcggtcccggacgcgtcacaacgggaaggcagaccccatgaagactgcgctgccccagagagccagcaggggccaccccgtgggcggcgggggcacagacactacacccgtcaggcctgttaaatttccaagcctccccagaagcccagcctcttctgccaattctggaaacttcaaccactcgcctcattcatcgggcggctccagtgggataggtgtgggccggcacggtggggagctgcttaaccgctcaggtggcagcatagacaatgtcttgtcccaaatcgctgcccagaggaaaaaagcagccggattattggagcagaaacccagccatcggtcaagccctgtggggccagcaccggggtccagcccgtctgagcttccagcctcccctgcaggtggcagcgctcctgttggcaagcagaaattggagaccagcaaaaggcctccatctggaacttccactacctccaagagcacctctccaaccctcacgccctccccctcacccaaagggcacactgcagagtcctcagtgtcttcctcgtcatcccatcggcagtccaagagcagtgggggctccagcagtggcaccatcacagatgaggatgaactgactggaatccttaagaaattatcacttgagaaatatcagcccatttttgaggaacaagaggtggacatggaagcgttcctcacactgactgacggtgacttgaaggagctgggaattaagacagatgggtccaggcagcagattctggcagcgatttctgaactgaacgcaggcaagggacgcgagagacaaattttacaggaaaccattcacaactttcactcttcctttgagagcagtgccagcaacaccagggcccctggcaacagcccctgtgcgtgatcctccttcccgcagccaccagcccatggttgggtgggtgaggccagaagagactgcctccggcaagaggtagcagccgctcaggtggctctgctggcatcggagcccacagaagtgaggagtggccgatggacctgccctccaaatgtgcctgactctgggtcttgctgtcactggatttcctggcatggcagacagaaagaaagatagtttgaccaagtcgtagaagctgatccagcgggtaaaaagggggcagggaactcgtcccttttattcttgcctcagagctgcctgaagacatgggccaggccggaggctggacaactttggataacgctgacctgtacttccaagtaaatgcctcctgaagagcccgggacccttcctgggagaattctgcagccagaatgaaggtgccatcagcaggaggcactgtgaagcaccatcctgtcgctgtccttgtccattcctagcaagttaatcgtgtcttgttaaccagcagttcctgttcaacgtgtaaagagacctgatgttttccctaataaagctgataacagattttgcaggactggcttgcagaaggaatctccctgggtgaggtgggtcctctggcctcagggggctctgctcctccttaacatgcagcctaagagtggatttagaccctgccttaatttcagccccccagctgagaatccagtcccaaaaataacagttgttgttgccaaagcttgggaatgatagaagggaaatccacacagaatcacgggtagtgagcttgagcacaaagcccagttcattgtcctcggctcccctccccggcactgcgcttccttcctaaggctgagaccacctctccctgcccttgagaactccctttgctccaggacccccgccaacttggggccctgcccagcagagtggagccatctcgcatcagcatagggacctcccaggttcccatttcctgctggagccctctccaaggctgagacacagggcatggccatccttgtgtcggagaccctgtctccacctctaggtttggccttcccctatagggccctcactagggccagtgtattcactgccaagagtctagaatgccattttagtttctgcccaagggagtgtctattttcctcaccatagacactttttattattttattgttatgtttgtgcagggacttaattctttgaaagattattgtttgtcggcctgtgtatattaaatgatgtaaagtt

SEQ ID NO: 31453 - DNA, 3364 bp, Homo Sapiens
tgacgcccccttctcggccgccagccctccacacctcatctgccttgctccacctccctagtgcacccgctccagccccgtctgcccaggagggcgcttggatttccttctccgcggcgcgtatctaacccttcctgcatgtatttcactgcaggctgaagaaagctcagtctcaattgtgtttcctgcctgtcagcctcttgcctcctaaacgtgtaccatttccacttgatgtcatcacgcagaaggggtgaaagagactcggtgacagatacagaaatgaacacacctgtgagtactggatgcctgtgagcttgccattacctgcactgcaaagacacagggcggtggcctctgagaagcagctccttccccttcaccttggccttgcccttcctgctcacggtccaccatggagacgctgtcccaggactctctgctggaatgtcagatctgtttcaattactacagcccccggcgcaggcccaagttgctggactgcaagcacacctgctgttcagtgtgcctgcagcagatgaggaccagccagaaggatgtgcggtgcccctggtgccgcggtgtcaccaagctgcctcccggcttctccgtgtcgcagctcccggacgacccggaggtcctggctgtcatcgccattccacacacttccgaacacaccccggtcttcatcaaacttcccagcaatgggtgctacatgctgcccctgcccatctccaaggagcgtgcgctgctgcccggagacatgggctgccgcctgctgcccgggagccagcagaagtccgtcaccgtggtgaccatccctgctgaacagcagcctctgcaaggtggggctccccaggaggcggtggaggaggagcaggacaggcggggcgtggtgaaaagctccacctggtcgggggtgtgcactgtcatcttggtggcttgcgtcttggtcttcctcctcggcatcgtgcttcacaacatgtcttgcatttctaagcgcttcactgtgatatcctgtggctgaagagggctgcagggaagtctcttgtgggtgccaacttaggggttgagcaggttgatgatgagatcccagtgagaagatggggggcaacactgaccatttggtgctgagcgctggcctctgggttgcctcttgattaccccaagacagacacaaagggcagaaggtgcggtctcaacaagataccaggtgaattgttctgagtgttgatggcaacagcttggaagatgattgcatgcatcctcataatcatgtattcaatggactgtaatttatgatttttcaaaatcatgttacaagatagacatattctacttagacgttaaactgtacaagtgcgtacaatgtgaccttctctaaatgcggtagattcaaacaaagatgctctgtagacaagtagaattaaacctgcgaatccgtgtaaaaattcagtgaagacatgcactgctggcttctttattttttttttctttttattgaaacccagtcttcatttagttgctaaggcttttaatacattttgaatggcaccaaaacaaaataagtcaaaatggacagtcattttatttggaggaaatatttgaacaagtgtctccaatgtgttgtgttttgtcatgaaccttcattttcttcacttgtaattagagcttgctacgtgtttatggaactgaaagctcaacaggggagcaataaaccgagaaatcatgagaaatgtctaatcccatgggaaaacctgtatgccgattttcctcaagccatctcacaaaataagaatttcaaatgtaaatattgtgtatttgtgtgtgtatgtgtgtgtgtctaatttgatttacctcaggtgtttgagtctttgctgaagaatcctgggatgaagacttcattgggcatgaatgagtcaagtctctgaagcggtggccacttcttggacatcttgacccagcgagtggtctcctacacgtcacctgcaacactcgctcctcttctgtgtatttaagtcctgcattttgtaagaggcaaatggagagtaacagaagagtgtcttttctcctggttttggagtcttgcactggccatgagtgttgtgactgatggtcaacccaggcgggcattttaataaatggcctgtgattcttttttgaaagatgctcttccacaagagttaagccagttagaattcctgtttcctcttgttgatatgagagaagatctcctgtattttaacacgtttttaccaagaaaggtggcaaggtaaactaacagctcaaattcccaatataagtggaccagttcctcataaactgtcaaatgttcttaaatgtgtaatgatctatagatgctcatgaagaaagatctgctacaagtacgtgataaattcctatccctgggtgcatgtgcattcagaaatagctgtgagctttacagctctcatctaacttcttttatggaattcatgaagcaagtggtatgtgacaaggactccacttataaatataactgtttttatgttccactgaatccctgaaaatggtgaggagggttggggggaagtgaaggaaagacaagcagggctaattccaaaaagcaaggctagaaaatagccctgtgaggtcaagacaatttaatttatttacatgctgtctgttatcttcaagcagcacaaaatatgcatataaaagtgatggaattaatgtgaaataaaacaaaaatataatggctagaatacaaagctaatactgctaattggcatgagaattcaacataaaattgtgagctctgatttttcaaattgatcataaaacctttaggaaatgtatttgaaagctcaaaatagaaattaggttaaaatgccattttattgtgtaagctcttgggcattatacaacaaataatctaggatttatttggtattaataatttaggtgtcatattagctgaatactatcctctattacatttcgaatagactttgcccttgcaattttaagctatgccatattcagattaattttgtgagtgatatctgcatatgtttctgtacagtgtgaaatgactgaccctgtagtatagtacgtgatagagttctacttgttaaagtaggttagatatagacactaatgtgtgtgatgatagtgtcctgtgtttcttagtgcaaatctgtagagtaaaaatgtccatagaacttttacttaaaaacaatcccatgctagagttgccattaagcagtgcaaaattaatcggctgtatggtagattcttgaccttaaatttaacaacaacaaccaaaatcagattttttttgtgagtcttactgacctaagaaacattgtttaaattgtttaaatgg

SEQ ID NO: 31454 - DNA, 3096 bp, Homo Sapiens
gccagcagcctctaagagctcctagacggcctttggctttggctggcacaggggtgaaggagagccagcggcattgagtaaccaggcgaatgtgcccccaggagagttcattccaaccctcccagttcctactgctggtgggggtcccagtggcaagtgtcctccttctggcccaatgccttcgatggcactgccctagaaggctgctgggggcctgctggacactgaatggtcaagaggaaccagtgtcccagcctaccccccaactagaaaatgaggtctcaaggcagcacctgccagccacactgccagagatggttgccttctaccaggagctacacacacccactcaaggccagaccatggtccgccagttgatgcacaaactgttggtgttttcggctcgagaggtggatcaccgcggcggttgcctgatgctccaggatacaggcatctccttgctcatcccaccaggtgctgtggctgtgggccgccaggagcgggtgtctttgatcctggtgtgggacctgtcggacgccccatcgctgtcccaagcccaggggctggtaagccctgtggtggcatgtggcccccatggggcctccttcctgaagccttgcactctcacgttcaaacactgtgccgagcagcccagccatgctcgcacctacagcagcaacactaccctgctggatgccaaggtatggaggcccctggggcggccgggggcccacgcctcccgggatgagtgtcgcatccacctctcccacttcagcctctacacctgtgtgctggaggcacctgtggggcgcgaagcccgcaaatggctgcagctggccgtattctgctcaccgctggtgccaggacagtcccatctgcaactgcgtatctacttcctcaacaacacgccctgcgccctgcagtgggcactgaccaacgagcagccccatggtgggcgcctgcgtgggccctgccagctcttcgacttcaatggggctaggggcgaccagtgcctgaagctcacgtacatctcagagggttgggagaatgtggatgacagcagttgccagctggttccccatctccacatctggcatggaaagtgccccttccgctccttctgcttccggagaaaagcagccgatgagaatgaggactgttcagcactaaccaatgagatcattgtcaccatgcacaccttccaggatggcttggagaccaagtatatggaaatcctcagattccaggcatcagaggaggaatcctgggcagcgccaccacctgtttcccagccgcccccatgcaataggctgcccccagagctctttgagcagctgcggatgttattggagccaaacagcatcaccggcaatgactggcgcggactggcctcccacctggggctttgcggcatgaagatccggttcctgtcctgccagcgcagccccgcagcggccatcctggagttgtttgaggagcagaacggcagcctgcaggagctgcactacctcatgaccgtcatggagcggctagactgcgcctccgccatccagaactacctgagtgggacacacggcggcagcccaggccccgagcgcgggggcgcccgggataaccagggcctggagctggacgagaagctctgagcgcccagcgggcagggccggaggaggtgtaggggcgagaggggttgttctcctacgcctaagaggaacacagcagctgttcctggctgtgcccaccacccttcccagaaccctcggacggtgccagggccgcccgcgtcctcgccagcctcccagcagcaggcgcgcccttccggccgcgagctgtcccgcgtgcgggtcccctcctggccggcagagggcgcaggagcccaggagatggcctcagcgtggccagcctgccaaactgaccaggggacggccacggtccccgcgtgcactttagggccggtcaggccctaaagtattcactgagcacttaggaagaccgggcattgggctggtgtcatgaagaatactggaatataggaggtagggtctggagccctgacaagcacacagttcttttgcaggagtcaagatgtgctcataggagccaagggcaaactcgaaaacagccctgccctgtggttaggggaggtgggtgtggctttaggagttgagaggggaagagctgagtgcgggctggagcagcgagaatgcttcacggaggatgttggggagagaggatttgatttgccgagtggtttggagatctttaggggcgggtaggggaagagggtggctggacttaaggtaggagccgaaagtgggcatgggagcccatccccgtgggtgtgaggccggggtaggaccaggcttcccggctaggcacgcctggctggctgcctctgcctctactaacttcctttgtctctttatcctcctgcttaggccgtgtcttcctctctctctgccattttctctatcagaaaacattaaagctgagtagaaacttcaagatgatcattctggcccagcccttttatctctttatctccaatggtgtgcgttttaagtttctctgacttggtttttctgtccctgtctcccacagttgttcccgctctgcacctgtgtttcagttactctctctctctgtcttagatctttttgtttctgcctagtctctgtgccctgtctttgtgtgtttctttctctgcctgaaaccctccctcttttcccttcaggcatatgtctctaaaccaatgttatgtatcaaagactgttgaaagagacagggctactctaggaatggatgggtggggatattttccccatggatcaagatccagtttagggttgggaaataaaggatagggataaaagaggcaccccattcagtcagcagatacttattcagcacctactatgtgtttgatactgtatacaaaagacatgaatgggctgggtcctgaacagagaataaagggtttgactccaaaaaaaaaaaaaaaaaaaaaaaaaaaaaaaaaaaaaaaaaaaaaaaaaaaaaaaaaaaaaaaaaaaaaaaaaaaaaaaaaaaaaaaaaaaaaaaaaaaaaaaaaaaaaa

SEQ ID NO: 31455 - DNA, 1872 bp, Homo Sapiens
gaccttcatagatttgagcaacaagatgccgtccctgctgtttggttctgaaatcttcccagtatcctttcatgtgaaatcatccagctcagattgcacgactgagtcctcaaggacttttcctgagcactgtgctccggcaaggcttgccttaggagaggccctccagtgcccgtctcaacctcccaagtggaccttttctttcttcttgtcccacggttgccctgggatggcaacattcagggaagacactggcgtccatagtcagacccacactcaggctcctccccagcctccagctcctctccaagactatggaggcactgccatagtccagaccagagcagactgctctgtccttggccttcacacacttctagcactttgttccccaggatgttaccgaatctggacaaaaaaacggagcttctccagccacatgcctaccatgcagaggctcttcatgacccagtttacacagggcctgaaagggttacggtctccagcctccatagcagacaaggtcttctgttctctgccctactcggtgggcagagtcctatccatttggagccagcatggtccttctgtctgctccttcgaaatctcttctcttcattcccctcactgcaagcggcaaccaagtctgggcaccacaagcagccacaccatgttaccatatgtgcctcttccaggcatggaagctacatataacaccagcggcagtcagacgaggctggagcctccattccctgccttggtaccaaagtcttgcttggtagcagaatcagctgtcagcaagctcctgctttcagcctctgagttccaggttcgtggattggatgagctggatggtgtgaaagcagcatgcccctgcccacagagcagccccccagaacagaaagaggctgagccagagaagaggccaaagaaagtctcacagattcgcatccggaaaaccattcctaggccagatcctaatcttacccccatgggccttcctcgacccaaaaggttaaagaagaaggagtttagtttagaagagatatataccaacaagaattataaatctcctcctgcaaacagggacctggattctagctgcccgagcactgacagcgaaaccgggcacttcctggtattcggatatgcgcagcgccaagcgcagccgcacccactgctggcctcacgccgtctgattggctgcagctctccggaggggcggggccatccgagaagctatccatattggaggaggctgctagtcctttgctggtacctgccgggctggagagcggggagggtcacgtggttaagactcgccacgtgggccgggcgcggtgactcaagcctgtaatcccagcactttgggaggcagaggcgggcggatcacttgagacaggcctggccaacctggtgactctactaaaaatacaaaaaattagccgggagtggtggcgcgcgcctgtaatcccagctactcgggaagctgaggcagaagaatcgcttgaactcgggagactgtaggtgccgtgagccgaggtcgcgccactgcactccagcctgggagaaagactcgcctaagcagtttctctcttttcttttgcatttttaatcttagacttttggagatgttgaaatggtcgctgaaacactgcaaacacagggatgggggacagatcccaaagtatagcagctactcatgagtcccagcgcccctcctgtccttcccctactgctgcctaagtggtcttcctaaaacacaagtttgcacttgtcagaaccactccttaagatctctcatgggttgccctcgtctccaaataaagatactaaccactgagctggcaaaaaaaaaaaaaaaaaaaaaaa

SEQ ID NO: 31456 - DNA, 1459 bp, Homo Sapiens
cggcgggctggcctggcgcgctgcggcgctcgctcacccgctcccgaggaagggcagtgggccccgccgccgcctcccaatggcgaggctgcgggattgcctgccccgcctgatgctcacgctccggtccctgctcttctggtccctggtctactgctactgcgggctctgcgcctccatccacctgctcaaacttttgtggagcctcggcaaggggccggcgcagaccttccggcggcccgcccgggagcaccctcccgcgtgcctgagcgacccctccttgggcacccactgctacgtgcggatcaaggattcagggttaagatttcactatgttgctgctggagaaagaggcaaaccacttatgctgctgcttcatggatttccagaattctggtattcttggcgttaccaactgagagaatttaaaagtgaatatcgagttgtagcactggatttgagaggttatggagaaacagatgctcccattcatcgacagaattataaattggattgtctaattacagatataaaggatattttagattctttagggtatagcaaatgtgttcttattggccatgactgggggggcatgattgcttggctaattgccatctgttatcctgaaatggtgatgaagcttattgttattaacttccctcatccaaatgtatttacagaatatattttacgacaccctgctcagctgttgaaatccagttattattacttcttccaaataccatggttcccagaatttatgttctcaataaatgatttcaaggttttgaaacatctgtttaccagtcacagcactggcattggaagaaaaggatgccaattaacaacagaggatcttgaagcttatatttatgtcttttctcagcctggagcattaagtggcccaattaaccattaccgaaatatcttcagctgcctgcctctcaaacatcacatggtgaccactccaacactactactgtggggagagaatgacgcattcatggaggttgagatggctgaagtcacaaagatttttgttaaaaactatttcaggctaactattttgtcagaagccagtcattggcttcagcaagaccaacctgacatagtgaacaaattgatatggacatttctaaaagaagaaacaagaaaaaaagattgacttttctttatcttctatgaagggtctgtaatgaaatctctaaataatttttaaaaattgttcatcaacttctttatgttttattagaaaaaaactgttttaatgtgctttatcataaataaatatcctgacaaatggtattgaaaaaaatctgagatcatgtgaacatataatacaatgttgattttcttctggtgtattttgcacagacaagcatctgccttaaaatatatacacttgtacaaaaagggaaaaaaaaaaaaaaaaaaaaaaaaaaaaaaaaaaaaaaaa

SEQ ID NO: 31457 - DNA, 1560 bp, Homo Sapiens
ggagaacccaaccgacagtgggcggcaggacgcaccgcggaccccggagagggcggacgagcagggcgccggcgccatggacctggtcatcacgtaggagctggcccgcgccgagagccagcaagatgctgcgtccttgaagaaggcctacgagttgatcaaatcggccaacctagggaaatcggagtttgacccctcagagagcttcagcccagacctgtttgttctgtgtgcagagcaggccctgaagatgaggcagccagaggtgagcgaggactgcatccaaatgtacttcaaggtgaaggcgcccatcacccagtttctgggccgagcgcacctgtgcagggcccagatgtgtgccccgaagtcggcagaaaacctggaggaatttgaaaattgcgtgactgagtacatgaaggccataaactttgccaaaggagaaccgaggtactactttttggtgtacaatgcatcagtcctctactggcagatggtgaggccgttcctcaagcctggatatcgtcaccatctgatccccagcctttcccaaatcataaacgtgctgagtcagactgaggaggaagacaaggagtggcgtgctgagctgatgctggaacttctggagtgttatctgcaagccggaagaaaggaggaggctgccaggttctgctccacggcagctccgttcattaagtctcacgtgccacagaaataccggcagatattctctgttatggttcgtcatgaattaatggacgaacttcagttaaaggaagaaaagaaaaattccattagcctgtcagtcactttctatattaatatgctaaaggcaaaagcggagcaaaatgatttaccaggtgacatcaatgtcattctgaggaaggcctacagacacttaggtcattacaaccaccagcgctttccctctatcagtgaagaaaaaatgcttttgctttttgaattggcgcgtttttccttgaccttgaaatgcatggagatctcctctgcctgcctctcagacctgaagaagatggaaagcaaagtaagtggcttcatgacactgctgcctggggatgaggcgctgctcaccgtgcagttggacaaaaggcaaagaaaggaagagcagttcaccaggccacggcccccagggcttcggtccgtggttggcacattgccgtctttcctacctgtgttttgcacagttgcagttagatggtgtttgcaattttacacctgcccgtttctctttacctttcttgtggccacgggtccacagcaccacagttgtttctagagtccaatttacggacggcgtaaaatttcatgatgctgatgatccagaacatcctccaccagtcccattattggacgtgtaaatcacaccggcagtgcctcgttacccgcagttcactttctgcagtttgttacctgcagacagctacagtatgaaaatattaagctattctgagggagaggccacagccacatcacttctgttacagtatagtgttatgattgtatcttattattagttattgttataaatatcttattgtgcct

SEQ ID NO: 31458 - DNA, 1725 bp, Homo Sapiens
ggggaggtagcacaaagggaggaccatggtcttctaactgaggaacctgagcagatgccttgacccagaccagagacccaagccaaggaaagcccatgatcaccagagtaatggggatatgaaggaagaatcagctgcacaattaggttgttgtcataggcccatggccctgggaggtacagggggctccctgtcccccagcctggacttccagctcttccgaggtgaccaggtcttctcagcctgcagaccacttccagacatggtggatgctcatggcccatcctgtgccagctggctgtgtcccttgcccctggcaccgggcaggtctgcactgctggcctgcctacaggacctggacctgaacctgtgcaccccacagccggcacccctgggcacagacctgcagggcctccaagaggacgccttgagcatgaagcacgagccaccagggctgcaggccagctccaccgatgacaagaaattcacagtcaagtacccacagaacaaggacaagctgggaaaacagccagaaagagctggcgagggggccccctgcccagccttctcctctcataacagctcttccccaccaccgctgcagaacagaaagagccccagccccttggctttctgcccctgtccccctgtcaactccatctccaaggagctcccatttctcctccacgccttctaccctggatacccacttctcctgcctccacccaacctgttcacctatggggccctaccttctgaccaatgtccccacctcctcatgctgccccaagacccctcctaccccaccatggctatgcctagcctgctgatgatggtcaatgagctggggcaccccagcgctcggtgggagaccctgcttccctacccaggggccttccaagcctctggccaagctctgccttcccaggcccgaaatccaggtgctggagctgccccaaccgactccccaggcctggagcgtggtggcatggcatctccagcaaagcgggtcccattgagttcccagacaggcaccgcagccttgccttacccgctgaaaaagaagaatggcaaaatcctgtacgagtgcaacatatgtggcaagagctttgggcagctctccaatctcaaggtccacctgcgtgtgcacagtggagagcgtccattccagtgtgccttgtgccagaagagcttcactcaacttgcccacctgcagaagcaccacctggtgcacactggggagcggccccacaagtgctcgataccgtgggttccaggaagaaatcactggaaaagcttccaggcctggagggaaagagaggtgtgccacaagcgcttcagcagctccagtaacctcaagacccacctgcgcctgcactccggggcccggcccttccagtgcagtgtctgccggagtcgcttcacccagcacatccacctgaagctgcaccatcggctgcatgccccacagccctgtggcctggtgcacacccagctgcccctggcctctctggcctgccttgcccaatggcaccagggggcactagatcttatggcggtggcatctgagaaacacatgggctatgacatagatgaggtcaaagtgtcctcgacatcccaggggaaagcaagagcagtgagcctgagcagtgccgggactcccctggtgatggggcaggaccagaacaattaaaaatgtttcttctgtcaaaaaaaaaaaaaaaa

SEQ ID NO: 31459 - DNA, 1717 bp, Homo Sapiens
gcaattcactttggattttctaatatcccatttctgagaagaatggcagactattgaacaggtgtattttaggtcacgtggggactgcatccacctgaaaatccaccgttgacttatcaggaaactcagagatcaggatctttcacagagtagtcttttaagaagattcagttgtcaacagctagcagtctctttgccaaataattatatctgtgacttctgaaactatttggctgcctaaagttaaaggacttggggaaagtccttccactgctcttctgcagtagtgtcacaccactcagtgcagggcccaccaagaagaaagcagtgtcaggatccacatggcactatggtaactttgtgaaaggggacattttctccctctgaacttctcttcataaagtcattgtgcttcctcttggggatcacctgttcagtctcaatgggctttgatgtgctcctggatcaagtgggtggcatggggagattccagatttgtctgatagctttcttttgcatcaccaacatcctactgttccctaatattgtgttggagaacttcactgcattcacccctagtcatcgctgctgggtccccctcctggacaatgacagtgtgtctgacaatgataccgggaccctcagcaaggatgacctcctgagaatctccatcccactggactcaaacctgaggccacagaagtgtcagcgctttatccatccccagtggcagctccttcacctgaacgggaccttccccaacacaaatgagccagacacggagccctgtgtggatggctgggtgtacgacagaagctctttcctctccaccatcgtgactgagtgggacctggtatgtgaatctcagtcactaaaatcaatggttcaatccctatttatggctgggtcactgctgggaggtctaatatatggccatctttcagacagggttggacggaagatcatatgcaaattgtgtttcctccagctggccatctctaacacctgtgcggccttcgctcccaccttccttgtttactgcatactgcgcttcttggcagggttctccaccatgactattttgggaaacacttttattctcagcttagagtggacattgccccggtcacgatctatgacaataatggtgctattatgttcctacagtgttgggcagatgctcctaggagggctggcttttgccattcaggactggcacatattgcaactgactgtgtctacacccataattgtcctcttcttgtcctcttggtatgaacaatctccacattctttgcctgtaagcgaggctatggtagacatagaaaggaaaattgtgacacctgggatctgttcggtctctggcctagtcctgagccatgatgtccatagtacctattgtgtcacctgagaagcaaacaatggaataggatgacactatatgtggggaggctggcactttgcattcattattttagacatggaattatcatgaaattatttttcttaatagaaaaaatacccacttatttttgaagcaaatgtattatttatctaacttttggaatattatgtgatggagataatttgggggcttttgtcattgtaactgagattgaatataaggaaaacacaataaatttatctacataactatttaaaaaaaaaaaaaaaaaaaaaaaaaaaaaaaaaaaaaaaaaaaaaaaaaaaaaaaaaa

SEQ ID NO: 31460 - DNA, 2659 bp, Homo Sapiens; identical to SEQ ID NO: 26452

SEQ ID NO: 31461 - DNA, 2997 bp, Homo Sapiens
atggggagcccccgggccgcgcggcccccgctgctcctgcgcccggtgaagctgctgcggaggcgcttccggctgctgctggcgctcgccgtggtgtctgtggggctctggactctgtatctggaactggtggcgtcggcccaggtcggcgggaaccccctgaaccggaggtacggcagctggagagaactagccaaggctctggccagcaggaacattccagctgtggatccacacctccagttctaccatccccagaggctgagcctcgaggaccacgacattgaccaaggggtgagcagtaacagcagctacttgaagtggaacaagcctgtcccctggctctcagagttccggggccgtgccaacctgcatgtgtttgaagactggtgtggcagctctatccagcagctcaggaggaacctgcatttcccactgtacccccatattcgcacaaccctgaggaagcttgctgtgtcccccaaatggaccaactatggcctccgcatctttggctacctgcacccctttactgatgggaaaatccagtttgccattgctgcagatgacaacgcggagttctggctgagcctcgatgaccaggtctcaggcctccagctgctggccagtgtgggcaagactggaaaggagtggaccgccccgggagagtttgggaaatttcggagccaaatttccaagccggtgagcctgtcagcctcccacaggtactacttcgaggtgctgcacaagcagaatgaggagggcaccgaccacgtggaagttgcatggcgacggaacgaccctggagccaagttcaccatcattgactccctctccctgtccctcttcacaaatgagacgttcctacagatggatgaggtgggccacatcccacagacagcagccagccacgtggactcctccaacgctcttcccagggatgagcagccgcccgctgacatgcttcggcctgacccccgggacaccctctatcgagtgcctctgatccccaagtcgcatctccgccacgtcctgcctgactgtccctacaaacccagctatctggtggatgggcttcctctgcagcgctaccagggactccggtttgttcatctgtcttttgtttaccccaatgactatacccgcctgagccacatggagacccacaataaatgtttctaccaggaaaacgcctactaccaagaccggttcagctttcaggagtacatcaggattgaccagcctgagaagcaggggctggagcagccaggttttgaggaaaaccttctagaagagtcccagtatggggaagtggcagaggagacccctgcctccaacaaccagaatgccaggatgcttgagggaagacagacacctgcctccaccctggagcaagatgccactgactaccgcctccgaagcctgcggaaactcctggctcagccccgggagggcctgctggcccccttctccaagcggaactccacagcgtccttcccagggaggaccagccacattccagtgcagcagccagagaagaggaagcaaaaacccagccctgagcccagccaagattcacctcattccgacaagtggcctcctgggcaccctgtgaagaacctgcctcagatgagggggcccaggcccaggcccgctggtgacagccccaggaagactcagtggctgaaccaggtggagtcgtacatcgcagagcagagacggggtgacaggatgcggcctcaggcccccggaaggggctggcatggggaggaggaagtggtggcggccgcaggccaggaaggacaagtggagggagaggaagagggggaagaagaggaggaggaagaggatatgagtgaggtgttcgagtacgtacctgtgtttgacccggtagtaaactgggaccagaccttcagtgcccggaatctcgacttccaagccctgaggactgactggatcgatctgagctgtaacacatctggcaacctgctgcttccagagcaggaagctctggaggtcacgcgagtcttcttgaagaagctcaaccagaggagccgggggaggtaccagctacagcgcattgtgaacgtggaaaagcgtcaggaccagctacgtgggggtcgctacctcctggagcttgaactgttggaacaaggccagcgcgtggtgcggctctcggagtatgtgtctgcacgaggctggcagggcatcgatccagctggtggggaggaggtcgaggcccggaacctgcaaggcctggtctgggacccacacaaccgtaggagacaggtcctgaatacccgggcccaagagcccaagctgtgctggcctcagggtttctcctggagtcaccgagccgtggtccacttcgtcgtgcctgtgaagaaccaggcacgctgggtacagcaattcatcaaagacatggaaaacctgttccaggtcaccggtgacccacacttcaacatcgtcatcactgactatagcagtgaggacatggatgttgagatggcactgaagaggtccaagctgcggagctaccagtacgtgaagctaagtggaaactttgaacgctcagctggacttcaggctggcatagacctcgtgaaggacccgcacagcatcatcttcctctgtgacctccacatccacttcccagctggagtcatcgatgccattcggaagcactgtgtggagggaaagatggcctttgcccccatggtgatgaggctgcattgtggggccaccccccagtggcctgagggctactgggaggtgaatgggttcgggctgcttggcatctacaagtctgacctggacaggattgggggcatgaacaccaaggagttccgagaccgctggggcggggaagactgggagctgctggacaggatactccaagcgggcctggacgtggagcgtctctccctcaggaatttcttccatcatttccattccaagcgaggcatgtggagccgtcgccagatgaagacgctgtag

SEQ ID NO: 31462 - DNA, 3006 bp, Homo Sapiens
tctgcctgctgtcgggggcgggctggccaggccgaggccggagcaggcaggcatcccccggagttgtctcttttcatgccagcgtcaacaggaggctgtctggacacactgattactcactcaccagcctccctcttttgtccaccagcccagcctgactcctggagattgtgaatagctccatccagcctgagaaacaagccgggtggctgagccaggctgtgcacggagtgcctgacgggcccaacagacccatgctgcatccagagacctcccctggccgggggcatctcctggctgtgctcctggccctccttggcaccgcctgggcagaggtgtggccaccccagctgcaggagcaggctccgatggccggagccctgaacaggaaggagagtttcttgctcctctccctgcacaaccgcctgcgcagctgggtccagccccctgcggctgacaggcggaggctggactggagtgacagcctggcccaactggctcaagccagggcagccctctgtggaatcccaaccccgagcctggcgtccggcctgtggcgcaccctgcaagtgggctggaacatgcagctgctgcccgcgggcttggcgtcctttgttgaagtggtcagcctatggtttgcagaggggcagcggtacagccacgcggcaggagagtgtgctcgcaacgccacctgcacccactacacgcagctcgtgtgggccacctcaagccagctgggctgtgggcggcacctgtgctctgcaggccaggcagcgatagaagcctttgtctgtgcctactcccccagaggcaactgggaggtcaacgggaagacaatcgtcccctataagaagggtgcctggtgttcgctctgcacagccagtgtctcaggctgcttcaaagcctgggaccatgcaggggggctctgtgaggtccccaggaatccttgtcgcatgagctgccagaaccatggacgtctcaacatcagcacctgccactgccactgtccccctggctacacgggcagatactgccaagtgaggtgcagcctgcagtgtgtgcacggccggttccgggaggaggagtgctcgtgcgtctgtgacatcggctacgggggagcccagtgtgccaccaaggtgcattttcccttccacacctgtgacctgaggatcgacggagactgcttcatggtgtcttcagaggcagacacctattacagagccaggatgaaatgtcaggtgacagtcacccctagcttcctaggaaccccctagggcctcaagtgagggtcttaatgcagggaccctggagtgagaggtggttccttccacgtctctgacctcaccctattcatcagcataaagcaggggtcgtggactccaaggctcatagaagccaggaggtcacttattgacctgaggggccaaggtcaagaccaacctccatctaagggagttccagccactggttgccttgcaggaatgcaaggtcagggtggccagagctcggggttgttcaagaaaaccagcaacccagacttccactggcaactctcgaaaccacaattaattactggggttggcaatcaacttggatatatttaagacactgtgcaggtgaaacagaacctcctcaggggccagaccttgcctgggcttgtgggctgctggtcgcgcccccgtgcacagggagaagagaagcagacgggagcagaagggacccctgctcttggaagggaggctgtgcgggctgggggtgatgatagcccggccagcacacacacgtggcatcttaggccatgggcaggggtggcaggaaggggcagcctgggctctgggagccttgcctgtgtgacccagggtggggttacagaggaaaggcggggtgctggcccagatcaagagccagaaagtgcaggacatcctcgccttctatctgggccgcctggagaccaccaacgaggtgattgacagtgacttcgagaccaggaacttctggatcggtgagtgcccagctgattgggggtatggcgagtaaggggttgtgatgccccaccctgctgcaggaaccctgggccatggcggctgccagcagatggcaagggtgtgttgagggcctggagcccagagcggggccagctgctcaccccctttcccgggaagggcccaggtagggagcacatgggggctgccagcgctgggaagaggggccagaaaggcagctggcagcagactccagggtctgagtgggccaaccttgactaccccggcccagggctcacctacaagaccgccaaggactccttccgctgggccacaggggagcaccaggccttcaccagttttgcctttgggcagcctgacaaccacgggtttggcaactgcgtggagctgcaggcttcagctgccttcaactggaacaaccagcgctgcaaaacccgaaaccgttacatctgccagtttgcccaggagcacatctcccggtggggcccagggtcctgaggcctgaccacatggctccctcgcctgccctgggagcaccggctctgcttacctgtccgcccacctgtctggaacaagggccaggttaagaccacatgcctcatgtccaaagaggtctcagaccttgcacaatgccagaagttgggcagagagaggcagggaggccagtgagggccagggagtgagtgttagaagaagctggggcccttcgcctgcttttgattgggaagatgggcttcaattagatggcaaaggagaggacaccgccagtggtccaaaaaggctgctctcttccacctggcccagaccctgtggggcagcggagcttccctgtggcatgaaccccacagggtattaaattatgaatcagctgaaaaaaaaaaaaaaaaaaaaaaaaaaaaaaaaaaaaaaaaaaaaaaaaaaaaaaaaaaaaaaaaaaaaaaaaaaaaaaaaaaaaaaaaaaaaaaaaaaaaaaaaaaaaaaaaaaaaaaaaaaaaaaaaaaaa

SEQ ID NO: 31463 - DNA, 2236 bp, Homo Sapiens
gaaatcagtaaatattaaaaagaagatggatgcaagaaggatgaagaaagaagaaggactcacagaaaacacgggacttccccggaagctacttgaaaaacatgacccctggccggcctatgtcacctatacctctcagacagtgaaaagactcattgagaaaagcaaaactagagaactggaatgcatgcgtgccctcgaggaaagaccctgggcatcaaggcagaataaaccttccagcgtcattcagccgaaaaggaggaagtcttccaagtcttctggcaaagctgtgttcagggacacgctgtcagaatccacgttatcaatgtggggcgcttattcggtattggccatggctcctaccatgatcccagaacccacacacttacatgcggattccagagactgtccaactgaaaactataacaagatcatctttgcccgcaagcctatgatgaggatgctccctacagttcgctactgaccaacaaggagaaacatgcaaatgttttagccaggggtccctgcagccattccccaagaacgtacaaaagttaagctccatttaccactcacttgacagtgtcctttaaatctgaacttgctcttgctcatgcggagcttggctaagagaaaccagatcagaatgcaagctgtaggtgggtgggtgagtgtgtcccctcccacactgctctctggtgggtttgggcagtccctggctctagtctctgctgcagattctcaggaccaaaatgtgggtgatttgtctgggtccaggcaggagacagaaatcacacaagctcttttattagagataatataaagaatgattaaccaggtgacagtaaagggcaggaagggaatacaaaggtatccatggaggtagcaccacaggaagcaggcatcacacttgaggcttgggaacaaggggaagatgctggactcattgaaaggtggttgcttggagaagggacatggggctgaatctcagacttctgaggtgggggagtggggatgccactcaatgcagctggtatctctgagctctgaggagagtcctgtggggatggtgccccctcctctgaataggggagatgttttgttggtgtctctgaggggacccccatgaggctgcttttgtgagtgttggaaaaaccaaaaactgcattgaaatgtttctgggaggagttgccactgcctgggtgaagaaaaagcactgctagggttagcaacctgtctggcaagggacaggaagctgatagaaagtgaacaggaagcaaacaggaagtgagcaaggggccacttcctacttcctcctttagcctagcagattccttctagctccccctgggggctgagcctatcagggcacaaagccagaatgtggtttgtagaatcccagccccagcatctccaagcataggatggattttgaagccaagagggaattagctctcggccgggttctgagtgatcccatccagctgctcctggacctggtattgagaggtttttcccttggagggcaaacaaagtggcagtggggaccagggtgtcccctgctgagaaatggagagctcttttcccctgtacttctctggggtttgccttgtggaaccaagtgcttgggggaggagctcctggcaggactccagctgttatttgtcagaggacagctaggattggttcacccttgctctgagttggccccaaagcgagctatgctgaactcttctccatctccaagcagacaacctttgtctttacatgcaagagggatccgattatgacaggctgacccagctggtttcatgtttggggtttatctactgagtaaggctgaccttacctgagtttctgtatgtgtatttgcaagacagttaatactaatccatcatccctcacagagatgtagaggatgagatgtagtaacttatagcagtgtcatttggaaaagttgaatttgccctacaaggcatgttctccattcaagggtcttgtgtaaacgtttgcagacacaggtgcagctttggagaactcacctctggctcttgtgcttttatgttgggacagctgcctaaattaggagctctagacctgttattggttcccaactgttggccagaatgaattcttcgaaaaatataggtggtttccagggaatttgaatgattgtattttgtgtccatggaacgtttatagacatggaggcaggcaataaattcctccaataatt

SEQ ID NO: 31464 - DNA, 7111 bp, Homo Sapiens
aaattaattgtggctggacgcagtggcgcggcagtttaattctccggcggctgcagattgacgggacgagatggtcctggcagggctcatcaggaaactcggtcatcagctggccgagatcagggagcgcgctctcaagagtattctctgcaagattgagcacaacttaatctgctacgctgatctcattcaggagaggcaactttttcttcatttgctggaatggttcaatttcccgtccgttccgatgaaggaagaggttctgaacctgttaagcagattggttaagtatcccccagcagtccaacatttggttgacgttggtgcagtagagttcttatctaagcttcggtctaatgtggagccaaatctgcaggctgaaattgatggcattctggatggactttttcttcttccttcggaagttcctgcactatcttctgccgcataccaaaccaatcaaactgaattgtcaaaaaaccctgaaatcttaacaggatattttccccaagacaaaagtaatttccagcagatggaagtgccgccacgaccagtggtaaatcagactgtgaagtgcttgaagttttctacatttccttggctacccctgaccaccacagacagacatgtcctctcctctaatgaaagctctttaagaagtagtaaccacactttaatctggaacacctgtgaactattgaaggatgttatcatgcaagattttcctgctgagattttccttcaaaggccaaaaattgttcagagccttttatctctgttgaaactggcctttggagatggaaagcatcgcctggcattacagtcggtgtcctgcctgcagcagctgtgcatgtatttaagaaacagacttaactttcaccgagatccaggttttttctccaataaacacgacacagtttcccaaaattcttctttgtcttattgtcatgaagcaagaggtactcatcattcccagaatccttccccaggaagcagcagccctcggccttctgtggttgggcgcacaggccagcgacccagaggagatggccaggactgggatgcagcgtcctctagtggaagtagtagtcatgctcatgtaaactccaggatatccgttcattcacctttggatatgggacacatagatctgccagagctggaaactgaagacacattggaactacaattccagcagctcagtcttccccagttttgtgtctccattctggaatcagctgttcctctcttaagaacaggtagcagacaagtgataataagagttctggaattgcttacagaggatatgacacttattggtgaagcaatttcaacagatatctgggatgacagcagcctttttggtatagatatgaaggagaaactactcctggtgttgggagcccttggagaaaccatgtgctaccataaaagtagtatcagtttggagcagccagaggtgatgcttgtgcaccacagaatggcctttatcagcatttccctgtttgcagttcgactgctacaaacgcttctccctgttgaaaaggcaagcgagtttttatcagagcctatgtcaacagcattatttctcctttctttggacatgcctatttctttggaatatccaaatattcatgaagctgttgtggcctatttggaacagctgaattctgaaaactacagtatttataaacgaactgcagaggccgtttattcaattgaatgcacctgtaacttcctgtctgatattgggaaagagggagagaagaatctcttagaattagtggagctggcagaccaagccttgcgtagcttttcctatcatcagcatttcccgctaataaaggaaatcatcagcatttgttcaaagatctggaaatctgctcaggccagtccattactacaaggagaaagtcagaaggtgcttctccatatgttgtctcacccattgccacgagtgaaagctgaaacttaccactgctgtctggaaatcacgaaggaatgtttaggtgtccataatgtcactaaacccgtgtcttcactttgcaatggaattcattttctacttcatccaaaagttctgtatgaaatctctgtatttggcattcaagagcccgaaagtgaggtgaacactgctgccaaggccattctgttatacctgcttcagggacgattgatgatgacagcattgacctggaacaagtttattgaatctctctgtcctgtcatcccaatactacagggctatgccgacacagaagatcctctgggtaactgcattctccttctaagcaaagcaagttctgacacagaagagatgcttccgtgtactacccgattaaagtccatgctgcgacttttgctagtgaaaaagccatcggtccgttcgctagcattaaagcttttagcattccatcttaccagtgaagaaggggctgatacaaagcgtcctctaatagacgccagagttctctccagagttactgatttattcattgggaagaaacctattgaactcagactggatgacagaagagagctggttattaagttggagactgttgaaaaggtatatgaaatcttcacctcagatgatgttgatctcgttttgagaaagtcagctgctgaacagttagctgtgattatgcaagatattaaaatgcatgctgtggtgaaaaagttatgcttaattgacaaaataattgagtatttaaatgaatgtgtgagtcaagatggcaaggttgtagaatgtttggtacaaccatgcctcacactcttgaggaaggttttatgtggtgatccagtcatgcgtgtttcgctctcgcaacagtcttctcttttgaccgtgttattcagagtttccttaatatttcatgaagattgtagtgtcgtgactgaagttggagcactattttgtcttctattatttgatgaagtatcgagaatggatatgtggtctgttaatccttccaataaaccttctttgccatcggtcttcagtttgcctgtttccgtttttagaaggtaccatctacctgttcatgtaattggacaccatgctgtgagtccttactccatagttttgcccttatctgctgattgtttggccttgaagccggtgtcagatatgctgagaatagcttggaacctgtcatggtatcatgggagtgataatctgttgaagcaaatgaactctgaaactaaaacgcaagaaattttagatgcattgaagttatctacagaggacatcctcactctgaagataacacacatggctagtgggctgcaggactgcctccattccattgttcaggctgcaacccacagggaagttagggctgctgtcaccaggatgagtttttatcttctgaatgacagattgtctttaaagggttgccctggtccatgtggggttaccttgaagtccttggcttggcacaccgcactaaacaggtttttacaggtgcttcctgcttgcactgaagatgagaaactgctaatagatatcatacattttttaaataaattaataaaggaacaaagaaaaaattcttcactagaacttctaaactggattctcgaattacttcttagacatagtgcaaacccactgttagacctcttggttctgacagagtcacaggcacgagaagaaacagatgatatccggactgctgtcaggcaacaacttcagaaagaactgattgctctttttgataccttgctgctcaatttcatggaagttactgacaggaaatgctcggaacttctttacgtttttcaaacgcagctggctctgaaactgctccagtgtctgaaagtgacggatgcgcctcatttctatggcctgccgtcccttgagcggaccttacgagggatggctaacctcactgcgtttccgggatggagctcacactctcctctcacaaagcctctagatatctgtgtgaagtacttgtcaggtctccttgaggtcattacttctttttatgtggagcgtggaggaaatgctatgtccttcatgggaaaaggtgttacaaagagcacaattctttgcttgcttcacttatcccatgagatgatggcccaggctgggagcttggagtggatgtcactttggttcttgcctttgggtagtcatagtgaagaacatattcctactcaacaaggattggcttggttgattccattatgggttgatcgggacccagaggtgagattcacttcactgggattaggatcagcactgaccacccttgaaacgggctgtgtggccttagcaaacagttgtcagaacatttccggtgggctctggggaactgtggtgaacattcttctggaccagtcagaatgtagtatggtgcgccgggaggcggcatttattcttcagaatctccttgtaattccaatgcctacagaaattataaaggattatacttggcagggtccctgtgttcatgatgaggactctggcctatcgctcattggaaaacctgcccttcaggctcttttatatcactgccatttttatgaacatttgaatcagatggtaaagcattgttacctaggacggtgtatgtttgatttgaatttttctgcttttgatagaaattcagaaagcaatgatttaaatggtttagatgactcattcaagttttggagggctccatctaggacaagtcaggatcgagatccaagttctctctccacctcagaaacaacggtggcaccttcattggggagtactgaatttcagccacttgtgcagtcaacaacacttctacctgaagcctcccatgaccagtttgtggctcaaggtcaccaggaaagtacatcaccacggccacctcatgattcatctctttctgctcccctgcccaaactgtgtgtttttgttactccatctcttctttcagcaatgtgcagcctcttggacaacctcttgacgattgctcccagagacactgcaaaggcttttcgacaagctcatctcatagaacttctctgtagcattgcagatgctaccctcatacagacatgtgtccaggaactcagagccctgctgccttcatcacctccagctgaacacactcaggctcaggtttcctttctcctggaatacctatcctctttgtccaggcttctgcagtcatgtttattggtggagcctgaccttgtgattcaggatgagcttgtgaaacctcttatcaccaatatcattggaattctcaccatatgtaccaaagatgtattagataaagagttaatatcagctttttatcacacatggacacatttatttaatcttctggccatgctcctgaggaaagctggtgccatcacactcccgtttgttaccgtggccctggccaagcactggacagcggcgattgatatgttctgcacatgtgcaggcttgtctgccacgtgtcctgccctgtatactgccagcttgcaattcctttctgttctcttgaccgaagaagcaaaagggcatctccaggctaagagcaaaacacatttatgctgtagtccaacagtggcttcacttcttgatgactctcaggaaaatcagaaatctctagaacaacttagtgatgtaatccttcagtgctatgaagggaaatcctccaaagatatcctgaaaagagtagctgcaaatgcattgatgtcactgctggctgtcagtagaagagcacagaaacatgctttgaaagccaatcttatagacaattgcatggagcagatgaaacacataaatgcacaactgaacctagattctctgaggcctgggaaagcagcattgaaaaaaaaggaggatggtgttattaaagagttaagcattgccatgcagctcctaagaaactgtctttatcaaaatgaggaatgtaaagaagcagctcttgaagctcaccttgtccctgtcttgcactctctctggccttggattttgatggatgattcattgatgcaaatttctctgcagctcctttgtgtctatactgcaaattttccaaatggttgcagttctctttgttggtcaagttgtggacaacaccctgttcaagctacacatagaggagccgtgagcaactctctgatgctgtgtatcctaaagttggcttcccagatgccactggagaacaccacggttcagcagatggtttttatgcttctttcaaacctggccttgtcgcatgactgtaaaggagtaattcagaagagtaacttcttacagaacttcctctctctagcattgccaaaaggaggaaataaacatctaagtaatctgactattctttggttgaagttactcctgaatatatcatctggagaagatgggcaacaaatgattctgaggcttgatggctgtctagacttactaacagagatgagcaaatacaagcacaagagcagccctttattgcctcttcttatctttcataatgtttgcttcagtcctgcaaataaacccaagatcctggctaatgaaaaagtcattactgtgcttgctgcctgtctggaaagtgagaatcaaaatgctcagaggattggagcagctgccctttgggctctgatttacaattatcagaaggcaaaaacagctttgaaaagcccatcagtaaaaagaagagtggatgaagcatactccttagcaaagaaaactttcccaaactcagaagcaaaccctctaaatgcctattatttgaaatgtcttgaaaacctcgtgcagctccttaattcttcctgagtgccatgggatgctacaccttgaagctgacagtcatcaacaggggagctaaagttgaagccagctgtgtgtagcagctgttacctgaagacgtgctacctctctacaaagtgttgatccccttctttcccatgagagagagaactggtgatactccaacaccgtccagttgtggcagctctccagaagtaatagcagctgacaactttctgtgccttttcctttctgttgaaaaggcatagaaagttctgggaacataaacatttttacccttttctatgccatttattttgtaaaaatcctatttaacagttatttaataaaacaatatttttagaaactaaaaaaaaaaaaaaaaaa

SEQ ID NO: 31465 - DNA, 2788 bp, Homo Sapiens
aaaagcgcgagaagcggcttggttccttgtacgcagaggcggtagtgacacaggcacaactgacagtggcagaagctcagctgacaaggactggggacggcggtgtccttgtcttgcctttgtcgcccccgcccctctcttccctggctggacttgcggagtccccgccgaagaacccgagggtcccctggcgatggcagaaatgaaccctgcacagggtcatgtggtttttgaagacgtggccatatatttctcccaggaggagtgggggcatctcgatgaggctcagagattgctgtaccgtgatgtgatgctggagaatttggcccttttgtcctcactaggttgttgccatggagctgaggatgaggaggcacctttagagccaggtgtttctgtaggagtgtcacaggtcatggctccaaagccctgtctatctacccagaatacccagccctgtgagacatgtagctcacttctgaaggacattctgcgtctggctgagcatgacggaacacaccccgagcagggactgtacacgtgtccagcacatcttcaccagcaccaaaaggagcagattagagagaaactttctagaggggatggaggaagaccgacatttgtgaagaaccacagagttcacatggcagggaagaccttcttgtgcagtgaatgtgggaaagcctttagccacaaacataaactttctgaccatcagaaaatccacactggagaaagaacttataagtgcagcaaatgtgggatattgtttatggaaaggtccacactcaatagacatcagagaactcacactggagaaaggccttatgagtgcaatgaatgtgggaaagcctttctttgtaagtctcaccttgttcgtcaccagacaatccactctggagaaaggccttatgagtgcagtgaatgtgggaaattgtttatgtggagttccacactcattacacatcagagggttcacactggaaagaggccttatggttgcagtgaatgtgggaagttctttaagtgcaactcaaacctctttaggcattacagaattcatacaggaaaaaggtcttatggttgcagtgaatgtgggaaattctttatggaaaggtctacactcagtagacatcagagagttcacactggagaaaggccttatgagtgcaatgaatgtgggaaattcttcagcttgaaatccgtcctcattcaacaccaaagagttcacactggagaacggccttatgaatgcagtgagtgtgggaaggccttccttacaaagtcccacctcatttgtcatcagacagttcacactgcagcaaagcagtgcagtgaatgtgggaaattctttaggtataactctacacttctcagacatcagaaagtccacactggataaggcccttatgaatgcagtggatatgggaaagccttcagtcaccaacatattgtggctggacagcaggcagtacacactggagaaagactgaatgccgtgaacgtgggtaattatgtaggtacagctctccagtcgctatgtatcagagaattcacactgcagaaatgtgtgttcagcaaactcgggacattattttggtttgactctcatctcattagacattggagagtttacactgaagaagagtcttttcaataaagtagaaagtggtaaagattcaacatgcaagattgtacttattgggcttcagaatatccacactagtgaaagtcttctgagtacagcaaatgtgtgacattattttgctactactccacactacttagacatcatgtagttcacactggaaaaaggccacgtatgtgccttgaatgtagccaaaatgatgaacaacacccagaaatctgtgatttagcactgagaactagtattatatggtttttaaaaaacaatggtgaagtacatgccacataaaatttgccatcttaactattgtaatgtcttgtttaatacttgaagtacattaacattgttgagcaaagaatatcctgaactctttatcttgtaaaatgaaactctataaccaccattaaaaaaacaactcattcccacattcttcagtccctggcgaccaccatatttttaagtcattatgactctgactattcttggtacttctcagaagaagaatcttagagtgtttttcattattttttttcacttaggataatatcctcaaagttcatccattttttagcatgtgtcagaaattttaaggctgagcaatatttcattgtttgcatttaccacatttcctttatttctgacatctattcatggacacttgggttacttctacctctggctattgtgaatattgctactacaagcataagggcacaaatatctctttgagaccctgctttcaattcttattgggtaccccaaaaagtggaactgctggatcacatggtacttctaactttaattctttgatgaactgagaaacttttccataaaacttgcaccgttttacattcctaacattccacaaaagttgtgatttgtcctcattctaatccatagaaggcaacatttctaacaggtttctaggtgattttgttgttgctgatgtagggactacattttgagaactgtcctatcccatttttataacaatgcagagcttctctgtaaataccccttgtttctatgttctatcctgtgagccttttcattttgttaatttttcccagtgtttacaaccaggaaatagcttgtcatctttgatacaaaacagaaatctttgcaaaaaaaaaaaaaaaa

SEQ ID NO: 31466 - DNA, 1838 bp, Homo Sapiens
tggaccattagtttccactgcagtgtttgcagatggagtcgaatgtaaccccccgggaatggagccgggagggtcagagaacgcggctgcgctctggatctccgaaggggggcgggggcctggaagaggtccgggcccagaatggacctccaggtccctgctgccgcaatctggccctgccctccagcctaccccttactcccagaggaagggacccagggagacccacccagatgccctgaaaggaggtggaggatgggggtggggcaatacgcagagtttgtctggtgaatgcaggaaaggggtgggggctggagaggaaaaggatggagcagccgtcagcttgtcaactccgcatctgctggctgcctcggccgggctccagcctgcgccctcgcccctcggaacagcgggacccaccaccctctctcaggcaccttcaggatctggtactgttctggagtggcccgttgcagacactgaaccaccagccagctgcatttgttgtcctggatgtcagtgccaattttgccggtcacactggggtccccaaagaggtcaaggcacgctgcaatcctgtaccctgaaaccagctagatgagcatgtcctatagaggccaaggctaccatgggcaccctctgggcatcgggccctgtctgcaatacacctgcaggaagagctcgatcaggttcagatctgtccccggcgggtaagggatgaatccatgatgtcatctgccaccaggaagaaagcttgcagctagaaagagtggaataagacctgcagggctcctcattactgttccttctatcagcaacagagctgctactttatatctgtatatagttttgcttttttttggtaggggacagagtctcactattatccagtgcagtggtgcaatcacagctcactgtagcctctaactcccaggctcaagtgatcctcccacttcagcttcctgagttcctgagaccgtgggcacataccccatgcctggctattttttttttttaatttattttttgtagagacagggtcccactatgttgctcaggctggttttgaacccctgggttcaaatgatcctcctgcctcagcctcccaaattactgggattacaggcatgaggcatcacagccggccagagctgctgcctttgacagtccctatgagctgggaaagtcaggatggggagacagaagacttctgtgctatggagacttggaaagtgacataacatgtttggctcagactccccgcctataaaatggaactaaaacactcttgttttaggttaagaaactagaacagatctttgacatctctaatgagccctagattattcctggtgtcagggagattaggaaacaccttcatataccgtactctattcttgccaaaaacctcaatgaatgcttaaagtaagatctattcatgaaactgacttcacattacttcctaaataaaagaaggctattcccacattgcccccagcactgtgtttgaacaccctggtgactaggaacacagccttacctaaagcagctccttagcagtgcaggtctaataaggtggaactgaaatctgactttgacctatgagtctcagacatctttaaacatctttaaacattaactaagggcttactcttctgagtgcccatctgaaggtacctgaacgtgtcgggtttcccactagaccatgatctccttggaagcagggacagtaacttccccctcttagcatttgcagagcctagcacagcattaggcctggagtgagagtttcctaaacacttgtctgacaaagaaattaataaaacactctaacattc

SEQ ID NO: 31467 - DNA, 1528 bp, Homo Sapiens
ccacgcgtccgcgggagcggagccgtggcgcgctcgccccggacgccggccgcccctccgctcgccctactgagcgagcggcccggggcgccgaggggtccgcgccgcgcggggcgcaccgccctggccgccatgtgctcccagctctggttcctgacggaccggcgcatccgcgaggactacccgcaggtgcagatcctgcgcgccctccggcagcgctgctccgagcaggacgtgcgcttccgggcggtgcttatggaccagatcgccgtcaccatcgtcggcggccacctcggcctccagctaaaccagaaggccctcaccactttcccggatgtggtgcttgtacgggtacccacaccctcagtgcagtcagacagtgacatcactgtcctgcgacacctggagaagctgggctgccggttggtcaatcgcccacagagcatcttaaattgcatcaacaaattctggacgttccaagaactggctggacatggggtccccatgccagacaccttctcctatggtgggcatgaagacttttcaaaaatgattgatgaagctgagcccctgggctacccagtcgtggtgaagagcacacgaggccaccggggaaaagctgtttttctggcaagagataaacatcacctctctgacatctgccatctgatccgccacgatgtgccctacctgttccagaagtacgtgaaggagtcccatggaaaggacatccgggtggtggtggtagggggccaggtcataggctctatgcttcgctgctccactgatggacggatgcagagcaactgctctctcggtggcgtgggcgtcaagtgtccgctgacagaacaaggcaagcagttggctattcaggtgtccaacatcctaggcatggacttctgtggcattgatctccttatcatggacgatggctcctttgtggtgtgtgaggcaaatgctaatgttggcttcctagcctttgaccaggcatgcaacttagatgtgggtgggatcattgcagactataccatgtccttgctgccaaataggcagactggaaagatggctgtcctcccaggactgtcgagtccaagggagaagaacgagccggatggctgtgcttcagctcagggagttgcagagagcgtctataccatcaacagtgggtctacctctagcgaaagtgagcctgaactgggagagatccgggattcctcagcaagcacaatgggggccccaccctccatgctgcccgaacctggctacaacattaacaacaggattgcttctgagttaaaacttaagtgaattcctgctttttggcagcatttaaaccaaatcctactgcttccctagtagttttgagtgaataaaatctggactaatgtgatttcatttgcacagaaactagaaatcccatctgggcactcagcattttttctaacgatgatttaagcaaatggcctagctttgtggtttttacaaagacaaatataaaaacactcacaagaacaaaaaaaaaaaaaaa

SEQ ID NO: 31468 - DNA, 2310 bp, Homo Sapiens
gcttcaatgccacggcctgaccggagtatccgccatggagtcgcagaaagaggcacgaacactccaggagcccgttgcgcggccttctggggcctcaagctctcagacgccgaacgacaaggagcggcgggagggcggcgcagtgccggcggcggctgccctgggcgcagaggcggacgacgacagtgcggacgggctgtgggagctgccggtggagccggccgagcggaggcctgagtgcacccgctgcagccggcctcagaaagtgtgtttgtgtccatttctcccagcgcaccctctgcatatctctacccacttgtacataattcagcatccagcagaggaaaacaaagtgttgcgtacagttcctctactagcagcatgcctcccccaggacaagtgtaaagtgaagatcggtcgtcgcttcagtgaagaaagagatcctgaactttcaactgtttgccggaagtctggtacattaatattatatccaggggctgaagctgctaatttggaagaatttatattagattctcctgtttatccttctacaatcatcatcattgatggtacatggagccaggctaaggacattttctataagaactccttgttccgacatcccaaacaggtgcaattaaaaactagcatttctagtcagtatgtaattcggatgcagccgactaatagatgcctttctacactggagtgtgcagctgttgctctttccatcttggagaaaaataattacatacaagagactttgcttcgccctcttcaagctttatgctcctttcaacttcagcatggtgcccaaattcgcctcagcaaggaacaccttctgaaaaatggattatatcctaaaccaatgccaaagaacaaacgcaaactcaggaaaatggaattgttaatgaatagtgttaaaatttagtacagttattcttttggtgctagcttaactgtcttcatctaacaataccaaattaagttttcatatagttaaggtctgtaggtttttgacttgctaaagaagaatgagaattgcatactaatcttacccagaagaaggaagtaaaccaaatattcataaatacaaataaacagaaattcactggctcactgaaaagcaggatttcctactgtacttgtttttaaaaatgtgcctctaatacatgttttcaaacccaaatttaaaatatgatttgttgttgtgataggttagaagttcttacttgtaaaatagaagaaaattgttgtagtggattggaacggtgttgtgtccattaatgtttataaataattaggtgtagaccaataatataagattcctacatcagtttgcagtcctgactttacagtttgaaataagtagcaaaagaaaattatgataatcaagtaatttattattttgtaaaatagtataaaggaataaggaaattttaagtattgtttaggggccaaatttgaactcagctaatatgatttaagcgctctattaattgccctgatttttaaagaggtgcatgtaattttgaaatagcacacattttcatttgtaatcactctggataaatttgtatttttcagtgttcattgaacaggcttattgactctggtaaacttattttattgatgttttcatatggaaaataataagtggaatatgatacaattgttattttcagaacatatttctttagggctatttaatataacctttttaacgagcaaaaactttccatttgagagaaaaaattcttcctgctctgtgggaaaatatttgctgagattttgtatagaataagagacatgtatgtaacatatatgtatattcagcacaagtctactgcaattatgtacacattttggcaagaagaggggattttgtttagtctttgtttatgacttctagagtttcctgtatctagtgttaagttgtaaggaaaaactaaacatgccatttaaaggtaaacttggtaactatttatagagcatacaccaatgattatttctcacagttttcatgatcatttgtttattatttacttggattagactcattaaaaggtataatgctggtcacaattagaatgctaatatttggggaaactatgcagaaaatattttaaaatattaaaagagtgctggcttctattgttgatttatttttggatttaaaaacaaattagggctgggcccattagctcacacctgtaatcccagcactttgggaggctgagatgtgagaattgcttgagcccaggagtttgagaccagcctgggcaatatggtgagactccatctccatac

SEQ ID NO: 31469 - DNA, 1023 bp, Homo Sapiens
agcggagtcatggcggacggcagcggctggcagccgccgcgcccctgcgaggcctaccgcgccgagtggaagctctgccgcagcgccaggcacttcctacaccactactacgtccacggcgagcggccggcctacgaacagtggcagcgcgacctggccagctgccgcgactgggaggagcgccggaacgccgaggcccaggtgctaagtgtggtggctcacacctgtaatctcagctacttgggaggctgaggcagaagaatcacttgaggataggagtttgaggttgcagtcagctatgatcgtgccactgcactccagcctgggcaacagagcaagaccccatctctaaataaatgttttaaaaataaaaataaatgttttggataaaaccccatattaataataagtattttacattattatctggcatagactgttatatatagcatattattgttgaaatacaaaacaatatgtatccgtactgtatgtgatatagtgccattttcagtaactgctgtacacacagcaactcagatgaaactcaaggaaattcttcagagcaaaaacagccaatcttgaaaacatacatgtagcaggattccatttatgtaacattggtgaaataatgtaattatagagatggaaaacagattaaaggttaccaggggtttaggttagggatggtgagggggtggttcatacgagggagtcctgtggtgttgaaaaccatctgtcagcctgactggtggttacacagggctatacatgaagttaaaattgtgtagagttaggtacacaaaggagtacagatgtaactggggaaactgagtatgttctgtagactgtaccaatgtcaatttctgcgtcctgatgctgtgctgtagtgtataaggtgttaacattgggggaggctggggcaagggtacccaggacctccctagacaacctcctatgcaacctcctgtgaatctataattacttcaaaataaaaagttgaaaacaaaaaaaaaaaaaaaa

SEQ ID NO: 31470 - DNA, 3015 bp, Homo Sapiens
gagcccgcgctcggcccgcaggacgtggagaccacgtacttctgcaacacgtgcggacagcccctatgcgcgcgctgccgcgacgagacgcaccgagcacgcatgttcgcgcgccacgacatcgtggccctgggtcagcgaagccgcgacgtgccccagaagtgcagccgtgaaggccctgcagacggccacgcgggaggccatcgcgctgctgcaggccatggtggaggaggtgcggcacagcgccgccgaggaggaggacgctatccacgccctcttcggcagcatgcaggacaggctggcagagaggaaagcgctgctgctgcaggctgtgcagagccaatacgaagagaaggacaaggccttcaaggagcagctctctcacttggccaccttgctgcccaccctgcaggtccacctggtcatctgctcctccttcctcagcttggccaacaaggctgagctcctggacctgggctatgctggcagggggcttaggccccaaggcgctgacggggccccactgcccctccccagtaggaaagatgtcggggtcacccgtccaaaagcccacgctgcaccggtccatcagcaccaaggtgctgctggcggagggcgagaacacgcccttcgcagagcactgccgccactatgaggactcctaccggcctctctgtgcagcacctgcaggcagagatgcagagcctaaaggaccaggtacaggagctgcaccgagacctcaccaagcaccactcgctcatcaaggcggagatcatgggagacgtcctgcacaagtccctgcaactggacgtgcagatcgcctcggagcacgcctccttagagggcatgagggtcgtcttccaggagatttgggaggaagcctatcagcgagtggctaatgagcaggagatttatgaaggttccagacagttggctgccgagtgaaccctctgtccctgagctaacccacatactagcagaggaggaagtcagagtcggccactaaccagatgcaaatccccacactcttccccttagcgcttgaccgtgcctcccagctgctaactggcctcaaatgatgcatgtgaggtcaggattcattgagtagaatgcccccaccaagtgcctccctctttaattagaggtcatcatggaaatggtcgggatatttacgtggtgcctggcttgagtaaaaatctgaagccagatgcttcaggattaagaccccatgctctggccttggccccacagcccagctccatgaccttctccagctgaggcaggagaatgcctacctgaccaccatcaccaagcagatcacgccctacgtccgctccattgccaaggtgaaggagcggctggagcccaggtttcaggcacccgtggatgagcagtcagagagtctacagaacacgcacgacgacagcaggaacaacgcggcctcagccaggaataatccaggaagtgtcccggaaaagagagagaagacatcagagcctaaaggaaacagctgggctccgaacggcctctcagaagagcctctactgaaaaatatggatcatcacagatccaaacagaaaaatgggggcgatgtccccacatggagggaacacccgacttagcaaatgggaccggtccccagggtcaggctcttagagcaggcacaagactgggacactggacagaaggttgttcccatgatggttttttctattttttatttttgagatggagtttcgctctgttgcccaggctggagtgtaatggtgcaatctcggctcactgcaacctctgcctcctgggttcaagcgattctcctgcctcagcctcccgagtagctgggattacaggcgcctgacaccacgccccgctaattttttgtatttttagtagagatggggtttcaccatgttggccaggctggtctcaaacgccagacctcaggtgatccacctgcctcagcctcccaaagtgctgagattacaggggtgagtcaccgcgcctggccaatgttgttgttgtttttaagacagaatttcactctttgttgcccaggctggagtgcaatggcgcaatctctggctcaccgcaacctccgcctcccaggttcaagcgattctcctacctcagcccccagagtagctgggattacaggcatgtaccatcacacccggctaattttttgtattttaagtagagagggggtttctccatgttggtcaggctggcctcgaactcccaacctcaggtgatccgcccacctcggcctcccaaaatgctgggattacaggggtaagccactgtgcccggccggttatttctttaaaaggtaatcatttgtcaagagtaaaacccagaagctctgacaggccataatttcagatcctttggcttgggcagttttgattttccccgtgtttgcatggcatgaagtcttcgtccttgtcacggtagcttgggatgactcccagtccacatggaaaacatcagggagtgacaatccagcaagaaatccctcgctagttccacacctacgcaccgagcgtcggtgtgccaggccctgtgctgggcagagtgtggtatgtcagggtgtgccggttttaggtaacaagactccaccactgagtggcacctgccctattgcaaaggaatccagttcctccggaataacagtcccactgttaacctggtgctactgggaagttccacacagtaatctgagcagtgactcatggaaggatgaggaacgtttgctccagcttctctccctttccagcaagggcagagctcctaaagccaggggttagcacctggccagcttatgtggcagatggtctcagttacaacttcgctgctttcccaaactcctgcagccctcctgagtccgacttccgttgatagcaaggcactgggtggcagcaaccttttttctagtagtttttttcccagcagttttccatttctccacagtatccttttcatttagaggagcttaataaatgctttttaaaaagt

SEQ ID NO: 31471 - DNA, 3097 bp, Homo Sapiens
ggcctactggggtgtatgtccgctggattgtgaggcccgggatctgggctccgccgtggtgcagaaatgctgtgccggctcggcggtcggtggctgcggccgctccctgccctgcagctttgggctagggacctgccgcttgcgccggttcctacgagcggcgccaagcgccccactctcccagtgtgggcagtggcaccagtctctgcagtacatgcgaacggctggtacgaggccctggccgcgtcttcgccggtgcgggttgcggaggaagtactgctcggcgtgcacgccgccacgggcctgccctggtggggcagcattctgctctccaccgtggccttacggggtgctgtcacgctgcctttggcagcctaccagcactacatcctggccaaggtggaaaatttgcagccagaaataaaaactattgccaggcatcttaaccaagaagttgcagttcgtgcaaatcagttggggtggtccaaaagagatgccaggctcacttatctaaagaatatgaggaggctaatttcagagctatatgtgcgagataactgccaccctttcaaagccactgtgttggtttggattcagcttccaatgtggatcttcatgtcttttgctctccggaatttaagcacgggggcagcacattcagaaggtttttctgttcaggaacagttagctactggtggaattctgtggtttcctgacctcactgcacctgactccacttggattctgcctatctctgttggcgtcatcaatttgttaatagtggagatttgtgctctacaaaaaattggaatgtctcgttttcagacgtatattacgtactttgtccgtgcaatgtcggtgttgatgataccaattgctgcaacggtaccctcatcaattgttctctactggttatgctccagcttcgtgggcctttcacagaatttgctgctgcgttctcctggatttcgccaactttgccgaataccatcgaccaagtcagattcagaaactccttataaagacatatttgctgcctttaataccaagttcatttcaagaaaatgacatattttccaataattttgaaacagttgcaggagtcactatcatctaaatgtatttagacttagaaattcagatgttacttgatttccttttatttaaaatcattaacttcatgaaatattgtaggttaagatgtaatccagaccaggcacagtggctcatgcctgtaatcccagcactttgggaggtcgaggtgggtggatcacctgaggtctggagtttgagaccagcctggccaacatggtgaaaccctgtctgtactaaaataacaaaaaaattagctgggcttagtggcaggtgcctgtaatcccagctacttgggaggctgaggcaggagaatcgcttgaacctggaatacagaggtttcagtgagctgagatcaccccattgcactccagcctggacaacaagagtgaaacgctatcaaagaaaaaaaaaagatgtaatccagatatatttgacagtaattaaaatcttttaaatgttataaatgcagtatgtttgtgaaagtattagaatagaaccaaagtgcctgtctctgtttataaagttacagtttgttagagctaccagaactttggagaatagggttagctactgaatgatggcaagttaaactaaacaatactgcatattactgttttgtaaaataagaggatcagtgagatgattcatgttttttttttttgagatggagtctcactgtgtcacccaggctggagtgcagtggcgcaatctcagctcactgcaacctccatctcccggattccagcgattttcctgcctcagcctccaagtatctgggattgcaggtgcacaccaccacgcccagctaatttttgtatttttggtagagatggggtttcaccatgttggacaggctggtctggaactgctgacctcaactaatccaccctccttggcctcccatagtgctgggattacaggcatgagccacctcacccagcatttttttttttttaatttttttaatgagacagagtctctctctgtcacctaggctggagtgcagtggcacgatctcggctcactgcaacctctgcctcccgtgttcaagcaattctcctacctcagcctactgggtagctgggactacaggggtgcaccaccatgcccagctaagttttgtatttttagtagagatgggatttcaccatgttggctaggctggtcttgaactcctggcctcaagtgatctgcccaccttggcctcccaaagtgctgggattacaggcgtgagccactgtgcccagctgagatgtttcttattattttggaggtggagaggattttagacctctttgagcatctgaaaaaaggctatatatgtatggttttctcttcagaaaaatcttaagactcacaatacggggacttccttgttaccaggaagattttctggcaattcctagttaataaatcttattctaatggaacatacattgatcttgagttaatgcgtggttgaaaaaaaaaagcgggggcaacttgaaatatatgcagtaaagtagtccatgcatacaagtccctaacatggtagatgatgttgcctcccggccctgctcagaaagaatacaaaaagtgtacattcctttttctataatttaagaagtctggaatacagagtgtaacactgtgtactgctagcacccaaagtggaaaatcttaagcattcagattgtttagtcaaagaagaaaaccagaagggcagttgcctattgaggtgattttaaacctgtttatttgtaaggattaagtaccctaataggcttaaactatgatagaggtttaatacagaaaaaattgacaggtattataaattgtggatccagttacttgcttatttaatttgtaaagaggtaaaattagctctggttgagatatcaagtatggcaggtatttgagaaggctataaatcataattttcatttagttaaaatatggacctgattctgggaaaccctatcattccatctcaatgttttacaataaaataaaaactaaagtg

SEQ ID NO: 31472 - DNA, 2383 bp, Homo Sapiens
agaggcgtacaggcccttcccgaccgtagcgagggtgctgctgcgctgggggaaggaaaacgccgctttgactgtgccttgttctcacagctggcgggaagcaagcgccttttcgaaagccagaggctcgagttacccctcttaccaccgtcatggcagtcccaggttgcaacaaggacagtgtcagagcaggctgtaaaaaatgtggctaccctggtcacctgacttttgaatgccgcaattttctccgagtagaccctaaaagggacatagttttggatgtcagcagtacaagtagtgaagatagcgatgaagagaatgaagaactgaataaattgcaggcattacaggaaaaaagaataaatgaagaagaggaaaagaagaaagaaaaaagcaaagaaaaaatcaaattgaaaaaaaaaaggaaaaggtcttactcatccagttccactgaagaggacacttcaaaacaaaagaaacaaaaatatcagaagaaagaaaagaaaaaagaaaaaaagagtaaatcaaaaaaagggaaacatcacaaaaaggaaaaaaagaagagaaaaaaggaaaagcattcttctacacctaatagttctgaattctccagaaagtaactgagactttggcttaagccgttaaatttaaaaatttgtttttaaaacgtgtttgcccttccttggaatttgctatatattatgctttgcaataaatcacagccttttccatatagacatttttcgtatttgggaccattatccctctggcaatatatttttaatgtgctgtaactgtaaagtattaaatcagtcttgttacttgatagccatgccccaagtatagctatttgtgtatactaaacacatcatttttggtatttgtgtctctgtgtgtttggctagtgttactacttcataagttcattgtaaaatggctttactgccatcaacatgggtcatctacctagcagttaatgagtattgctggatcaggtgtccaccttccaatgatgaagcaaggtaaggggtaatgttttgctcttgacacagagaaatttaatagctttatgtactaaaatataatatcttttaaagatagtgaaattcttcagttttttaaatctctagggattttttttcaatgttgtagaagatgcagctgcttaatggtcttgactaggactttttaaatgaatggtgtctgcaggtagatgatcatgaaaatatctctaacaaagttttactcttctatgaaatgcagaatttctagtacctgcctcctttgtttttgtaataattaaaatacttcttgtataaagagattagttcagcctgttagtaagtctgcagagatgatgctgagttggttgtgatttttagaatagactcctgggttgttttacaaatgtgccatattggcatgtcttacagtgatacctcaaacacagaaatttttatttaggaagatagctaaatctttattagaactgatttttattgtattcagtataaattttatgaagcttgtttctatgagtactgtggaaaattttataaatgtgagcatatatatttattttgtctgacataatttgtagttttaaagcaagtttcacactgaacttaacgttttcataaatgaccagtttgggatgtttctctcttttactttagtggcaaactcaagagtaaaaagtgtcaaaaaaagaattgagaattttattctgtactttttaaaatttaagagccagggagttgcatcatgaaagcctttgtataataatggaaattttatatgggtaagcattttcaaacacatattagtagatacgttttttaaatttctattttcacattgatcagtgttactttgcttaatacttaggtagcccttatgtccactaaagtaaatgcttatgttgtagaagcatcgaacatcaaccaatgtcatggcacagcaccaaagattgcaaatacctcactatggtgcgcttagaaattttcaaattgataacctatagatacggctgcaggtgaattcatgatagtgaaatcagctaagtatacttaacctcacaggctagaaaggtttactgattcttgtttcacctggcacccaatgtggataccctcagtaagactcagggagccttataactcctcttaacatatgcttacccatgcttaaattctagggaagctgtatccacagccctctgcattgcagccatgagagctctcacgctttcaacccttccataacctaatttagtcatttgggcctctcaaaaggaaatgcttttgtttaaataggtcttactcatccagttccactgaagaggacacttcaaaacaaaagaaacaaaaatatctgaagaaag

SEQ ID NO: 31473 - DNA, 4996 bp, Homo Sapiens
cgaggctccgtgccccgccccccgggtgccccgcccctttgcgcggctggcgcggccagccggccaggctcccctcggcaaacctgtctaattggggcggggagcggagcttcctcctctgagggccgtgccgcgctgccagatttgttcttccgcccctgcctccgcggctcggaggcgagcggaaggtgccccggggccgaggcccgtgacggggcgggcgggagccccggcagtccggggtcgccggcgagggccatgtcgctgttgggggacccgctacaggccctgccgccctcggccgcccccacggggccgctgctcgcccctccggccggcgcgaccctcaaccgcctgcgggagccgctgctgcggaggctcagcgagctcctggatcaggcgcccgagggccggggctggaggagactggcggagctggcggggagtcgcgggcgcctccgcctcagttgcctagacctggagcagtgttctcttaaggtactggagcctgaaggaagccccagcctgtgtctgctgaagttaatgggtgaaaaaggttgcacagtcacagaattgagtgatttcctgcaggctatggaacacactgaagttcttcagcttctcagccccccaggaataaagattactgtaaacccagagtcaaaggcagtcttggctggacagtttgtgaaactgtgttgccgggcaactggacatccttttgttcaatatcagtggttcaaaatgaataaagagattccaaatggaaatacatcagagcttatttttaatgcagtgcatgtaaaagatgcaggcttttatgtctgtcgagttaataacaatttcacctttgaattcagccagtggtcacagctggatgtttgcgacatcccagagagcttccagagaagtgttgatggcgtctctgaatccaagttgcaaatctgtgttgaaccaacttcccaaaagctgatgccaggcagcacattggttttacagtgtgttgctgttggaagccctattcctcactaccagtggttcaaaaatgaattaccattaacacatgagaccaaaaagctatacatggtgccttatgtggatttggaacaccaaggaacctactggtgtcatgtatataatgatcgagacagtcaagatagcaagaaggtagaaatcatcatagatgaattaaataatcttggtcatcctgataataaagagcaaacaactgaccagcctttggcgaaggacaaggttgcccttttgataggaaatatgaattaccgggagcaccccaagctcaaagctcctttggtggatgtgtacgaattgactaacttactgagacagctggacttcaaagtggtttcactgttggatcttactgaatatgagatgcgtaatgctgtggatgagtttttactccttttagacaagggagtatatgggttattatattatgcaggacatggttatgaaaattttgggaacagcttcatggtccccgttgatgctccaaatccatataggtctgaaaattgtctgtgtgtacaaaatatactgaaattgatgcaagaaaaagaaactggacttaatgtgttcttattggatatgtgtaggaaaagaaatgactacgatgataccattccaatcttggatgcactaaaagtcaccgccaatattgtgtttggatatgccacgtgtcaaggagcagaagcttttgaaatccagcattctggattggcaaatggaatctttatgaaatttttaaaagacagattattagaagataagaaaatcactgtgttactggatgaagttgcagaagatatgggtaagtgtcaccttaccaaaggcaaacaggctctagagattcgaagtagtttatctgagaagagagcacttactgatccaatacagggaacagaatattctgctgaatctcttgtgcggaatctacagtgggccaaggctcatgaacttccagaaagtatgtgtcttaagtttgactgtggtgttcagattcaattaggatttgcagctgagttttccaatgtcatgatcatctatacaagtatagtttacaaaccaccggagataataatgtgtgatgcctacgttactgattttccacttgatctagatattgatccaaaagatgcaaataaaggcacacctgaagaaactggcagctacttggtatcaaaggatcttcccaagcattgcctctataccagactcagttcactgcaaaaattaaaggaacatctagtcttcacagtatgtttatcatatcagtactcaggattggaagatactgtagaggacaagcaggaagtgaatgttgggaaacctctcattgctaaattagacatgcatcgaggtttgggaaggaagacttgctttcaaacttgtcttatgtctaatggtccttaccagagttctgcagccacctcaggaggagcagggcattatcactcattgcaagacccattccatggtgtttaccattcacatcctggtaatccaagtaatgttacaccagcagatagctgtcattgcagccggactccagatgcatttatttcaagtttcgctcaccatgcttcatgtcattttagtagaagtaatgtgccagtagagacaactgatgaaataccatttagtttctctgacaggctcagaatttctgaaaaatgacctccttgtttttgaaagttagcataattttagatgcctgtgaaatagtactgcacttacataaagtgagacattgtgaaaaggcaaatttgtatatgtagagaaagaatagtagtaactgtttcatagcaaacttcaggactttgagatgttgaaattacattatttaattacagacttcctctttctaagattttgtgaattggttgaatagttctatacaaatgaagtatggaggtgtgtatgtttatatgtatataacaaaatattttcattgtgaccactctgaagtaagagcaatgggaatggcattattgtagaataagtcattgtatttttaacaccagaaagaaccttgccgatcaccaggcataacctaattttatccatggaagaaacacagaaaggcatctaagttagagctggcaccagaactgagacctccagaaatctattccagtattttttccactacacaactgccttcctgacaggttctgagataagtgttatgtttgtagatagagtgaaatatatttatatatatataaatatatacagatacatatctgtgtattatctcaaggaatgtacaaactttagtttttgattataaggacttcactgcaagttttagttaagaggtttgtatataaatctgttatagaacaggctgaaatttcttgttcataagattatgaaaccacatgagaagtgataaaatgtttgttaaagctagatagaggttaagaatcaagatataatggataattttcatagctgcctatcagaatttcccaaatatttagcatcttccttgataatatgtattttcttcttgaatttcactggcctaatgagataatactcttatctttggctctacctaaaagttggttaaaaatgcaattggcattaacaaggaaaaatactgaattagtaattttaaaagtctcacaaagaaaatcccaggcctagatggctgcattgttgaattctgccaaacattaaaattagcactaattttttgcacactgtttctaaaagtaggagaggaaagaacacttcccaacttactctaggtcagtattaccctgatactagactagacatcacaagaaaactataagccaatattccttattaatacaaacacaaaaatcattaacaaaaatattagcaaactgaatccagcaacctataaaaaggattctatatcatgaccaagtggaatttatcccaggaattcaaggttggttcaacatctaaaaatcaaataagctaatatacagtcagttctcattattcacagtaattatgttctacagaatattctcccataaacactgaattaaatatggaacaactgcttttaggagaaagtgtatttgtgtatatgtgtgtatacatatgtttatctcacacacattatgagcttgaattcttaattcatcctagcaaattctaccttattttacagaagtgaaagtgaggtatcagaagtgttaagtgacatgcctgaggcacccccctaacaggtgtcagagctgaaattcaaaccccatccagctggccccggagccagagcttcttgtactacacagaattgcccctgccatttccaccctccagtcatttctctatgagactgaagcaggaaggcagagcatcatcttgttcagcctcagctgggaacatgtgtactgggtgactcaaatttttcacccatttacacatatccacaaatgactgcaaaagtgccacggatatcaatttgagggttataaattttagcaagttggtaaattcacaaatacataaccttgaataatgaggatcaactgtaccatatttaataaagcacaaaacccacacagattgtcttattacagcatttgataaaatccaaaactctttcataaaaacactcaacaaacttaggaataaaaggaatcttcctagatatgataaatataacatctatgaaaagcccacacctaacattatacttcatggtgatagactgaaggctgaatgttttccccttaagattgggaagaaggacaaggatgttcactcggcactacttctattcagcattgtacttgaagttctagccacagcagttaggttaggaattcaaggtttgttcaacatctaaaaatcaaataagctaataaagaaaagaggtttatactgcaaaagaagtgaaactatatgtattcacagttgatacatagttgtatatagaaaatgctaaagaatccataaaaagtaataaatgagttcaacaggt

SEQ ID NO: 31474 - DNA, 876 bp, Homo Sapiens
ctggcgcggcggacgggatgaggcgctgcagtctctgcgctttcgacgccgcccgggggcccaggcggctgatgcgtgtgggcctcgcgctgatcttggtgggccacgtgaacctgctgctgggggccgtgctgcatggcaccgtcctgcggcacgtggccaatccccgcggcgctgtcacgccggagtacaccgtagccaatgtcatctctgtcggctcggggctgctgagcgtttccgtgggacttgtgaccctcctggcgtccaggaaccttcttcgccctccactgcactgggtcctgctggcactagctctggtgaacctgctcttgtccgttgcctgctccctgggcctccttcttgctgtgtcactcactgtggccaacggtggccgccgccttattgctgactgccacccaggactgctggatcctctggtaccactggatgaggggccgggacatactgactgcccctttgaccccacaagaatctatgatacagccttggctctctggatcccttctttgctcatgtctgcaggggaggctgctctatctggttactgctgtgtggctgcactcactctacgtggagttgggccctgcaggaaggacggacttcaggggcagctagaggaaatgacagagctcgaatctcctaaatgtaaaaggcaggaaaatgagcagctactggatcaaaatcaagaaatccgggcatcacagagaagttgggtttaggacagcaggtgctgttccgagactcagtcctaaagggttttttttcccactaagcaaggggccctgacctcgggatgagataacaaattgtaataaagtaacttctcttttcttctaaaaaaaaaaaaaaaaaaaa

SEQ ID NO: 31475 - DNA, 1738 bp, Homo Sapiens
gtgaggctttgtttttgcctttatggagagtagcatctctcctgaggtccctgccatctgtgggtcataggggtcctatgagaaggggcagcacgattggcgctccagctgtggccttccactctgagccctattcatcctcctccccagccagctcacctggagcagctggacccaagcccagctccccttgggtctcagtgccagtgctggtggagtgggtgggggcctcgcattcagtgcgagtggctggtgggcctgggcagtgggcacaggggccttctgggggacttggctgagtgggcaccggctgcctcatggttctcagccacagagttctagaaaacgttccacactctggagccccattgtcagccccaggcccagccccaggggtgctcccggtgctgcctgcagggccacaggctcctaggggaaagtgcacccgcagtcactcgcagatggccattttccagggacacactttcaactgagcattgaaagacagacagcgctcgagtggattaggccgcagtggttgagaagctcgagtaacgaatccagaaaactctggagagcccttcagagcatacacaccacgtctacttctcagcgcctctggagcgagtcccgttgccaggagaacttctttcttgttctcggaatagatgctgcgcagaagaacctttctggaggccagggccacatcatggaagattgtgacctcaaagagcctgaaggactcctcactgtcagcagcttctgtctccagcattgcaaagccctgatccagaccaagctctcggggccgcctggcagcaaacaggggaggctgatgacatgcagccgcttcctgaagaccccctcatgcggaggtggccagcacatcactattccaaggaaaaggatgttcactccacgcaagctcaaattgacactctttaatagcgacgtttgctaaaatcaggaggactttgtacctttatgaggaatttttcattttcttcctggctgggttgatgtggaaaccagagctgtctgtggagctgttttccagaccccaggcccattcctgggatctctccaacaggacctgtcctgtgttctgggcttgtctcgggtctgaccaggagatggaggatgtgtccttggcagagccaaggggagacagaggtttctggatgccatgacaggctgtcggggtccaggtggcactcatgggccccctgccccatgtgaatgctgctggcacctggtggggggttgcccagggatggaccctgggcatggcttctgggctgcttagtccagggggagcaacttgtggccaaatccatgagttcagaggaaaaggggaaggcactgaaacgtcaccagagagacagctgttgagaccgctcagaaaccctctgtctgtcacactctgccctggctgctgtgtggtcagggcaccatgagggtgtacagatgtgctgtgtcctcagagcctcgcaggtgccctcacttactgcctgggcccctgcccagcagcctcaaggacaggcctttgtccctcacggttgtggacaggaggtcgcaccactggcctgcgagagcctctggtgggcccgtggcttcccccagttatctgctaaggaaaactgtgctcttcgaagggcagagccaagaagtcagccctgacttttgtaaaattttactaaataaaaccacctggataagcaaaaaaaaaaaaaaaaaa

SEQ ID NO: 31476 - DNA, 1015 bp, Homo Sapiens
ataatttatgagatgtcataaatctctccaaaataggatgagatgaacacttttaacaagagaacaggaccctatataaatcgctgtgggctcaccacctctaaggaggagcactgactgaagacagaaaaattgatgaactgaagaagacatggtccattatgccttacaaacttacacagtgctttgggaattccaaagtactcagtggagagaggtgtttcaggagccgtagagccagatcgtcatcatgtctgcattgtggctgctgctgggcctccttgccctgatggacttgtctgaaagcagcaactggggatgctatggaaacatccaaagcctggacacccctggagcatcttgtgggattggaagacgtcacggcctgaactactgtggagttcgtgcttctgaaaggctggctgaaatagacatgccatacctcctgaaatatcaacccatgatgcaaaccattggccaaaagtactgcatggatcctgccgtgatcgctggtgtcttgtccaggaagtctcccggtgacaaaattctggtcaacatgggcgataggactagcatggtgcaggaccctggctctcaagctcccacatcctggattagtgagtctcaggtttcccagacaactgaagttctgactactagaatcaaagaaatccagaggaggtttccaacctggacccctgaccagtacctgagaggtggactctgtgcctacagtgggggtgctggctatgtccgaagcagccaggacctgagctgtgacttctgcaatgatgtccttgcacgagccaagtacctcaagagacatggcttctaacatctcagatgaaacccaagaccatgatcacatatgcagcctcaaatgttacacagataaaactagccaagggcacctgtaactgggaatctgagtttgacctaaaagtcattaaaataacatgaatcacattaaaggaagaattttgacctgcaaaaaaaaaaaaaaaaaaaaaaaaaa

SEQ ID NO: 31477 - DNA, 2969 bp, Homo Sapiens
agcaacgacgccgggcagcgggagcggcggccgcgccatgtggctgctggggccgctgtgcctgctgctgagcagcgccgcggagagccagctgctccccgggaacaacttcaccaatgagtgcaacataccaggcaacttcatgtgcagcaatggacggtgcatcccgggcgcctggcagtgtgacgggctgcctgactgcttcgacaagagtgatgagaaggagtgccccaaggctaagtcgaaatgtggcccaaccttcttcccctgtgccagcggcatccattgcatcattggtcgcttccggtgcaatgggtttgaggactgtcccgatggcagcgatgaagagaactgcacagcaaaccctctgctttgctccaccgcccgctaccactgcaagaacggcctctgtattgacaagagcttcatctgcgatggacagaataactgtcaagacaacagtgatgaggaaagctgtgaaagttctcaagaacccggcagtgggcaggtgtttgtgacttcagagaaccaacttgtgtattaccccagcatcacctatgccatcatcggcagctccgtcatttttgtgctggtggtggccctgctggcactggtcttgcaccaccagcggaagcggaacaacctcatgacgctgcccgtgcaccggctgcagcaccctgtgctgctgtcccgcctggtggtcctggaccacccccaccactgcaacgtcacctacaacgtcaataatggcatccagtatgtggccagccaggcggagcagaatgcgtcggaagtaggctccccaccctcctactccgaggccttgctggaccagaggcctgcgtggtatgaccttcctccaccgccctactcttctgacacggaatctctgaaccaagccgacctgcccccctaccgctcccggtccgggagtgccaacagtgccagctcccaggcagccagcagcctcctgagcgtggaagacaccagccacagcccggggcagcctggcccccaggagggcactgctgagcccagggactctgagcccagccagggcactgaagaagtataagtcccagttattccaaagtccatatgggttaatctgctctgacttgttgccattctaacaatttgtgctcatgggaagctctttaagcacctgtaaggatgtctcaagttacagtttgggatattaactatctctgcattcccctcctcccccagacttcagagatgtttttctggcgtctcagttgacatgatctgttgtgcgtcttttctgtcaggtcactcttcccttgggacccgagatcacaccctcatttttcacattattctgtttctgttggagagacagcatataaaacagtattgaaataggctgggagagagcaatgtttctgtgctatattggatgctcagaagtgcaggagacgctggacccaattctctctgctgggtagttaccttatagcatttggggatttgggttagatgatctaaccaggaggccatcactggatggtcacccccccaaaaaaattccatttgagcatcaaaacctgctttgcacaatcctatttgatgcccccagttcagcagagtcagtggccaaagaaaactttggacgtgagtaacacccttcagcagtcgcaacgttattttggttttgtgaaggactctgaaaccatctaccctgtataaattctggctttagaaatttgcccaagaatgctcattctgagagctttcctcagcagcatatatcatcagcctcatcctaaaataggcagggagcccctcccatgagtttatccaagttctcagctcctaaaatgcaggctgccaagaccctacacctgccctggctctacagccacttacctggtttctggactgtcaccctcccagctgacctgcccgtagccaaggaatgaggacctaacttgagttggcccaaagtctgacctggctgtatgtccctgtggcccacacccagcctgtcttgctcattcatgcagcctcaacactggcctccaaagttcccttaacacttgcaaagtcctttttacctgtgcatttggacttgaggacactggtttctatcacaggtgagagccatgttcaatacctccagcaagctctcctggctccctgcactgtgcacgctcctcttcccaaggtcccaataccagcacctctagttagagttagggtcagggtcaggcctctcccaacatcccagtagtttctcctctgagacacatgggcaagagacaatttggagtcaagattttccatttggatctattttaaatcttttagaaatgcatttgaaacagtgtgtttgttttttcccttctagttaagggactatttatatgtgtataggaaagctgtctctttttttgtttttcctttaacaaggtccaaagaaagatgcaaaaggagatcacacccttgccccgctgagccccgtgataacaagtcactccagactaacctgtgtgccagacatttgtgcattgttgcactttgaggttattatttatcaagttcttgaaggaagcagaaagagggactcctctctccctccgtgtatagtctctatgtttgtgctagtttttcttttttttctctgtgtccagtcagccacagggcccgcctccctgcaggaataaggggtaaaacgttaggtgttgtttggcaagaaaccacactgactgatgaggggtaaaatggaaccaggtagagccactccgggcagctgtcacccattcagaacttctttccgcagctgaagaaatgttcagtaacctgtttgacgctaattaaaacagagcctgcaggaagtggggctaaagtggcattcagtgatcctgttctgtagacttttctttctttttttaaccaaatccaaaggatgttacagaaaagctagccactggtattttgttttgttt

SEQ ID NO: 31478 - DNA, 5250 bp, Homo Sapiens; identical to SEQ ID NO: 24829

SEQ ID NO: 31479 - DNA, 1969 bp, Homo Sapiens
gctgcgagacgctaagcggcgccgggcgggagaagagcggagcagtggtcggagatgtggcgaccggtgcagctctgtcatttccactctgctctgctgcacagaaggcagaagccctggccgtcccctgctgtgttcttcaggagaaacgtcaggggccttcctccaaggttctccagccccacacccctgtggaggaaggtgctctccaccgcggtagtgggggcgcccctgctcctcggagcccgctatgtcatggcagaggcacgggagaagaggaggatgcggctcgtggtggatggcatggggcgctttggcaggtctctgaaggtcggcctgcagatctccctggactactggtggtgcaccaatgttgtccttcgaggggtggaagagaacagcccaggctacttggaggtgatgtctgcgtgtcaccagcgggcggctgatgccctggtggcaggggccatcagcaacgggggcctctacgtgaagctgggccaggggctgtgctccttcaaccacctgcttccccccgagtatacccggaccctgcgcgtgctagaggacagggccctcaagcggggcttccaggaggtggatgagttgttccttgaggacttccaggccctcccccacgagctcttccaggagtttgactaccagccaattgctgccgccagcctggcacaggtgcacagagccaagctgcacgatggcaccagcgtggctgtgaaggtgcagtacatcgacctgcgggaccgctttgatggggacatccacaccctggagctcctgctgcggctcgttgaggtcatgcaccccagctttggcttcagctgggtcctccaggacctgaaggggaccctggcccaggagctggacttcgagaatgagggccgcaacgcagagcgctgtgcgcgggagctggcgcacttcccctacgtcgtggtgccccgcgtgcactgggacaagtccagcaagcgcgtgctcactgccgacttctgcgccggctgcaaggtcaacgatgtggaggccatcaggagccaggggctggcagtgcatgacatagcagaaaagctcatcaaggcctttgctgagcagatattttacaccggcttcatccactcggacccacatcctggcaacgttctggtgcggaaaggcccggacgggaaagcggagctggtgctgctggaccacgggctctaccagttcctggaggagaaggaccgcgcagccctctgccagctgtggcgggccatcatcctgcgggacgacgccgccatgagggcgcacgcagccgcactgggggtgcaagactacctcctgttcgccgagatgctcatgcagcgccccgtgcgcctggggcagctgtggggctcgcacctactgagccgcgaagaggcggcctacatggtggacatggcccgcgagcgcttcgaggccgtcatggcggtgctcagggagctgccgcggcccatgctgctggtgctgcgcaacatcaacaccgtgcgcgctatcaacgtggccctcggcgcccccgtggaccgctacttccttatggctaaaagggctgtccggggctggagccgcctggcgggcgccacgtatcggggtgtctacggcaccagcctcctgcgccacgccaaggtcgtctgggagatgctcaagtttgaagtggcgctcaggctggagaccttggccatgcggctgaccgccctcctggctcgtgctctggtccacctgagcctcgtgcccccagcggaggagctctaccagtacctggagacctagggtgcagccgcccagggccggcggggcccttttcaccttgggctgacggaggtggcggggctagaggtgtagacaccccgagccccgtgggcactcgcactggggggctgtgacagcagctgggccaggaggccgtgtaatgaccacacactcctctcaagcaaaaaaaaaa

SEQ ID NO: 31480 - DNA, 890 bp, Homo Sapiens; identical to SEQ ID NO: 26228

SEQ ID NO: 31481 - DNA, 2537 bp, Homo Sapiens
gaggtggaggcgagcgaacagagggagggacccgcccgccgcgccccggccgctgggcatgtgtgtccgcaggcgcccgacgctgccgatgtcccggggctgagcagcgcccaggtgtcccggacagtgcgtgcgagcgtgtgtgtccgcgcaggcgagcaccgcgccggccctgagcctcccgctcgctccccacggccgcggtgcatgttcgcctcctgccactgtgtgccgagaggcaggaggaccatgaaatgatccactttcggagctccagcgtcaaatcgctcagccaggagatgagatgcaccatccggctgctggacgactcggagatctcctgccacatccagagggaaaccaaagggcagtttctcattgaccacatctgcaactactacagcctgctggagaaggactactttggcattcgctatgtggacccagagaagcaaaggcactggcttgaacctaacaagtccatcttcaagcaaatgaaaactcatccaccatacaccatgtgctttagagtgaaattctacccacatgaacccttgaagattaaagaagagctcacaagataccttttataccttcagattaaaagggacatttttcatggccacctgctgtgctccttttctgatgctgcctacctgggtgcctgtattgttcaagctgagcttggtgattacgatcctaatgagcatcctgagaattacatcagtgagtttgagattttccccaagcagtcacagaagctggaaagaaaaatagtggaaattcataaaaatgaactcagggggcagagcccaccagttgctgaatttaacttgctcctgaaagctcacactttggaaacctacggggtggatcctcacccatgcaaggattcaacaggcacaacaacatttttaggattcacagctgcaggctttgtggtctttcagggaaataagagaatccatttgataaaatggccagatgtctgcaaattgaagtttgaagggaagacattttatgtgattggcacccagaaggagaaaaaagccatgttggcattcaatacttcaacaccagctgcctgcaaacatctttggaagtgtggagtggaaaaccaggccttttataagtatgcaaaatccagtcagatcaagactgtatcaagcagcaagatattttttaaaggaagtagatttcgatatagtgggaaagttgccaaagaggtggtggaggccagttccaagatccagagggagcctcctgaggtgcacagagccaacattactcagagccgcagttcccactccttgaacaaacagctcatcattaacatggaacccctgcagcccctgcttccttcccccagcgagcaagaagaagaacttcctctgggtgagggtgttccattgcctaaagaggagaacatttctgctcccttgatctccagctccccagtgaaggcagcccgggagtatgaagatccccctagtgaagaggaagataaaataaaagaagaacctttaaccatctctgaactagtgtacaacccaagtgccagcctgctccccacccctgtggatgacgatgagattgacatgctctttgactgtccttctaggcttgagttggaaagagaagacacagattcatttgaggatctggaagcagatgaaaacgcctttttgattgctgaagaagaggagctgaaggaggctcgccgtgctttgtcgtggagctacgacattctgactggccatattcgggtgaacccactggtcaagagtttttccaggctccttgtggtgggcctgggactgctgctctttgtatttcccctgctcctcctccttttggagtcaggtattgatctctccttcttatgcgaaatccgccagacaccagagtttgagcagtttcactatgaatactactgtcccctcaaggagtgggtggctgggaaagtccacctcatcctctacatgctgggttgctcatgaagttaatctctcacgtgactaagggctatattcaatgctagtgatttctttttttcagcaaatgcctggttctgaagggtcacggggctgtcaacaggtgttccttactcataattgattattcaaacctttaagttagctttccataattcactgcacttaaataagtttaaatcaaatacagttattttagttacaggttaggaagatggtctttaaataaccaaaaatatgtttattttttattatagtgtagacatacccttcatctattatatcataatacatgttacattggactgaattagattttcccatttctaatagttggcaccattataagctataaggttcagaatcagaattttagtaacaactcaagagaaagttgttgaatataatccttagtgaagacagtgtcctctaaccaatgcctatacaactaaatttatgctgggtttttggttttgtttttttaaaaatatttttatgtgttcaaactattttggtaaatttttagcaaaaaaaaaaaaaaaa

SEQ ID NO: 31482 - DNA, 4579 bp, Homo Sapiens
ggactcaggaagagatagacccataatgatgctgcctcaaaactcgtggcatattgattttggaagatgctgctgtcatcagaaccttttctctgctgtggtaacttgcatcctgctcctgaattcctgctttctcatcagcagttttaatggaacagatttggagttgaggctggtcaatggagacggtccctgctctgggacagtggaggtgaaattccagggacagtgggggactgtgtgtgatgatgggtggaacactactgcctcaactgtcgtgtgcaaacagcttggatgtccattttccttcgccatgtttcgttttggacaagccgtgactagacatggaaaaatttggcttgatgatgtttcctgttatggaaatgagtcagctctctgggaatgtcaacaccgggaatggggaagccataactgttatcatggagaagatgttggtgtgaactgttacggtgaagccaatctgggtttgaggctagtggatggaaacaactcctgttcagggagagtggaggtgaaattccaagaaaggtggggaactatatgtgatgatgggtggaacttgaatactgctgccgtggtgtgcaggcaactaggatgtccatcttcttttatttcttctggagttgttaatagccctgctgtattgcgccccatttggctggatgacattttatgccaggggaatgagttggcactctggaattgcagacatcgtggatggggaaatcatgactgcagtcacaatgaggatgtcacattaacttgttatgatagtagtgatcttgaactaaggcttgtaggtggaactaaccgctgtatggggagagtagagctgaaaatccaaggaaggtgggggaccgtatgccaccataagtggaacaatgctgcagctgatgtcgtatgcaagcagttgggatgtggaaccgcacttcacttcgctggcttgcctcatttgcagtcagggtctgatgttgtatggcttgatggtgtctcctgctccggtaatgaatcttttctttgggactgcagacattccggaaccgtcaattttgactgtcttcatcaaaacgatgtgtctgtgatctgctcagatggagcagatttggaactgcgactagcagatggaagtaacaattgttcagggagagtagaggtgagaattcatgaacagtggtggacaatatgtgaccagaactggaagaatgaacaagcccttgtggtttgtaagcagctaggatgtccgttcagcgtctttggcagtcgtcgtgctaaacctagtaatgaagctagagacatttggataaacagcatatcttgcactgggaatgagtcagctctctgggactgcacatatgatggaaaagcaaagcgaacatgcttccgaagatcagatgctggagtaatttgttctgataaggcagatctggacctaaggcttgtcggggctcatagcccctgttatgggagattggaggtgaaataccaaggagagtgggggactgtgtgtcatgacagatggagcacaaggaatgcagctgttgtgtgtaaacaattgggatgtggaaagcctatgcatgtgtttggtatgacctattttaaagaagcatcaggacctatttggctggatgacgtttcttgcattggaaatgagtcaaatatctgggactgtgaacacagtggatggggaaagcataattgtgtacacagagaggatgtgattgtaacctgctcaggtgatgcaacatggggcctgaggctggtgggcggcagcaaccgctgctcgggaagactggaggtgtactttcaaggacggtggggcacagtgtgtgatgacggctggaacagtaaagctgcagctgtggtgtgtagccagctggactgcccatcttctatcattggcatgggtctgggaaacgcttctacaggatatggaaaaatttggctcgatgatgtttcctgtgatggagatgagtcagatctctggtcatgcaggaacagtgggtggggaaataatgactgcagtcacagtgaagatgttggagtgatctgttctgatgcatcggatatggagctgaggcttgtgggtggaagcagcaggtgtgctggaaaagttgaggtgaatgtccagggtgccgtgggaattctgtgtgctaatggctggggaatgaacattgctgaagttgtttgcaggcaacttgaatgtgggtctgcaatcagggtctccagagagcctcatttcacagaaagaacattacacatcttaatgtcgaattctggctgcactggaggggaagcctctctctgggattgtatacgatgggagtggaaacagactgcgtgtcatttaaatatggaagcaagtttgatctgctcagcccacaggcagcccaggctggttggagctgatatgccctgctctggacgtgttgaagtgaaacatgcagacacatggcgctctgtctgtgattctgatttctctcttcatgctgccaatgtgctgtgcagagaattaaactgtggagatgccatatctctttctgtgggagatcactttggaaaagggaatggtctaacttgggccgaaaagttccagtgtgaagggagtgaaactcaccttgcattatgccccattgttcaacatccggaagacacttgtatccacagcagagaagttggagttgtctgttcccgatatacagatgtccgacttgtgaatggcaaatcccagtgtgacgggcaagtggagatcaacgtgcttggacactggggctcactgtgtgacacccactgggacccagaagatgcccgtgttctatgcagacagctcagctgtgggactgctctctcaaccacaggaggaaaatatattggagaaagaagtgttcgtgtgtggggacacaggtttcattgcttagggaatgagtcacttctggataactgtcaaatgacagttcttggagcacctccctgtatccatggaaatactgtctctgtgatctgcacaggaagcctgacccagccactgtttccatgcctcgcaaatgtatctgacccatatttgtctgcagttccagagggcagtgctttgatctgcttagaggacaaacggctccgcctagtggatggggacagccgctgtgccgggagagtagagatctatcacgacggcttctggggcaccatctgtgatgacggctgggacctgagcgatgcccacgtggtgtgtcaaaagctgggctgtggagtggccttcaatgccacggtctctgctcactttggggaggggtcagggcccatctggctggatgacctgaactgcacaggaatggagtcccacttgtggcagtgcccttcccgcggctgggggcagcacgactgcaggcacaaggaggacgcaggggtcatctgctcagaattcacagccttgaggctctacagtgaaactgaaacagagagctgtgctgggagattggaagtcttctataacgggacctggggcagcgtcggcaggaggaacatcaccacagccatagcaggcattgtgtgcaggcagctgggctgtggggagaatggagttgtcagcctcgcccctttatctaagacaggctctggtttcatgtgggtggatgacattcagtgtcctaaaacgcatatctccatatggcagtgcctgtctgccccatgggagcgaagaatctccagcccagcagaagagacctggatcacatgtgaagatagaataagagtgcgtggaggagacaccgagtgctctgggagagtggagatctggcacgcaggctcctggggcacagtgtgtgatgactcctgggacctggccgaggcggaagtggtgtgtcagcagctgggctgtggctctgctctggctgccctgagggacgcttcgtttggccagggaactggaaccatctggttggatgacatgcggtgcaaaggaaatgagtcatttctatgggactgtcacgccaaaccctggggacagagtgactgtggacacaaggaagatgctggcgtgaggtgctctggacagtcgctgaaatcactgaatgcctcctcaggtcatttagcacttattttatccagtatctttgggctccttctcctggttctgtttattctatttctcacgtggtgccgagttcagaaacaaaaacatctgcccctcagagtttcaaccagaaggaggggttctctcgaggagaatttattccatgagatggagacctgcctcaagagagaggacccacatgggacaagaacctcagatgacacccccaaccatggttgtgaagatgctagcgacacatcgctgttgggagttcttcctgcctctgaagccacaaaatgactttagacttccagggctcaccagatcaacctctaaatatctttgaaggagacaacaacttttaaatgaataaagaggaagtcaagttgccctatggaaaacttgtccaaataacatttcttgaacaataggagaacagctaaattgataaagactggtgataataaaaattgaattatgtatatcactgtt

SEQ ID NO: 31483 - DNA, 2256 bp, Homo Sapiens
ctcctcttgctctaagcagggtgtttgaccttctagtcgactgcgtcccctgtacccggcgccagctgtgttcctgaccccagaataactcagggctgcaccgggcctggcagcgctccgcacacatttcctgtcgcggcctaagggaaactgttggccgctgggcccgcggggggattcttggcagttggggggtccgtcgggagcgagggcggaggggaagggagggggaaccgggttggggaagccagctgtagagggcggtgaccgcgctccagacacagctctgcgtcctcgagcgggacagatccaagttgggagcagctctgcgtgcggggcctcagagaatgaggccggcgttcgccctgtgcctcctctggcaggcgctctggcccgggccgggcggcggcgaacaccccactgccgaccgtgctggctgctcggcctcgggggcctgctacagcctgcaccacgctaccatgaagcggcaggcggccgaggaggcctgcatcctgcgaggtggggcgctcagcaccgtgcgtgcgggcgccgagctgcgcgctgtgctcgcgctcctgcgggcaggcccagggcccggagggggctccaaagacctgctgttctgggtcgcactggagcgcaggcgttcccactgcaccctggagaacgagcctttgcggggtttctcctggctgtcctccgaccccggcggtctcgaaagcgacacgctgcagtgggtggaggagccccaacgctcctgcaccgcgcggagatgcgcggtactccaggccaccggtggggtcgagcccgcaggctggaaggagatgcgatgccacctgcgcgccaacggctacctgtgcaagtaccagtttgaggtcttgtgtcctgcgccgcgccccggggccgcctctaacttgagctatcgcgcgcccttccagctgcacagcgccgctctggacttcagtccacctgggaccgaggtgagtgcgctctgccggggacagctcccgatctcagttacttgcatcgcggacgaaatcggcgctcgctgggacaaactctcgggcgatgtgttgtgtccctgccccgggaggtacctccgtgctggcaaatgcgcagagctccctaactgcctagacgacttgggaggctttgcctgcgaatgtgctacgggcttcgagctggggaaggacggccgctcttgtgtgaccagtggggaaggacagccgacccttggggggaccggggtgcccaccaggcgcccgccggccactgcaaccagccccgtgccgcagagaacatggccaatcagggtcgacgagaagctgggagagacaccacttgtccctgaacaagacaattcagtaacatctattcctgagattcctcgatggggatcacagagcacgatgtctacccttcaaatgtcccttcaagccgagtcaaaggccactatcaccccatcagggagcgtgatttccaagtttaattctacgacttcctctgccactcctcaggctttcgactcctcctctgccgtggtcttcatatttgtgagcacagcagtagtagtgttggtgatcttgaccatgacagtactggggcttgtcaagctctgctttcacgaaagcccctcttcccagccaaggaaggagtctatgggcccgccgggcctggagagtgatcctgagcccgctgctttgggctccagttctgcacattgcacaaacaatggggtgaaagtcggggactgtgatctgcgggacagagcagagggtgccttgctggcggagtcccctcttggctctagtgatgcatagggaaacaggggacatgggcactcctgtgaacagtttttcacttttgatgaaacggggaaccaagaggaacttacttgtgtaactgacaatttctgcagaaatcccccttcctctaaattccctttactccactgaggagctaaatcagaactgcacactccttccctgatgatagaggaagtggaagtgcctttaggatggtgatactgggggaccgggtagtgctggggagagatattttcttatgtttattcggagaatttggagaagtgattgaacttttcaagacattggaaacaaatagaacacaatataatttacattaaaaaataatttctaccaaaatggaaaggaaatgttctatgttgttcaggctaggagtatattggttcgaaatcccagggaaaaaaataaaaataaaaaattaaaggattgt

SEQ ID NO: 31484 - DNA, 3534 bp, Homo Sapiens
aaaacaagcaggtgtcccaccgtgccagatacgctgcctaaactgcttccagcttctttttttttttttccccccttctgcaataagtctgtgatcagccacgggacagaggcgccagcagcctgcctgtgacaggcatcaggttagctggctcccactcgggtggcgcgcccaggatataaatccgggcgcgggcccctgctgtggctcctctccctgcacactcaggagagggagcttccttctaaagacctttcttttatctgaagccgcacagcccggcaggctgtgctgacttggtggaggcagcagcggcagagcagcctgagcagcagcctgagcaggaaacctgctggggtggggagggcaggtgtctgcagcccctgagaagaaggccctggtgggccccagaccctggcatcgtttcaggggaggtctctagccgccccagcctgcaccatgtgggccccaaggtgtcgccggttctggtctcgctgggagcaggtggcagcgctgctgctgctgctgctactgctcggggtgcccccgcgaagcctggcgctgccgcccatccgctattcccacgccggcatctgccccaacgacatgaatcccaacctctgggtggacgcacagagcacctgcaggcgggagtgtgagacggaccaggagtgtgagacctatgagaagtgctgccccaacgtatgtgggaccaagagctgcgtggcggcccgctacatggacgtgaaagggaagaagggcccagtgggcatgcccaaggaggccacatgtgaccacttcatgtgtctgcagcagggctctgagtgtgacatctgggatggccagcccgtgtgtaagtgcaaagaccgctgtgagaaggagcccagctttacctgcgcctcggacggcctcacctactataaccgctgctacatggatgccgaggcctgctccaaaggcatcacactggccgttgtaacctgccgctatcacttcacctggcccaacaccagccccccaccacctgagaccaccatgcaccccaccacagcctccccagagacccctgagctggacatggcggcccctgcgctgctcaacaaccctgtgcaccagtcggtcaccatgggtgagacagtgagcttcctctgtgatgtggtgggccggccccggcctgagatcacctgggagaagcagttggaggatcgggagaatgtggtcatgcggcccaaccatgtgcgtggcaacgtggtggtcaccaacattgcccagctggtcatctataacgcccagctgcaggatgctgggatctacacctgcacggcccggaacgtggctggggtcctgagggctgatttcccgctgtcggtggtcaggggtcatcaggctgcagccacctcagagagcagccccaatggcacggctttcccggcggccgagtgcctgaagcccccagacagtgaggactgtggcgaagagcagacccgctggcacttcgatgcccaggccaacaactgcctgaccttcaccttcggccactgccaccgtaacctcaaccactttgagacctatgaggcctgcatgctggcctgcatgagcgggccgctggccgcgtgcagcctgcccgccctgcaggggccctgcaaagcctacgcgcctcgctgggcttacaacagccagacgggccagtgccagtcctttgtctatggtggctgcgagggcaatggcaacaactttgagagccgtgaggcctgtgaggagtcgtgccccttccccagggggaaccagcgctgtcgggcctgcaagcctcggcagaagctcgttaccagcttctgtcgcagcgactttgtcatcctgggccgagtctctgagctgaccgaggagcctgactcgggccgcgccctggtgactgtggatgaggtcctaaaggatgagaaaatgggcctcaagttcctgggccaggagccattggaggtcactctgcttcacgtggactgggcatgcccctgccccaacgtgaccgtgagcgagatgccgctcatcatcatgggggaggtggacggcggcatggccatgctgcgccccgatagctttgtgggcgcatcgagtgcccgccgggtcaggaagcttcgtgaggtcatgcacaagaagacctgtgacgtcctcaaggagtttcttggcttgcactgaagccccccacccctccctgccccctccctggccttcttccacctatccaccccaatgcctctcagcaaactgggcgaggtcagattagacaggcttgggacagcagggaaacatcaaccgacgtgtcacagaaaaagccacagaaggtctcagatcagcatctattctttgggttcaataaggggttcatatcttttttagctgagggggacaagaggagaagtcagtggacacatggaagttactcgtgaccaccagcttgctcagatattctcctcctcccctcactggccccacacccctggctctcccagtcaccctcccctagccagtctcccagcaagggtttaagagatggccgctgtgtgctggtcacaggaagtgttgaatggattggcttgcaaagggggtaggtggggagagataggagggcccagggactcatgggacacctttcccacagcctcctcgattgctgtgagcagaggccactcggagttaggggcatgggcaatagcaagctggcggcagagtccagcccagcatatgacttgccctgaatggaagctgctgaaacgggtgcctttgggtggtggtcggcttgcctctgaggccaccacggcaccagcagaatacgtatttcttctccttggctgcactggtttgtcgatctagttcagttcaactcagtggatgttctctgaatgcttactgggtgccaggaccacagagagatgttagtcactgcccagttcttagagccccaacacagataccctcatcccagggcccccagacacacccctccgctggactcacaactgtctggagtttctgtctgatggatggtgtgctttcatatgccactggcttccttggacatagatcagacaaaagccccgggatctgtttggtagcaggagaaatgaaggaagatgaaaaagcaggcagggaagggggtagtaaaggactgagagaggagggaggtggctggagaaggaaaaggaacattgctcgatgctcccatctggtggcggcctcaggaacccacgggaacctggaaggaggctctttgtgagacctgggcaaaggatggggcagctcgtcgatgatttttttgtgtttccaggcttcctgtgtgatcctggccctccggccgctagagagaggattgggaaaccccactgtcagctctgcatctgcccccactaccctcctctgccctattctgtccctgcccctccaagctgaagaaggtccttgtggggcgtcctcatttcttcctcaaatataaggaggaagataccaattaaaagctcatagtatcaaaaaaaaaaaaaaaaa

SEQ ID NO: 31485 - DNA, 6931 bp, Homo Sapiens
cgggcatgctcagtgggccgggccggcaggtttgcgtggccgctgagttgccggcgccggctgagccagcggacgccgcgttccttggcggccgccggttcccgggaagttacgtggcgaagccggcttccgaggagacgccgggaggccacgggtgctgctgacgggcgggcgaccgggcgaggccgacgtggccgggctgcgaaagctgcgggaggccgagtgggtggccgcgctcggagggaggtgccggtcgggcgcgccccgtggagaagacccgggcggggcgggcgcttcccggacttttgtccgagttgaattccctccccctgggccgggcccttccggccgcccccgcccgtgccccgctcgctctcgggagatgtttatttgggctgtggcgtgaggagcgggcgggccagcgccgcggagtttcgggtccgaggagcctcgcgcggcgctggagagagacaagatgtccgccagagctgcggccgccaagagcacagcaatggaggaaacagctatatgggaacaacatacagtgacgcttcacagggctcctggatttggatttggaattgcaatatctggtggacgagataatcctcattttcagagtggggaaacgtcaatagtgatttcagatgtgctgaaaggaggaccagctgaaggacagctacaggaaaatgaccgagttgcaatggttaacggagtttcaatggataatgttgaacatgcttttgctgttcagcaactaaggaaaagtgggaaaaatgcaaaaattacaattagaaggaagaagaaagttcaaataccagtaagtcgtcctgatcctgaaccagtatctgataatgaagaagatagttatgatgaggaaatacatgatccaagaagtggccggagtggtgtggttaacagaaggagtgagaagatttggccgagggatagaagtgcaagtagagagaggagcttgtccccgcggtcagacaggcggtcagtggcttccagccagcctgctaaacctactaaagtcacactggtgaaatcccggaaaaatgaagaatatggtcttcgattggcaagccatatatttgttaaggaaatttcacaagatagtttggcagcaagagatggcaatattcaagaaggtgatgttgtattgaagataaatggtactgtgacagaaaatatgtcattgacagatgcaaagacattgatagaaaggtctaaaggcaaattaaaaatggtagttcaaagagatgaacgggctacgctattgaatgtccctgatctttctgacagcatccactctgctaatgcctctgagagagacgacatttcagaaattcagtcactggcatcagatcattctggtcgatcacacgataggcctccccgccgcagccggtcacgatctcctgaccagcggtcagagccttctgatcattccaggcactcgccgcagcagccaagcaatggcagtctccggagtagagatgaagagagaatttctaaacctggggctgtctcaactcctgtaaagcatgctgatgatcacacacctaaaacagtggaagaagttacagttgaaagaaatgagaaacaaacaccttctcttccagaaccaaagcctgtgtatgcccaagttggcaaccagatgtggatttacctgtcagtccatctgatggtgtcctacctaattcaactcatgaagatgggatttcttcggcccagcatgaaattggtaaaattcagaaaaggagatagtgtgggtttgcggctggctggtggaaatgatgttggaatatttgtagctggcgttctagaagatagccctgcagccaaggaaggcttagaggaaggtgatcaaattctcagggtaaacaacgtagattttacaaatatcataagagaagaagccgtccttttcctgcttgacctccctaaaggagaagaagtgaccatattggctcagaagaagaaggatgtttatcgtcgcattgtagaatcagatgtaggagattctttctatattagaacccattttgaatatgaaaaggaatctccctatggacttagttttaacaaaggagaggtgttccgtgttgtggataccttgtacaatggaaaactgggctcttggcttgctattcgaattggtaaaaatcataaggaggtagaacgaggcatcatccctaataagaacagagctgagcagctagccagtgtacagtatacacttccaaaaacagcaggcggagaccgtgctgacttctggagattcagaggtcttcgcagctccaagagaaatcttcgaaaaagcagagaggatttgtccgctcagcctgttcaaacaaagtttccagcttatgaaagagtggttcttcgagaagctggatttctgaggcctgtaaccatttttggaccaatagctgatgttgccagagaaaagctggcaagagaagaaccagatatttatcaaattgcaaagagtgaaccacgagacgctggaactgaccaacgtagctctggcattattcgcctgcatacaataaagcaaatcatagatcaagacaaacatgctttattagatgtaacaccaaatgcagttgatcgtcttaactatgcccagtggtatccaattgttgtatttcttaaccctgattctaagcaaggagtaaaaacaatgagaatgaggttatgtccagaatctcggaaaagtgccaggaagttatacgagcgatctcataaacttcgtaaaaataatcaccatctttttacaactacaattaacttaaattcaatgaatgatggttggtatggtgcgctgaaagaagcaattcaacaacagcaaaaccagctggtatgggtttccgagggaaaggcggatggtgctacaagtgatgaccttgatttgcatgatgatcgtctgtcctacctgtcagctccaggtagtgaatactcaatgtatagcacggacagtagacacacttctgactatgaagacacagacacagaaggcggggcctacactgatcaagaactagatgaaactcttaatgatgaggttgggactccaccggagtctgccattacacggtcctctgagcctgtaagagaggactcctctggaatgcatcatgaaaaccaaacatatcctccttactcaccacaagcgcagccacaaccaattcatagaatagactcccctggatttaagccagcctctcaacaggtgtatagaaaggatccatatcccgaggaaatgatgaggcagaaccatgttttgaaacagccagccgttagtcacccagggcacaggccagacaaagagcctaatctgacctatgaaccccaactcccatacgtagagaaacaagccagcagagacctcgagcagcccacatacagatacgagtcctcaagctatacggaccagttttctcgaaactatgaacatcgtctgcgatacgaagatcgcgtccccatgtatgaagaacagtggtcatattatgatgacaaacagccctacccatctcggccaccttttgataatcagcactctcaagaccttgactccagacagcatcccgaagagtcctcagaacgagggtactttccacgttttgaagagccagcccctctgtcttacgacagcagaccacgttacgaacaggcacctagagcatccgccctgcggcacgaagagcagccagctcctgggtatgacacacatggtagactcagaccggaagcccagccccacccttcagcagggcccaagcctgcagagtccaagcagtattttgagcaatattcacgcagttacgagcaagtaccaccccaaggatttacctctagagcaggtcattttgagcctctccatggtgctgcagctgtccctccgctgataccttcatctcagcataagccagaagctctgccttcaaacaccaaaccactgcctccacccccaactcaaaccgaagaagaggaagatccagcaatgaagccacagtctgtactcaccagagttaagatgtttgaaaacaaaagatctgcatccttagagaccaagaaggatgtaaatgacactggcagttttaagcctccagaagtagcatctaaaccttcaggtgctcccatcattggtcccaaacccacttctcagaatcaattcagtgaacatgacaaaactctgtacaggatcccagaacctcaaaaacctcaactgaagccacctgaagatattgttcggtccaatcattatgaccctgaagaagatgaagaatattatcgaaaacagctgtcatactttgaccgaagaagttttgagaataagcctcctgcacacattgccgccagccatctctccgagcctgcaaagccagctcattctcagaatcaatcaaatttttctagttattcttcaaagggaaagcctcctgaagctgatggtgtggatagatcatttggcgagaaacgctatgaacccatccaggccactccccctcctcctccattgccctcgcagtatgcccagccatctcagcctgtcaccagcgcgtctctccacatacattctaagggagcacatggtgaaggtaattcagtgtcattggattttcagaattccttagtgtccaaaccagacccacctccatctcagaataagccagcaactttcagaccaccaaaccgagaagatactgctcaggcagctttctatccccagaaaagttttccagataaagccccagttaatggaactgaacagactcagaaaacagtcactccagcatacaatcgattcacaccaaaaccatatacaagttctgcccgaccatttgaacgcaagtttgaaagtcctaaattcaatcacaatcttctgccaagtgaaactgcacataaacctgacttgtcttcaaaaactcccacttctccaaaaactcttgtgaaatcgcacagtttggcacagcctcctgagtttgacagtggagttgaaactttctctatccatgcagagaagcctaaatatcaaataaataatatcagcacagtgcctaaagctattcctgtgagtccttcagctgtggaagaggatgaagatgaagatggtcatactgtggtggccacagcccgaggcatatttaacagcaatgggggcgtgctgagttccatagaaactggtgttagtataattatccctcaaggagccattcccgaaggagttgagcaggaaatctatttcaaggtctgccgggacaacagcatccttccacctttagataaagagaaaggtgaaacactgctgagtcctttggtgatgtgtggtccccatggcctcaagttcctgaagcctgtggagctgcgcttaccacactgtgatcctaaaacctggcaaaacaagtgtcttcccggagatccaaattatctcgttggagcaaactgtgtttctgtccttattgaccacttttaactcttgaaatataggaacttaaataatgtgaaactggattaaacttaatctaaatggaaccactctatcaagtattataccttttttagagttgatactacagtttgttagtatgaggcatttgtttgaactgataaagatgagtgagcatgcccctgaaccatggtcggaaaacatgctacacactgcatgtttgtgattgacgggactgttggtattggctagaggttcaaagatattttgctttgtgatttttgtaatttttttatcgtcactgcttaacttcacatattgatttccgttaaaataccagccagtaaatgggggtgcatttgaggtctgttctttccaaagtacactgtttcaaactttactatggccctggcctagcatacgtacacattttattttattatgcatgaagtaatatgcacacattttttaaatgcacctggaatatataaccagtgttgtggatttaacagaaatgtacagcaaggagatttacaactgggggagggtgaagtgaagacaatgacttactgtacatgaaaacacatttttcttagggaaggatacaaaagcatgtgagactggttccatggcctcttcagatctctaacttcaccatattaccacagacatactaaccagcagaaatgccttaccctcatgttcttaattcttagctcattctccttgtgttactaagtttttatggcttttgtgcattatctagatactgtatcatgacaaagactgagtacgttgtgcatttggtggtttcagaaatgtgttatcacccagaagaaaatagtggtgtgatttggggatatttttttcttttcttttcttttctttttttttttttttgacaaggggcagtggtggttttctgttctttctggctatgcatttgaaaattttgatgttttaaggatgcttgtacataatgcgtgcataccacttttgttcttggtttgtaaattaacttttataaactttaccttttttatacataaacaagaccacgtttctaaaggctacctttgtattctctcctgtacctcttgagccttgaactttgacctctgcagcaataaagcagcgtttctatgacacatgcaaggtcattttttttaagaaaaaggatgcacagagttgttacatttttaagtgctgcatttaaaagatacagttactcagaattctctagtttgattaaattcttgcaaagtatccctactgtaatttgtgatacaatgctgtgccctaaagtgtatttttttactaatagacaatttattatggcacatcagcacgatttctgtttagataatacaccactacattctgttaatcattaggtgtgactgaatttcttttgccgttattaaaaatctcaaatttctaaatctccaaaataaaactttttaaaataaaaaaaaa

SEQ ID NO: 31486 - DNA, 3072 bp, Homo Sapiens
gaggatcttcagccaagatggtttttcttccttcagtgagatcttttgtctatttggcaatggaagaagattagtattagaggatacgtgttggaaatgtggtttttcaggagaccgatgtccagtgtttttttttttacaatcatttccaaccatttcagagctgggtctgccccatcaaagagcaagctctggactgcagatcctcattacgttttcaaccctgtccagtacatcataactgtttaagatagactgactgcaagccctaaatttaaaagactgttaacaaaacgccaaataagatgggtggagaaggatgtagacaagaatgttacaagggaaacaaaaacgatttttgcatttgagtgaaactactgtgatttctgaagaccaccttccttctttcccagacggtccctgaggaattacagaatggtcgaggctttggttatgtggtggccttccggccctacggtaaaatgatctggatgctgacagtgctggcctcagctgatgcctctagatacgtgttcaggaatgagagcgtgcaccccttctctccctttgaggttaaagtaggtgtcttcaacaacaaaggagaaggccctttcagtcccaccacggtggtgtattctgcagaagaagaacccaccaaaccaccagccagtatctttgccagaagtctttctgccacagatattgaagttttctgggcctccccactggagaagaatagaggacgaatacaaggttatgaggttaaatattggagacatgaagacaaagaagaaaatgctagaaaaatacgaacagttggaaatcagacatcaacaaaaatcacgaacttaaaaggcagtgtgctgtatcacttagctgtcaaggcatataattctgctgggacaggcccctctagtgcaacagtcaatgtgacaacccgaaagccaccaccaagtcaaccccccggaaacatcatatggaattcatcagactccaaaattatcctgaattgggatcaagtgaaggccctggataatgagtcggaagtaaaaggatacaaagtcttgtacagatggaacagacaaagcagcacatctgtcattgaaacaaataaaacatcggtggagctttctttgcctttcgatgaagattatataatagaaattaagccattcagcgacggaggagatggcagcagcagtgaacaaattcgaattccaaagatatcaaatgcctacgcgagaggatctggggcttccacttcgaatgcatgtacgctgtcagccatcagtacaataatgatttccctcacagctaggtccagtttatgacaaaagttatctgaaggacttgctgtttataatataagcaacatttagctagttgttttgaagacacccagtactaagtaatattgttgttcaagtacatcttattactggaataaaaatgttttttgcttctttaggaatggcattatacagtacttcctcaaagcaaatctagctttgtctgaagtttctttggaaactctgcaatgcactgaagacatctgtaatatgatgttaccaaagcagtttacatatgtccttatatgcatattttttattatatatttagtgttttatagaattttttaaagttaacatataatgtagatattaattttttcctcggctgtaaaatgctatgggcaacacaatcatgcaattataatttgaaaatatttcctttaaagacagagtttgaaactcatcttggtaaataaattgcaaattactcgtacagttttacaaggatctcatggcagaacagcggaagacttggtccgtaactcaaggctgttgtatgcaaactactcttctagtggttaatgcacttgacatgtacagtatgtttcccatgccgttgtgattttgacatgtacagtatgttttcatgccgttgtgaattttgttgttcaacccaacttgagatggtttcaggaatggctgcaatctcaaaagctcaatgtactgcccaagaggcaccttgtgcaatattcccatccctgaatttagcattgtacaggaagattttcttttcactcaactgagttagcattgtctttgtggtagcattatcttagacattaaatttgaagtaacatatatcctgtagtaacatagacccaaagttactatagtcaaccaagtctttcaaaggataaaagatcattttattatctttaactgtatctattttgaatgtaaatttaaaaaaagtaattctctgtcaatggattcgtaatttctttacaaaatttcttatatataatatgtgtatctctgtaataatagagcccttcttttgaatcaaaattacatatggactttggaagattgctcctatttcaacaaatagttgctgcaagaatttttaatatgactctataaaagctctttagtacaattgtatggtttcttgatgattctgttttgcaataggtagcctagttgctttatatgctttaccttctaggtcttaaaatcacacattggaaaatgacaatatcaacaaaactgtattcttatgaaaagaactatttgttacaatgagaaaggttttgtgagtaaaccctactggacagtgacataaaaggcaatggaattttctataaacattttctcatgtaaacatgctgccaccttttcttctttctcagagaactcaaatttgctatagtttgtcatttttgcttacaaataatataacttttcaaccttctagttatatttatccaataaagtcataatcgggattccatttgtgtaaaaactagggtggtaaccggaaaaaaatattgtcagtatttcaagctgtgttcctttcttagtttgatatggttacttctatgttgaaataaaatttaaaatcacatgcaaaaaaaaaatcagcaaaataataaaatgaacgaaaaaaaatgacacccagggagttcccaaccccagtgtaaatgatatttaccagtgatctagcatatgtaatcttttttaaaggtattgttaataaatattctgtcatttgtaaaga

SEQ ID NO: 31487 - DNA, 2047 bp, Homo Sapiens
ggcggcgggcgggcgcggccgggagcggagggccgcggtcgcgaagaggatgaagagagagttcccgaacaagtcggaagcagctcacaacaccggacgccgcgcggcagggctgtggacctggggtggtttcgtgtcccagtcttaggaaactacgcgcgaggcaccgtgctgaggcgtagaggtcaccctcgggaggtttcggtgaaacctggtgggaaattccgggcaggcgcccggagtcgcgcccaagtaggcagctccgtgccgccagacttgtgttcgggggagttgagacgaactgcacgggtgggattgcatggctctgccctcccagcgttgacaactcgccccgaccgcccaggaagcgcgagcttactggctccagaagtgatgatgctgggtggaagtcgcagcatgtgaagagttgccggttgttatgggattaaaaaagatgaaagggttatcttatgatgaggcttttgctatggctaatgatcccttggaaggcttccatgaagtaaaccttgcttcacctacttctccggaccttcttggtgtgtatgaatcaggaactcaagagcagactacctcaccaagtgtcatctaccggccacacccttcagctttatcctctgtacctatccaggcaaatgcattagatgtttctgaacttcctacacaacccgtgtattcatcccccagacgtttaaattgtgcggaaatatctagtatcagctttcatgttacagacccagccccttgctctacctctggagtcacagctggattaactaaattaactacaagaaaggacaactataatgcagagagagagtttttacagggtgctactataacagaggcttgcgatggcagtgatgatatttttgggttgagtactgatagtctgtctcgtttacgaagcccatctgttttggaagttagagaaaagggctatgaacgattaaaagaagaactcgcaaaagctcagagggaactgaagttaaaagatgaagaatgtgagaggctttcaaaagtgcgagatcaacttggacaggaattggaagaactcacagctagtctatttgaggaagctcataaaatggtgagagaagcaaatatcaagcaggcaacagcagaaaaacagctaaaagaagcacaaggaaaaattgatgtacttcaagctgaagtagctgcattgaagacacttgtattgtccagttctccaacatcacctacgcaggagcctttgccaggtggaaagacaccttttaaaaaggggcatacaagaaataaaagcacaagcagtgctatgagtggcagtcatcaggacctcagtgtgatacagccaattgtaaaagactgcaaagaggctgacttatccttgtataatgaattccgattgtggaaggatgagcccacaatggacaggacgtgtcctttcttagacaaaatctaccaggaagatatctttccatgtttaacattctcaaaaagtgagttggcttcagctgttctggaggctgtggaaaacaatactctaagcattgaaccagtgggattacaacctatccggtttgtgaaagcttctgcagttgaatgcggaggaccaaaatcacttctgtatgtaacttttttacatacattcgatacattcagcagggactcgtgaaacagcaggatgttgatcagatgttttgggaggttatgcagttgagaaaagagatgtcattggcaaagctgggttatttcaaagaggaactctgatgctctgcgtgggaccatgcctgaactccccgaataactgaaaaatggctgaatatttttatggttacttgatatttatttccaaggagtgagcctaagacttttttccccttttgcaaattgctctaagaagtaccatgatttcttttaaactgatctatgctgtgtttgcttattctttagttgaacacactatgaagaattccaggtgtactagtgaatgtaatttatagttgccaaaaaaaaaaaaaacctgaaataaataaatgttagattg

SEQ ID NO: 31488 - DNA, 3966 bp, Homo Sapiens
ccagccccagcatcgcgcgccgcagccgcggccccgcagctccgcccccggcccggcccggccccgggcccgctcgcccgccgccccgcatggagctgtcagccatcggcgagcaggtgttcgccgtggagagcatccggaagaagcgcgtgcggaagggtaaagtcgagtatctggtgaagtggaaaggatggcccccaaagtacagcacgtgggagccagaagagcacatcttggacccccgcctcgtcatggcctacgaggagaaggaggagagagaccgagcatcggggtataggaagagaggtccgaaacccaagcggcttctgctgcagcggctgtacagcatggacctgcggagctcccacaaggccaagggcaaggagaagctctgcttctccctgacgtgcccactcggcagcgggagccctgagggggtggtcaaggcgggggcacctgagctggtggacaagggccccttggtgcccaccctgcccttcccgctccgcaagccccgaaaggcccacaagtacctgcggctctcgcgcaagaagttcccgccccgcgggcccaacctggagagccacagccatcgacgggagctcttcctgcaggagccaccggccccagacgtcctgcaggcggctggcgagtgggagcctgctgcgcagccccctgaagaggaggcagatgccgacctggccgaggggccccctccctggacacctgcgctcccctcaagtgaggtgaccgtgaccgacatcaccgccaactccatcaccgtcaccttccgcgaggcccaggcagctgagggcttcttccgagaccgcagtgggaagttctgaatcaccgtttttactcttcttaaactgttttcttttgggcttggggtgggacttccagagatagggatgggttgggggcggggtaattattttatttaaaaaaataccgagcagcaaaaggggagaagatcccactactctcccaccacctgccctttctctgagggacgtttaccacgaggcctcaggctggggatggagagagttgctctgggagttggggtaccacccccagggcaggatggggacaggatcacctgcccgggacaccaccattatcattctcctctagtgacgcagcagctggttctgggagttaaaggagcattggaaggcccaaaccctctcccttgagtggccaccccagcctggttggctggttttccccttttctcttgtttcaattgggtctttaccttgaactctcctctctggctttgcggtgggctgtggaggctggttttgaccaaaagtgagtggggcgggaggaaggggcaggaggaagggttgaggttacttggggcgagtcccttccccttcagagaggcttctatccttcccagggaggaggcgccgctgagacccttctgctgagagctctgccctcccctcatcacctggcctgtgcagaaacgctcatgcacacctggctgcacaggtgtgcacgcattacccttcgcgtgtacgttcccatgtgccccgtgaaagcatgtgtggctgcagacgtgtccacatgggccttgcgaacctgggttagaaaccctggccaggcgaacgtggggtgattcacagcacaaaagacctcaccaccacacctgcactcaccccaccttgcatgcaccttgctacctgcttgcggctttcagtggagggcaggggtctggcacaggtgcgatggcaccccatgctccaggcatacagatgtggtttctcggctgcaccgggccaggctgcgggtgtgcaggcgtctgctaagttgtgtgatgtatcagcacaggctttgagacgtctggaccctgtccttcctcccgtgaggggttcttgttctttctgactcaggtgacttttcagcccttccaattcccctctttttctgccctcccctccaactcagccaacccaggtgtgggcagtcagggagggagggagtgtcccaccacgttctcagggcagcccttgactcctaagccccttcctccttccattctgcatcccctccccatccaacctaaatgccacagctggggctgagctgtattcctgtggagggacctctgccgtgcctctctgaggtcaggctgtgctgtgtgatgggcaggctttgccccagcccacccctggcaaggtgcacttgttttctggtttgtacaaggtgtcctgggggcccgtggcttccctgccagtgaggagtgacttctccctctcttccagtcctgtaggggagacaaaaccagattggggggcccaaggggagcatggaaaaggccggctcccctgtctttccttggctgtcagagtcagggtaacacacaccaagagtggagtgcggccagcaagtttgagacctgcccgccctcctcgcagctctgctctgtgtcctcaggaagtcacagagtctactgaggcaaggagagggtgattctttccccaaatcccttcttccctggttcccaaaccaaagacagcctgcagccctttctgcatggggtgctctgttgacaggcttcccagatccctgagtctctctttccttcctcctcgatctttagttgtccacggtcaattcagtgcttccattgggggacagtcccctccgggatgacctgattcacctccagcccagggaatggaatctagaggaatacgtggggtgggtctggacaaggagcggcaggaatcaccacccatctccagctgtggagccctgtggaggggaaggggaagcttggggttcagaggggactcttccaggagaggggtgcccagcggaggtaaagatgatagagggttgtggggggtctctagttgaatgttttggcccatgactttggaacatggctggcagcttccagcagaagtcacgctccccatcccccaggggacataggacctttttcctgcttcctggtcactttcaaagaactatttgcgcaatctgtgggtctgtggattcacggggctttctgtgtgggtgctgcagttgcttttgtctgcagcagcaggacacatctttcctcttactcagccctttatggcccatggggaactccgtggctcagggagagctgaactccaggggtgtgacctgggacgggtgggcctgaggtgcccagctcagggcagccaggtggctcatgggctgtagtgagccagctccctgggggaaaaggctgtgggccgttaggaccatcctccaggacaggtgacctctatgaggtcacctacggctgtggccgtgcaggcctccttccagcccagagtggcccagtagagcaaggcagacagtgacctccacccccgcagccctcttaaaaggccagtactcttgggggtggggggagggtttagaaagcatttgcccatctgcctttctttcccccagcccccacccgctttgaatgtagagacccgtgggcacttttccttttgtggtggggggtgcggaggaggtacccccacccctggcacagccgcctggaatgcaggactgtcactgctgttcgggtgatgacctcgttgccaagctcctcctgtccccttgttctgggggcaggcgctgtgcttctgtgaggtggtttagcttttgctttcgaagtggccagctgcggccaccaggtctcagcacaagagcgcttcctttgcacagaatgagcttcgagctttgttcagactaaatgaatgtatctgggaggggtcgggggcacgagttgattccaagcacatgcctttgctgagtgtgtgtgtgctgggagagtcagagtggatgtagagcgcggttttatttttgtactgacattggtaagagactgtatagcatctatttatttagatgatttatctggtaaatgaggcaaaaaaattattaaaaatacattaaagatgatttaaaaaaaagaaaaaa

SEQ ID NO: 31489 - DNA, 10989 bp, Homo Sapiens
ggggccgaggcccctgagggggccccgccgcgatgggcaacctggagagcgccgagggggtcccgggagagcccccctctgtcccgttgttgctgccgcccggcaagatgccgatgcctgagccctgtgagctggaggaaaggttcgccctggtgctgagctccatgaacctgcctccagacaaggcccggctcctgcggcagtatgacaatgagaagaaatgggatctgatctgtgaccaggaacgattccaggtgaagaatcctccccacacttacattcagaaactccagagcttcttggaccccagtgtaactcggaagaagttcaggaggagggtgcaggagtcaaccaaagtactaagggagctggagatctctcttcgcaccaaccacattgggtgggtgcgggaatttctgaatgatgaaaacaaaggcctggatgtactggtggattacctgtcctttgcccagtgttctgtcatgtttgactttgagggtctggaaagtggtgacgatggtgcatttgacaaactccggtcctggagcaggtcaatcgaggacctgcagccacccagcgccctgtcggcccccttcaccaacagcctcgctcgctctgcgcgccagtctgtgctccggtatagcactctccctgggcgcagggccctgaagaactcccgcctagtgagccagaaggatgacgtccacgtctgtatcctttgtctcagagccatcatgaactatcagtacggattcaacctggtcatgtcccacccccatgctgtcaatgagattgcacttagcctcaataacaagaatccaaggaccaaagcccttgtcttagagcttctggcagctgtgtgtttggtgcgaggaggtcacgaaatcatccttgctgcctttgacaatttcaaagaggtatgcaaggagctgcaccgctttgagaagctgatggagtatttccggaatgaggacagcaatattgacttcatggtggcctgcatgcagttcatcaacatcgtggtgcactcggtggaggacatgaacttccgggtccacctgcagtatgagtttaccaagctggggctagaggagttcctgcagaagtcaaggcacacagagagcgagaagctgcaggtgcagattcaggcatatctggacaacgtgtttgatgtcgggggtttgttggaggatgctgagaccaagaatgtagccctggagaaggtggaggagttggaggagcatgtgtcccatctcacagagaagcttctggacctagagaatgaaaacatgatgcgggtggcagaactagagaagcagctgctacagcgggagaaggaactagagagcatcaaggagacatatgagaacacaagccaccaggtgcacaccctgcggaggctcattaaagagaaggaggaggcctttcagcgtcgatgtcatttggagccaaatgtccggggcctggagtctgtggacagtgaggccctggccagagtaggccctgcagagctgagtgagggcatgccaccctccgacctggaccttctggctccagccccaccccctgaggaggtcctgcctcttcctccaccaccagctccgcccttgccccctccacctcccccattaccagacaagtgtcccccagccccacctctccctggtgctgcaccctctgtggtgttgacagtgggcctgtcagccattcgaattaagaaacctatcaagaccaagttccggctgcctgtcttcaactggacagcactgaaacccaaccagatcagtggcactgtcttcagcgaacttgatgatgagaagatcttggaggacctggatcttgataagtttgaagaattattcaagacaaaagcgcagggccctgcccttgacctcatctgctccaaaaacaagacagcgcaaaaagctgccagcaaggtgactctgttggaagccaatcgtgccaagaacctggccatcaccctacgcaaggctggccgctcggctgaggagatctgcagggccattcatacgtttgacttgcagacactacctgtggacttcgtggagtgcctgatgcgcttcctgcccacagaggctgaggtaaagctgctgcggcaatatgagcgggagcggcagcccctggaggagttggcagctgaggaccgcttcatgctgctcttcagcaaggtggaacggttgacccagcgaatggctggcatggccttcctggggaacttccaggataacctgcagatgctcacaccgcaactcaatgccatcattgcggcgtccgcttccgtcaagtcttcacagaagctgaagcagatgttggagatcatacttgcactggggaactacatgaacagcagcaagcggggagctgtgtatggcttcaagctccagagcctggatctgctgctggataccaagtccactgaccggaagatgacactgcttcatttcatcgccttgacagtgaaggagaaatacccagacctggctaacttctggcatgagctgcactttgttgagaaggctgcagcagtgtccctggagaacgtgctgctggacgtgaaggagctgggccggggcatggagctgattcggcgtgagtgcagcatccatgacaacagcgtcctccggaacttcctcagtaccaatgaaggcaaactagacaagctccagcgggacgccaagacggctgaggaggcctacaatgcagttgtgcgctactttggcgagagtcccaagactacacctccttctgtattcttcccagtatttgtccgattcattcgttcttacaagaagcagaacaagagaatgaagcccgcaagaagcaggaggaggtaatgcgggagaagcagctggctcaggaagccaagaaactggatgccaagaccccatcccagcggaacaagtggcaacagcaggagttaatagcagagttgaggcggcgccaggccaaggaacaccggcctgtttatgaggggaaggatggtaccatcgaggacatcatcacaggcctccactgccagcctatggttgttcgccaccaagccaggagtgctgcaccgcccagtggtccccctcgggctccaggcccccactgagaccctctcggaggcagaagcacttcacccctcagagtcctacaagtccaaccagtggacctggaattggccaagggctcaggagagggctgtgttgctctctcaaccatgtccgccccagctcttgaggctggatctttctacttgtgccactatgggcactaggtctgtaggtccctggtgcttccagtactgcactttgcccccaaggtctttgacttcatttcctgaagggtcaccaagggtcagctcagggctaggaaaaaccatttccagccttagcctaaacagggcacatagatctctcccactagagcccagagggatgagaggagagagcaactgttctttctttttttttcccttcctttttgcaggcccatggtcagctctggtctagatgtatctaggcttagggagccctgggaccctgccagtctcagttcatctcttaccaggagcaaggccctctgaagcatgggccgtgccagctgtgccctagtgataagggtaagaggagagatgtcaggctcactgcccttatttctctgcccatttcattctaggctcacactgtccttgtcaaggtgggcagaagagcagaggtcttctctgcaccaaccactctctgcagatggctggagaaagggtgtgccaactcttcaccttctttcctcagctacggtttttttttttttttttttttttttggcaggggacaaggagcatggtggtcttggctatttgcttaccttcccgtttctcctctgcccctggaagggaatgtgggggcccacttttttgtacatgtaccacctccctttcctcttactgtacataaacctcagactctccccctctcaacaaaggcttgatgcaccaggcctgactttgtctcctctttctgagcttagggggctagggtggccatttagtctgacctgggctatggggatagaaaagaaatctttggggcactgcatctgttttggaggagatgagatcagaactctggggaaaggagaaccggctaggtgggctctagccacacaaagggaagcaggcctgccatgagacactagtgccctctgctgggcatgtgtccagtccccagcctgccccagtagcacatggaaaagagtcactggccatgttataaatattgttatttaaaaaacaaaaaacaaaacacacgtacattaggtcctgggtggaggaagaagtggtggagcctcagggccagggcaggcaggagcaggcactgatgctagagggtgatgaccctgccctctgccacccaggctgcgtccaacagcctgtgactcttccctggagaccccttctctcacacttttatctactggcatcacccaccccacatggcatataccacccatctctggtctggggctgagggcaaggactgcactagtccagggagtaggggacccttgaacaccaagagcaaccttgagaggtgccaacaatggtgtgctgggggtggggttactttagaaaaagtggacacagaccagactaaggaagaagtctgaggcagacggtgagggtggcccaggagccatggcctcacacagacccgaggcagagaacagctcattgggtcactggtgatcatccagctgctgtaggagtgtccgccgccgcctctccagctcaccctcactcagctcactttctgacgtgtcccagcctgtctgttggagcaaaggcacagttcacccttagcctgcactaagggccgtggaagcttgaccagcgtgctgactggcctagggcccctgcccctcaccttctccttcttgattccaaagcctggggaacggttagggagctctgcctgttggagctccctgtccttgtcctgttcttgttctttctcatcgctctccttgccagctttctcctcagggtctgtctcactctcaggactattctgtaagagtccagagcccacctcctcagttcctgtggatagcctgggaggcaggtagaacagaactcacaaaatagcaggggcttaggtagaagttccttcactcaccgacttgtgtcttctcttcttagttttcttttttggtttcttggctttccgaaggccatgatctagagatagaaaaatccctactaagtcccaacaggagaaagacaggctctttttctttgttctagcccctctgttcattcttcacaggcaggaacctcatgctctgaggaagtctaagtccagttttccttctccagcttcttgcttgggcaggtagaggaagttctttctacttccacaggtgcagccctcccaatccagtctaccctcaaaggagctggggcttgtggagggcatcctctcagtctgggacaacagttctccagcttctacgctcacagcaactgcttacctgctccaagaagatgggaggaaggggagccccgtcctccaagggcagcacccccactttcaactgaatcaagtgaggaagagggctcagagcctgactctgaggggttccgcctcctccgcttggggggccggagagatggtgggggcagctcctcttcttctgactcagagccctgggcagatcagcagatacatgtcagtgcagaggttctctgccctccagaagccctcgtctgggaattcgagagaggaggaggacccagggccaaaggaatcctcaaacttccctccaagggagatattgtaaggggaaaacaaagtgtttatttccccaaaacaacccagcttcaccccatgtcccttctacacgcttactcactgagggtgagtgggaacgcttgtgatggtgcttcttgcctttcctgccatgctttcggcctttggtgtggaggtgctggcattcagtctgctagaggcagaggaagaagggtgaggacagcaccagacttagccccaggaaggatcctacttcctaaaatctggctttgcctccctttctcagactagagccttctgcctatcccagggatcctcaggcctccccttccttagctggccaggagtgccctaagggtaagagggaggccactgaggtctctgttgaactggtctaatgagttcaagggcctgaggcagatccagaggacaagcctgcctcacctccagcacctgtaggaactcccggaagagccggatccgctccgactccagggtgatctgctcaaaggctgagtcacacacaaaacgctcacggaccttgaacgaggagagcactgctgatcagactaggccccactcagcctggcctggacaccgccatgagcacagggcagggctggggcagagaaaggaagggaactggagctggcccagggctgtgacgtgactggggtgggccctcagtggtgaagcaccgctgccctcaggcttgaggggtgcttggggccaggctacgctcctgacctcttcccaggcagtgcctagctccagagcaggcacagcctgcctcagcatgcttcgaaaggcagcttccctgcgccgcatcctgcgtgcctcctccttctcccgctccctctcccgtgcctctgctttctccagcagctgaggaaagaagggacacggaacagggtcacccaggagggtggatgccaggtcccactcaggcataccttaggaggtggaaagttagggtctgggcttctaccaccatcccctgaattgggaatatagtcagtgggacagtgagtgagaaggaatggagcaagacacagatgaattagagaacttcccacgccccgcccagcccctcacactattgaaggtcagcttgatgttgcctgcgtccagtgcggcagccctcttgtcaaagcttatgacgtgggcgaagtcctcaaaggccgtgttcacctccacgcagaagccccggtcctgtgggtacagcagtgcatgaagcaggggcaccacgtgcctgaggccaaagctggcaggcagagtggtcacattacagatggtcaagaaggcccttgcctctggaagagatccacaggactgtggtctgcattagaaaccaagttatccaagtcctcatcacttgacaattaagcccccatgcctacccttggtttggatgtcacacagagctgaaggggttgggagatgtctcccaactgctgattaatgctgagtttctcaaaattaacttttgttcctttggcttaaagctctggccccagctgggccctcctgctgctcagcagtgcttccatgcattctcaatcaacatttgctggcccctaccctttgggtctatttattgagtgcttactatgtaccaggtaccatgatgagtgtttcacacattatctcatttaatcctcttggttctacatttaagaataggtcctagtatcctaattttacacagaaggagaaaccaaggttcagagaaactagagcacttgcccaaggtctcacagctgatatacggctgggcaagaaccctaccctgggggggctctctatccccaaagtgtctgctttcaagcaccacacccacccagatgacttagtccatgggagaaacggaggccaccaggtgtgcagctccccaccaatactaaaaacatgtccacaggccaggctctatgcttctcatttaggcctcacaacattccagtgaagcagaggcttagaaaagtgatctcagttggcccaagatgacatgagtggtaaatgaagccactggagttcaaagtctggctctcacgtcagttaagcacaggccagattccctttctctccctccacatagctctcacctcctctggcctttttgctgatggcagaggtgtgctcctctttcttctttccaagggtacttcctcaaccctgctacagtccttatcaacacagcattcattctcagggaattgaaagctccaagtcacccttgttactggctccttccatcaagcagacacctcacctaacctggaacatcctttccaccatgctctccccttcatcaagctaactacctctgctcttttccattgtttcaaaacctcttgaaatgcagcagaaaggaaaaggaataaacatttattgagaacctattagacactttacagatgttatttaattctcacaaccttacctatgaattatccctgatttacaggtgagcaaacaggctcagagacacggaacttacggaggtctcagagccaataagcaaccaggagtaatctgactctaaaacatgtgctgcccccatgccacctccatgactctactctcccaaaggttgcttgtgtctactagccaaatccaaggccgccttctttgtcctcactcatctggtcctcagtgcctctaccacttacttcttcaacactcccctctccaggtcacaccctctctgaccttttattctcttgcatatgcatgttcctgagaacagcacttagtcctctttcactacccaatctgtactccctcgcaatctcatccttcatctctcctgattttcaaacatcctagactggatatttcagacacttaaaattcaacagatctcaagagaatatatttctcatgagcatcctccatggatctccctgacccggatctgtctgcctgttctaagtccagggctctttgcattatcctatgggatgaaaggcaccatcatggtctgcctggctgtggaaagcaagagggactcctgggctcatctgccctccataggcaggaacccaaatggggaaagaggaagggaactgtctaaaaaagttgctttctcaggttgtgtggagagacaggactcagtgaggataggcccctacaggcctatcaaccagccactctgtggctaaaagttaattgtccaataaaatttagctatcccaggataaggcatttctactttatacgattattctgttttaaaatatatttgctttgagagtaattccccaaatagaattcctattttctacagccttgctcttcttgttttatccttatcaatagtgccatcatccactgccctgacacctctgattccttcctttccctccatttcacaaaatctatcaattctacttagtgactctatcccactggtgttgaattctcccttttttttttaaacagcagaaacagtttattaaaatagaaatcttatgtagaacctttatgcataaaaaagattcaagctgcttcacttgaaaacaggaagcagcaccaaatccccccatactcaactccaacccttgcttgtctcaaggcacctacatagaaacccagagtgtctcagaagaacagctggagcgctacagcctgctctcttctgctgtccccactgcccccggctaggatcacctcctacaagattcctgcacagcctactgacttttctccctgctcaccctcttccatccctctaacccagctcctagcatctagtgcttcttggacttttgtaccaagtagccccaacagtaggagagaggtctggggataagtgaaatgaatatgactatttgaattaccactatcagttttagtatcttgaggcttcaagaactgctctacctagcaccaccaccttccctaaggacataagtacgtactctagactgaaaggttctactatacaccatctaatctgatcattccccggttcctcattacttacgagagaaaaatccaaatttcttattttagcattcaaggcactttacatgcagggctctacttccaagctggggcatgtggttccagagaaagagaggatacctcaggacagtatgatacatcttacctaatggtaagtaatttaaaatattaaatttatattaaataggtaatatggtgttaaaatgcaacacctacgtgaatttgtaaggcaaaacagtacttcaaagaaatgtatatgcagtgagacatttctagctttatttccagatccctttcaacccaggtaccatttaatctctgtaattaggtgtactctggtggaacactcaccattttttagatgaggaaacagggtcagaaaggtcaagtgacctatccaaggtcacacaactagcaagcagttaagctagacttttactgtaggcagtctgcctccagtcccgctcctaaccactgtactgtattatctcctcaaatgcattagaatcttcacttccataaagaaatatgctctttgtttttttcttttggaacacaaggtttagtccatcactcactcacttttccacttttgataagatgtaaatattgagaactatttctcttctccagtagaagaagagcaacaggccatgtgtgatggtaaatggcagctgacacttgcgacagtatcaagaaggcactaaggaatggtgagaaggatgacttgccctttctaaagtggcatctcagcttgagtctgcagaatgccttgcaaatccagctcagtactgctagataatccatattgacaagagaagctaaagattcagattttctatgtgaagtttcctggttttaaaatgttagcaacaaattccaaatttttacagaacactgtacaggccagaaagaacaatctgtgtgctaccagtttacaattagctatgcttcttcctcctcagacctggcatgccctttccacccccttgcctttgctcttagtaccccgtgtacactccaacctcttccacctacaaatttctaaatgcacagttcaaatgttagttcttcagattcctgtctctgtaataacacttgcccctttgtataacagttctcatgtatatcttcctattagaccatgagctcctgtggtagaaattgtgtattcattactgtatccctagtgtgcagtaaaggatcacagtag

SEQ ID NO: 31490 - DNA, 3159 bp, Homo Sapiens
gagcagccaaaaggcccgcggagtcgcgctgggccgccccggcgcagctgaaccgggggccgcgcctgccaggccgacgggtctggcccagcctggcgccaaggggttcgtgcgctgtggagacgcggagggtcgaggcggcgcggcctgagtgaaacccaatggaaaaagcatgacatttagaagtagaagacttagcttcaaatccctactccttcacttactaattttgtgatttggaaatatccgcgcaagatgttgacgttgcagacttggctagtgcaagccttgtttattttcctcaccactgaatctacaggtgaacttctagatccatgtggttatatcagtcctgaatctccagttgtacaacttcattctaatttcactgcagtttgtgtgctaaaggaaaaatgtatggattattttcatgtaaatgctaattacattgtctggaaaacaaaccattttactattcctaaggagcaatatactatcataaacagaacagcatccagtgtcacctttacagatatagcttcattaaatattcagctcacttgcaacattcttacattcggacagcttgaacagaatgtttatggaatcacaataatttcaggcttgcctccagaaaaacctaaaaatttgagttgcattgtgaacgaggggaagaaaatgaggtgtgagtgggatggtggaagggaaacacacttggagacaaacttcactttaaaatctgaatgggcaacacacaagtttgctgattgcaaagcaaaacgtgacacccccacctcatgcactgttgattattctactgtgtattttgtcaacattgaagtctgggtagaagcagagaatgcccttgggaaggttacatcagatcatatcaattttgatcctgtatataaagtgaagcccaatccgccacataatttatcagtgatcaactcagaggaactgtctagtatcttaaaattgacatggaccaacccaagtattaagagtgttataatactaaaatataacattcaatataggaccaaagatgcctcaacttggagccagattcctcctgaagacacagcatccacccgatcttcattcactgtccaagaccttaaaccttttacagaatatgtgtttaggattcgctgtatgaaggaagatggtaagggatactggagtgactggagtgaagaagcaagtgggatcacctatgaagataacattgcctccttttgaagccaatggaaaaatcttggattatgaagtgactctcacaagatggaaatcacatttacaaaattacacagttaatgccacaaaactgacagtaaatctcacaaatgatcgctatctagcaaccctaacagtaagaaatcttgttggcaaatcagatgcagctgttttaactatccctgcctgtgactttcaagctactcaccctgtaatggatcttaaagcattccccaaagataacatgctttgggtggaatggactactccaagggaatctgtaaagaaatatatacttgagtggtgtgtgttatcagataaagcaccctgtatcacagactggcaacaagaagatggtaccgtgcatcgcacctatttaagagggaacttagcagagagcaaatgctatttgataacagttactccagtatatgctgatggaccaggaagccctgaatccataaaggcataccttaaacaagctccaccttccaaaggacctactgttcggacaaaaaaagtagggaaaaacgaagctgtcttagagtgggaccaacttcctgttgatgttcagaatggatttatcagaaattatactatattttatagaaccatcattggaaatgaaactgctgtgaatgtggattcttcccacacagaatatacattgtcctctttgactagtgacacattgtacatggtacgaatggcagcatacacagatgaaggtgggaaggatggtccagaattcacttttactaccccaaagtttgctcaaggagaaattgaagccatagtcgtgcctgtttgcttagcattcctattgacaactcttctgggagtgctgttctgctttaataagcgagacctaattaaaaaacacatctggcctaatgttccagatccttcaaagagtcatattgcccagtggtcacctcacactcctccaaggcacaattttaattcaaaagatcaaatgtattcagatggcaatttcactgatgtaagtgttgtggaaatagaagcaaatgacaaaaagccttttccagaagatctgaaatcattggacctgttcaaaaaggaaaaaattaatactgaaggacacagcagtggtattggggggtcttcatgcatgtcatcttctaggccaagcatttctagcagtgatgaaaatgaatcttcacaaaacacttcgagcactgtccagtattctaccgtggtacacagtggctacagacaccaagttccgtcagtccaagtcttctcaagatccgagtctacccagcccttgttagattcagaggagcggccagaagatctacaattagtagatcatgtagatggcggtgatggtattttgcccaggcaacagtacttcaaacagaactgcagtcagcatgaatccagtccagatatttcacattttgaaaggtcaaagcaagtttcatcagtcaatgaggaagattttgttagacttaaacagcagatttcagatcatatttcacaatcctgtggatctgggcaaatgaaaatgtttcaggaagtttctgcagcagatgcttttggtccaggtactgagggacaagtagaaagatttgaaacagttggcatggaggctgcgactgatgaaggcatgcctaaaagttacttaccacagactgtacggcaaggcggctacatgcctcagtgaaggactagtagttcctgctacaacttcagcagtacctataaagtaaagctaaaatgattttatctgtgaattcagattttaaaaagtcttcactctctgaagatgatcatttgcccttaaggacaaaaatgaactgaagtttcacatgagctatttccattccagaatatctgggattctactttaagcactacataaactgactttatcctcagaaaaaaaaaaaaaaa

SEQ ID NO: 31491 - DNA, 2203 bp, Homo Sapiens
gggacgcgaggcggagcggggccccacacaggccgcggcggctggctcgggcccctacggtcccggcggcggctggaggaggaagccaggcggctggcggaggaggagagacggaggaggccgagaccggagcgccgctcgccgcagacttacttccccggctcagcagggaaaggttcctagaaggtgagcgcggacggtatgcaaagttgtgaatccagtggtgacagtgcggatgaccctctcagtcgcggcctacggagaaggggacagcctcgtgtggtggtgatcggcgccggcttggctggcctggctgcagccaaagcacttcttgagcagggtttcacggatgtcactgtgcttgaggcttccagccacatcggaggccgtgtgcagagtgtgaaacttggacacgccacctttgagctgggagccacctggatccatggctcccatgggaaccctatctatcatctagcagaagccaacggcctcctggaagagacaaccgatggggaacgcagcgtgggccgcatcagcctctattccaagaatggcgtggcctgctaccttaccaaccacggccgcaggatccccaaggacgtggttgaggaattcagcgatttatacaacgaggtctataacttgacccaggagttcttccggcacgataaaccagtcaatgctgaaagtcaaaatagcgtgggggtgttcacccgagaggaggtgcgtaaccgcatcaggaatgaccctgacgacccagaggctaccaagcgcctgaagctcgccatgatccagcagtacctgaaggtggagagctgtgagagcagctcacacagcatggacgaggtgtccctgagcgccttcggggagtggaccgagatccccggcgctcaccacatcatcccctcgggcttcatgcgggttgtggagctgctggcggagggcatccctgcccacgtcatccagctagggaaacctgtccgctgcattcactgggaccaggcctcagcccgccccagaggccctgagattgagccccggggtgagggcgaccacaatcacgacactggggagggtggccagggtggagaggagccccgggggggcaggtgggatgaggatgagcagtggtcggtggtggtggagtgcgaggactgtgagctgatcccggcggaccatgtgattgtgaccgtgtcgctaggtgtgctaaagaggcagtacaccagtttcttccggccaggcctgcccacagagaaggtggctgccatccaccgcctgggcattggcaccaccgacaagatctttctggaattcgaggagcccttctggggccctgagtgcaacagcctacagtttgtgtgggaggacgaagcagagagccacaccctcacctacccacctgagctctggtaccgcaagatctgcggctttgatgtcctctacccgcctgagcgctacggccatgtgctgagcggctggatctgcggggaggaggccctcgtcatggagaagtgtgatgacgaggcagtggccgagatctgcacggagatgctgcgtcagttcacagggaaccccaacattccaaaacctcggcgaatcttgcgctcggcctggggcagcaacccttacttccgcggctcctattcatacacgcaggtgggctccagcggggcggatgtggagaagctggccaagcccctgccgtacacagagagctcaaagacagcgcccatgcaggtgctgttttccggtgaggccacccaccgcaagtactattccaccacccacggtgctctgctgtccggccagcgtgaggctgcccgcctcattgagatgtaccgagacctcttccagcaggggacctgagggctgtcctcgctgctgagaagagccactaactcgtgacctccagcctgccccttgctgccgtgtgctcctgccttcctgatcctctgtagaaaggatttttatcttctgtagagctagccgccctgactgccttcagacctggccctgtagcttttctttttctccaggctgggccgtgagcaggtgggccgttgagttacctctgtgctggatcccgtgcccccacttgcctaccctctgtcctgccttgttattgtaagtgccttcaatactttgcattttgggataataaaaaaggctccctcccctgccaaaaaaaaaaaaaaaaaaa

SEQ ID NO: 31492 - DNA, 2781 bp, Homo Sapiens
ggaaggcttgcacagggtgaaagctttgcttctctgctgctgtaacagggactagcacagacacacggatgagtggggtcatttccagatattaggtcacagcagaagcagccaaaatggatccccagtgcactatgggactgagtaacattctctttgtgatggccttcctgctctctggtgctgctcctctgaagattcaagcttatttcaatgagactgcagacctgccatgccaatttgcaaactctcaaaaccaaagcctgagtgagctagtagtattttggcaggaccaggaaaacttggttctgaatgaggtatacttaggcaaagagaaatttgacagtgttcattccaagtatatgggccgcacaagttttgattcggacagttggaccctgagacttcacaatcttcagatcaaggacaagggcttgtatcaatgtatcatccatcacaaaaagcccacaggaatgattcgcatccaccagatgaattctgaactgtcagtgcttgctaacttcagtcaacctgaaatagtaccaatttctaatataacagaaaatgtgtacataaatttgacctgctcatctatacacggttacccagaacctaagaagatgagtgttttgctaagaaccaagaattcaactatcgagtatgatggtattatgcagaaatctcaagataatgtcacagaactgtacgacgtttccatcagcttgtctgtttcattccctgatgttacgagcaatatgaccatcttctgtattctggaaactgacaagacgcggcttttatcttcacctttctctatagagcttgaggaccctcagcctcccccagaccacattccttggattacagctgtacttccaacagttattatatgtgtgatggttttctgtctaattctatggaaatggaagaagaagaagcggcctcgcaactcttataaatgtggaaccaacacaatggagagggaagagagtgaacagaccaagaaaagagaaaaaatccatatacctgaaagatctgatgaagcccagcgtgtttttaaaagttcgaagacatcttcatgcgacaaaagtgatacatgtttttaattaaagagtaaagcccatacaagtattcattttttctaccctttcctttgtaagttcctgggcaacctttttgatttcttccagaaggcaaaaagacattaccatgagtaataagggggctccaggactccctctaagtggaatagcctccctgtaactccagctctgctccgtatgccaagaggagactttaattctcttactgcttcttttcacttcagagcacacttatgggccaagcccagcttaatggctcatgacctggaaataaaatttaggaccaatacctcctccagatcagattcttctcttaatttcatagattgtgtttttttttaaatagacctctcaatttctggaaaactgccttttatctgcccagaattctaagctggtgccccactgaatcttgtgtacctgtgactaaacaactacctcctcagtctgggtgggacttatgtatttatgaccttatagtgttaatatcttgaaacatagagatctatgtactgtaatagtgtgattactatgctctagagaaaagtctacccctgctaaggagttctcatccctctgtcagggtcagtaaggaaaacggtggcctagggtacaggcaacaatgagcagaccaacctaaatttggggaaattaggagaggcagagatagaacctggagccacttctatctgggctgttgctaatattgaggaggcttgccccacccaacaagccatagtggagagaactgaataaacaggaaaatgccagagcttgtgaaccctgtttctcttgaagaactgactagtgagatggcctggggaagctgtgaaagaaccaaaagagatcacaatactcaaaagagagagagagagaaaaaagagagatcttgatccacagaaatacatgaaatgtctggtctgtccaccccatcaacaagtcttgaaacaagcaacagatggatagtctgtccaaatggacataagacagacagcagtttccctggtggtcagggaggggttttggtgatacccaagttattgggatgtcatcttcctggaagcagagctggggagggagagccatcaccttgataatgggatgaatggaaggaggcttaggactttccactcctggctgagagaggaagagctgcaacggaattaggaagaccaagacacagatcacccggggcttacttagcctacagatgtcctacgggaacgtgggctggcccagcatagggctagcaaatttgagttggatgattgtttttgctcaaggcaaccagaggaaacttgcatacagagacagatatactgggagaaatgactttgaaaacctggctctaaggtgggatcactaagggatggggcagtctctgcccaaacataaagagaactctggggagcctgagccacaaaaatgttcctttattttatgtaaaccctcaagggttatagactgccatgctagacaagcttgtccatgtaatattcccatgtttttaccctgcccctgccttgattagactcctagcacctggctagtttctaacatgttttgtgcagcacagtttttaataaatgcttgttacattcaaaaaaaaaaaaaaaaaaaaaaaaaaaaaaaaaaaaaaaaaaaaaaaaaaaaaaaaaaaaaaaaaaaaaaaaaaaaa

SEQ ID NO: 31493 - DNA, 8500 bp, Homo Sapiens; identical to SEQ ID NO: 24895
  misc_feature (4355)..(4355): n is a, c, g, or t

SEQ ID NO: 31494 - DNA, 2909 bp, Homo Sapiens
ggcacgaggccgggagtcggtgaggcggctgcaggtccctccctgcggagccgctggtccggctggcggagatgtgaccgcgggcccggccggcctgcctcaggcgtcgcgtcagctcccgtgtccgtgcccttaacccacaccgatggcgggatccggctgcgcctggggcgcggagccgccgcgttttctggaggccttcgggcggctgtggcaggtacagagccgtctgggtagcggctcctccgcctcggtgtatcgggttcgctgctgcggcaaccctggctcgccccccggcgccctcaagcagttcttgccgccaggaaccaccggggctgcggcctctgccgccgagtatggtttccgcaaagagagggcggcgctggaacagttgcagggtcacagaaacatcgtgactttgtatggagtgtttacaatccacttttctccaaatgtgccatcacgctgtctgttgcttgaactcctggatgtcagtgtttcggaattgctcttatattccagtcaccagggttgttccatgtggatgatacagcattgtgcccgagatgttttggaggcccttgcttttcttcatcatgagggctatgtccatgcggacctcaaaccacgtaacatattgtggagtgcagagaatgaatgttttaaactcattgactttggacttagcttcaaagaaggcaatcaggatgtaaagtatattcagacagacgggtatcgggctccagaagcagaattgcaaaattgcttggcccaggctggcctgcagagtgatacagaatgtacctcagctgttgatctgtggagcctaggaatcattttactggaaatgttctcaggaatgaaactgaaacatacagtcagatctcaggaatggaaggcaaacagttctgctattattgatcacatatttgccagtaaagcagtggtgaatgccgcaattccagcctatcacctaagagaccttatcaaaagcatgcttcatgatgatccaagcagaagaattcctgctgaaatggcattgtgcagcccattctttagcattccttttgcccctcatattgaagatctggtcatgcttcccactccagtgctaagactgctgaatgtgctggatgatgattatcttgagaatgaagaggaatatgaagatgttgtagaagatgtaaaagaggagtgtcaaaaatatggaccagtggtatctctacttgttccaaaggaaaatcctggcagaggacaagtctttgttgagtatgcaaatgctggtgattccaaagctgcgcagaaattactgactggaaggatgtttgatgggaagtttgttgtggctacattctacccgctgagtgcctacaagaggggatatctgtatcaaaccttgctttaatcagtaacctaaggactgtttcctttttctcctcttccatttcttgggttattccacatatgaatgcaggactacccccttaccattttaagaaggtactttatacatttatttaatcctactaatgtgcagccattgcccaagcagtgactgcgttgcatacatttggcactgagtaggacaagacctctcagctatacattgaggggttttagagcatccatgtgggcaacccttttttgtgcgggagagcaggtgttgctcttcagtatgtagcctaaaaaaatcttaattatttcatggatcatgaagcaaggatgaataatatcatgtcttggtaaatactaacaaatttgttaggtttggtgacatcatttacagattatttctttatgttgtccagtggttcttccttattgttgatatccataagctggcactggatgctctcagtaatgttaagtaattgtcaagcagcagttacctactgtgttcttaacactgagttgtgaattttttcttaaagcagtactgtagtactgaatattcctttaaaggaactgcagtgagcctatctaagtttttttaaattaaggcttttaaaatagaaagctgatgcttgatcttgcacaatttttatgtctagtatgtatgcttgagtgaatgtgtgagtatgaatgattagagaaaatttgagtcagtgtactttatagtgtgaatcctgtgagctaatacagtctatacttatttcttccctacctgtttcacatccgtaagatttaggatatacattttttgagaggtagtctgtctgatacaatgtaaatgacaaaacataattcctgagaggcccagaacaaactggagtctagcctggagttaaattgagacttctaaaatgattggaacaaagactaagttgtgccagatgtaaatcaacccctcttttagtttactttagactttgtattagctcatcttttttgtagtaaatctatagttttaaggtttctcaagatgtggctctacctactatgatgaaaattgaagtgggtcaaaagaattagatgtacagtgaagggaaaagaaaaaaaatgggcgaagagagggtggaaaataaaaggattcttttttcttcctttctgtttctcgtatccctgctccctttttcctccccttccctcattctttgcctctatccttagctgaagacaaactagaggagcagcatcccaggtagtttggcttttgactgcaaggtagttaagaaaggtgtagatataatgaggtagaagtagaaaggaagaaaaactcaaagaattctgaaaaggattcatagcaacataatgtgtccctgagtagaggatgctgctatgcgtgagttcatggacacaagttgattacatggtttttagaattataattatggattcttcttatttcatggtaggttgtctttaaagatataaaaattaggatgcctttatgaagcactgattatacc

SEQ ID NO: 31495 - DNA, 1022 bp, Homo Sapiens
ctcagtgctttcttttctgtcctcctccaggatggggtcaaccgtcatcctttccctcgtcctggctgttctccaaggtgtctttgccgaggtgcagctgttgcagtctgcagcagaggtgaaaagacccggggagtctctgaggatctcctgtaagacttctggatacagctttaccagctactggatccactgggtgcgccagatgcccgggaaagaactggagtggatggggagcatctatcctgggaactctgataccagatacagcccatccttccaaggccacgtcaccatctcagccgacagctccagcagcaccgcctacctgcagtggagcagcctgaaggcctcggacgccgccatgtattattgtgtgagagggaccatctaaaaccttccgcggtgcaggtgcagagtgagctgccagacacaccctccccaggggcctctctattcatccggggaggaaacactggctgtttgtgtcctcaggagcaaaaaccagagaacaacatgggagcgttcctaacccctaaggcaactggatgggagacctgacccatccagttctctgagggggctcttgtgtgttctacaaggttgttcatggtgtatattacatggttaacatcaaaaggctgcctaataggcacctcttcaatataatagtcttttaattagtgaaaattttacacagttcatcattgcttgcttgccttcctcccttctgtccgctcttactccctccttcttttattttctacttacttttccaaaatcatttaacccctttttgtaccattaataagttatcttgtttttgttgttgttttccttttaacaatatgcactgaataattcatctttgtgccaattcgtaaatattttgatataacaaagacttctgtcataaatagatttcctgtgagtaatcttgcaaatattttagaacctgtttggttaagaataaattaaaataaatagacaaatttttaaaaaaaaaaaaaaaaaaaaaaaaa

SEQ ID NO: 31496 - DNA, 3302 bp, Homo Sapiens
gggtgcctgacagtgtggatatgacatcagccatggccagaggggcttatggcaggcctggctctgatttttgccatggaacagagggcaaggacttaccttctgagcataacgtttctgtagaaggagtggcacaggacaggagtcccgaggcaactctgtgcccccagaagacctgcccctgtgacatatgtggcctacgtttgaaagacattttgcatttggctgaacaccagacaacacatcccaggcagaaaccatttgtgtgtgaggcatatgtgaaaggctctgagttcagtgcaaaccttccccagaaacaggtgcagcagaacgtacacaaccctatcagaacggaggagggccaggcttcccctgtaaagacctgcagagaccacacatcagatcagctttccacctgcagggagggtgggaaggactttgtggccacagcagggtttctgcagtgtgaggtcactcccagcgatggggagccgcacgaggccaccgaaggtgtggtggattttcacattgcactaaggcataacaagtgctgtgaatctggggatgccttcaataacaaatccactcttgttcagcaccagagaatccacagcagagaaaggccttatgaatgcagcaaatgtggaatcttcttcacttacgccgctgacctcactcaacaccagaaagttcacaatagaggaaaaccgtatgagtgctgtgaatgtggaaaattcttcagccagcactccagccttgttaaacatcgcagggttcacaccggtgaaagccctcacgtgtgtggtgactgtgggaaattcttcagccgaagctccaacctcattcagcataagagggttcacactggtgaaaagccatatgagtgcagcgactgtgggaagttcttcagccagcgttccaacctcattcatcataagagggttcatacgggcagaagtgcccatgagtgcagtgaatgtgggaaatctttcaactgcaactccagcctaattaaacattggagagttcacactggagaaagaccttacaagtgtaacgaatgtgggaaattcttcagccacattgccagcctcattcaacatcagatagttcacactggcgagcggcctcacgggtgtggtgagtgtgggaaagccttcagccgaagctctgacctcatgaaacatcagcgagttcacactggtgagcggccttatgaatgcaatgaatgtgggaagttatttagccagagctccagcctcaatagccatcggagacttcacactggtgaacggccttaccagtgcagtgaatgtgggaaattctttaaccaaagctccagcctcaataaccaccggagacttcacaccggcgagcggccttatgagtgcagcgaatgtgggaaaaccttcaggcagaggtccaatctgaggcagcacctgaaagttcacaaaccagacaggccttacgaatgcagcgaatgtgggaaagccttcaaccaaaggcctaccctcattcggcatcagaagattcacatcagagaaaggagcatggagaatgtgctccttccctgttcacagcacacaccagagataagctctgagaacagaccttatcagggcgctgtcaactacaagttgaaacttgttcatccaagtacccaccctggggaggttccctaggaatgctagctgtgttggaagctttctggagacaagttacattctcttactgtagagtttatcagcgttttttcactgctggggttgtgatagaagccatgtcagcaccacacactgcagctctccaaagagtgtgtccaccactccactgtgctcagggaaggcagacctctcctctctctttccaatccctaaagggaattaggagtagtctgaagccttgggaagatgtcattcccgccctgtatggctggtttagccatggacatgaccagcttttggctgtgaagacctgagcagggttttgccaacagcttgttctagagaaggtttccctttttctgggacattgttggtctcatgttatgcctgtgaaggatttgtccagccttcatgttactctacacaacaacttatctcctgtgtattgccctggttcatgtgatgataatggccttatgataaagccgcctttagtcttccatgttctgatcactgtgtggggtggttcaagagcagagttaagatctaccaaactgaaggggtctccagattatcttggaggggacaggaggatggcagagaaacaactgtcaatccagatttgacctcatttgcattgccaccaaggcctcctaggaaaaattgtaggaatttatgggtataatattgtggtctgaatggcgtgaatttttatcccgaggagggggcagttgtgacaacctccagtgcatgtgggaacagcatgaattgggtcccttattcccagggggtgccccatattccccaatactgtaaagcagatgctgtttagcacctgccaaggagccatatgccctgaagttcagcattaggcaggtatctcttaactgtaagacataccaggcccagctgggaccataatttgtacagaaacactggatgtgattaatagggagtaggcgagattatagcaaaccagcagaaatggaactctgctaaatgtgcatccgtgaatgctcccttgaatgtggctgtgcaggattcagggtttgcagaaattctcaggacctcagacctctgtcctatgactaatgttactggcagagcaaataatctaaaggttttggttttgtggattaccatctccgtgctgtgcatctgaaggccagtgctgtgctggcaggaaaatagggactgagaaaaagcagatcctatactatagggactgtagtatctatgacgtagccagccattctttgctcccaaggcaagaagaaagagatgacagagtcaatatagggttgccaaatcggattttctaaaatgagtaggaagttggatttttatgtgcaacagtttcttttaatgctttgttgatatgtgattgtcatgcaataattattcatatttggtaagttttgtacatatattatgtacactcagggaaccaataccataatcatgataatgaacgtatccatcacctgcaaagctacctcatgcccctttacattccctccttgccttccctaggaaaccgttgatttacattttttactttagatttgtttgccttttctagaattaacacaattggaatcataaagtatttatactctcaaaaaaaaaaaaaaaaaa

SEQ ID NO: 31497 - DNA, 3145 bp, Homo Sapiens
agacgggagggggacggacacacacaaggggacagagacccgagtggagagctggatctcgccttcccggcgtggggcgcagggtcggccagaaagaagatcgagaagagcggggagtgggggcgaaaaggggggacaggtgggggaggaggctggggaaagcccgagggaggaagagagggagggaggaacttcccaaagttgcaaaacatggctaccttgcctgcggagccgagcgcggggccggcggctgggggggaggcggtggcggcggcggcggcgaccgaagaggaggaggaggaagcgcgccagctcttgcagactttgcaggcggccgagggtgaggcggcggcggcggccggggccggggcgggcgcagcggctgcgggagctgagggcccgggatccccgggcgtccccgggtcgccccccgaggccgcttccgaaccgcccacgggcctccgcttctcgcccgagcaggtggcgtgcgtctgcgaggcgctgctccaggcgggccacgccggccgcttgagccgcttcctgggcgcactgcccccggccgagcgcctacgtggcagcgacccggtgttgcgcgcgcgggccctggtggccttccagcggggcgagtacgccgagctctaccggctactcgagagccgccccttccccgccgcccaccacgccttcctgcaggacctctacctgcgcgcgcgctaccatgaggccgagcgggcccgcggccgcgcgcttggcgcagtggacaagtatcgactgcgcaagaagttcccgctgcccaagaccatctgggacggcgaggagacagtctactgcttcaaggagcgctcccgcgcagcgctcaaggcctgctaccgcggcaaccgctaccccacgccggacgagaagcgccgcctggccacactcaccggcctgtcgctcacgcaggtcagcaactggttcaagaaccggcgacagcgcgaccggaccggggccggaggcggcgcgccctgcaagagcgagtctgatgggaatcccacgactgaggacgagtccagccgaagtcctgaggacctggagagaggggcggccccagtgtccgccgaggccgctgcccagggctccatattcctggcagggaccggccctcccgcgccttgcccggcttcctcctccatcctggtgaacgggagcttcctggcagccagcggctccccagcagtgctcctcaacgggggccccgtcatcatcaacggcctggccctgggcgaggcctccagcctgggcccgctgctgctcactgggggcgggggtgcccctccaccgcagcccagccctcagggggccagcgagaccaagacctctctggtcctggaccctcagacaggggaggtgcggctggaggaggctcagtcggaggcccctgagaccaaaggggcccaggtggctgctccgggaccagcccttggagaggaggtcctggggcccctggcccaagtggtgcctggccccccgacggctgccacctttcctctgcccccggggccagtgcctgctgtggctgccccacaagtggtaccgctctccccacccccggggtatcccacgggcctgagccccacctccccactattgaacctgccccaggtagtacccacctcacaggtggtgaccctgccccaggctgtggggcccctgcagctgttggcagccgggccaggcagccctgtgaaggtggcagctgcagcaggccctgccaatgtgcacctcatcaactccggggtgggcgtgactgccctgcagctgccttcggccactgccccaggaaacttcctcctggccaaccctgtgtctggcagccccatcgtgacgggtgtggccgtgcagcagggcaagatcatcctcaccgccaccttccccaccagcatgctcgtctcccaggtcctgccgccagcccccggcctggccctgccactgaagccagagacggccatctccgtgcctgagggaggcctcccggtggcccccagccctgctctcccagaggctcacgccctaggcaccctttctgcacagcagccaccccccgccgctgccaccacctccagcaccagcctgcccttctcccctgactcccctggcctcctgcccaacttcccggcgcccccaccagaggggctgatgttgtcacccgcggccgtgcctgtctggtcagcagggctggaactaagcgcaggaacagaggggctgctggaagcggaaaaggggctggggacacaggccccccacaccgtgctgaggctgccagaccccgaccctgaggggctgctcctgggggccaccgcagggggtgaggttgacgaggggttggaagctgaggccaaggttctgacccagctccagtcggtgcctgtggaggagcccttggaactgtgacccagtgtggccccgtggcctctcccgacattggtgctgaagacgcagggacaggaatgggaggggggagccccagaaatgcggttgctgaagaccccagtcaccacatccttctgcctgggtggcctctccaagccctggtggtgctgggggttgtatccccggccacctcctgtccaggtctccatccccctttggatgggaggcctctctgttacagccctccccatgctgtgccctgccatatacgtgggggactcagggtcctgactcaggggccctgccccctccacttggtactagctgtaagcggaacaccctgccccagggccggacttccagcccccagagccctctccctgtcactccctgaaacactattaatagctctgccgatagctggtgttgtcacaactgcctggaatccgaaggtggaggacaggcagccccgcgcccctgagactggagaccctccccagtgtggcatttcctgccaggggcggggggtggggcagctgtggggagacgggggtcttccttcaccagctcccctcgactcaagcccttgtcctcattatccggcccagaccaaagattccctcatccctgggggcagccctgccgctgtgtctcctttgtatcctaaatctttatttttctaggacatgttatgcctccattttcaattaaaataaagttatcggattacaccacc

SEQ ID NO: 31498 - DNA, 1875 bp, Homo Sapiens; identical to SEQ ID NO: 27222

SEQ ID NO: 31499 - DNA, 3361 bp, Homo Sapiens
aacatcgagaaggagagggaacgatgactacaaacaagatggccttctcccccgacccgacctccttcccaggcactcacacgccctcctgtccacaaccctccgcgtgtgtggtacctgacgggagtcgcagtccatctgctgccttcccgctgccatttctactcgtcaggaacaatggaaaggtgaaaaggaaagaggactacaagcaagatggcggaagagggacatacacctgactagtagtcgatcttacgaggtgcgatgggattagtagttttatagccttccagtgttccttaagaatggcggaaccaggaggacgaggagactaccgtaaagatggcaggctacctagcctctcccggtctccgctttccaccaccttgggcacctcgcccgcctgtggtctcgaaatcccccccaccagtggcgcacggcctgacgggagttgcagtctcccggctcccgtctatcatctcaagtcgagacaatggaaggggatggggcggggccaccggcaaagatggcggctgcagggccggggcgactgcgacatgggatgtgtagtccaggcgtctggcctcttccctgcggaaatgagggagaggactacgaaaaagatggcgacctcgcccctcgacctctgcgccggtgcctgctgggaaatgtagttccttgccgagtccaacagagaaaggacgtcgctgttgaaatgtgaatcccggcggacacgccaaattgcgaggcgacggaaacggaaagactcttttctcctctctccgccaccggcttctgaacagcctggcgggaaatgtagtcccaagctttcactcgcgagtggaggggaaggatttatgtcaccagtggggatcagtgcgggtgggggagaaaaacgtcgggcgatccgggaataaagaatgtccgcctctccatggggcgaggacttcgcgtttcaggggagggcccttaaaggaaggcagcaggaatcagtcttgtcaaacaggggggcgtggttctcgtcgagagtgcattcacactcttgttccctagaaagcctgggcacctcccactcgattcctgctcctcagacctccgggaatcagtgtcttacaagacgtgcgggctccggggagaaggacctggagtcacagcgaatccccgccccgccccgggaagccaccaaaccttgctttttctcatctgcaaaatggggacaatggggataatgatccccacctcgaagcacagttgtgagtgttaaacaagccaatgttcttgtcaccaaagtgcccaactctggcacggggcacgcggtggtagatccctttctaaggtcccttccagcccagccgttctgggagcccaggaatccatgatgccggacagagttcgctcctgtgagaagaaaactgacccgcaggctcctcccagattgaaccgacccccgcccctcctcatcggggtcctccagcgtctgttaccgagcactgctcccagggggcgctcaatctccattcgactgaggtactacaaacacgatttccgcaacctggagttggaggcattgcaggctgtccagcctcatcccctgcctgatatccagtcagccttggaggcctctgcctagacacttcaactgcctatgcaaatggaacggcttctcatctttctgccgttttttggttttttttgtgtgtgttttaaggtcttgctctgtcacttgggttggagtgcagttgcaggatcatagtttgctgcggcctcgacctcctgggcttaagcgatcctcctccctcagccttgtgaatacctgggacttcaggcacgcgccactacacccagctaatttttaaactataatttttttttgttcagacgaagtctcgctatgttgcccaggctggtctcgaactcctggccacaagtgtgcctcccgccttggcctccctaagtgttgggattataggtgtgagccagcagccatacccctcttctcaatcttccttctcccctggaaaacctgctcacttctgaccccaagacagccccctccccttccctctgtcttctgtgtttggcagaccagccccagcgaggacttgttggttgtggtttttctatcagggaagtcaatggctggccagtgtagtgtgaagtcccagcttggcagagacttgcccaaggctggataggaggcttctttgccgctcaggctttatcagtcaggaaatccttagccctccctagaggattggctgtcccctctatcctcactgcttgaatttggtgttgcatgattgatttctaccctgttccctctgcttgagggctatcctccccatgcccatctcacttctccaccaagttcactgttcatcatttacaggtctctatttatgtatttattatttatttttctactttcccacttttctaaaaggtctctatttaaatgccactgtcaatcccggcactttgggaggcctaggcgggcgtatcatgaagtcaggagttcgagaccagcaatggccagtatggtgaaaccctgtctctcctaaaaatacaaaaattggccgggcatggtggaatgtgcctgtaatcccacctactcgagaggctgaggcagcagaattgcttgaacccgggaggtggaggttacagtgagctgagatcgtgccactgcactccatcctggacgacagagtgagactctgtctcaaaccaatcaatcaatcaatcaatcactgtcctggccagttgcagtggctcacgcctataatcccaacacttcgggaggccaaggtgagaggataacttgaaactaggagttcaagaccagccaaggcaacatagtgaggccccatctttacaaaaatacaaaaattagctggacgtgtagtcccagctacttaggaggctgaggggcaaggattgcttgaggctgagagattgagcctgcagtgagctatgacgatgccactcgctgcattcaagtctagatgacagagcaagaccctgctcctggacatactactaagtgctttcagcatttcatgtggtcctcataaaaatcttgagggccgggcatggtggctcacgcctgtaatctcagcactttgggaggccaaggcaggtgggtcacctggggtcaggagttcgagaccagcctgaccaatatggtgaaaccccatctctactaaaaatagaaaaattagccaggtgtagtggtgtgcacctgtagtcccagctcttcaggaggctgagaaaagagaattgtttgaacctggaaggcggaggttgcagtgagccaagatcacagcactgcactgctgcctgggcgacagcgagactctatctc

SEQ ID NO: 31500 - DNA, 1474 bp, Homo Sapiens
ctgcgccgtgcctgcctcgcgctccctgttacggcgttcgtccccgggcctggcgcccgcgtccggcccggctccgcggcggcctggtccgatggctcctcagcggagggccgcaaccaaggcgcccgagggcaacggagcggccgagcgccggaaccggagcagcaccaagaaggaccgagccccgcgggaggtgcagaggctgtggcagaggccgtggctaaggaccgcgggcctgggggctggctttgtgctcaccgcactcctgctctggagcagcttgggggccgacgacggggtcgcagaggtcctggcccgccgtggcgaggtcgtggcagggagattcatcgaggtgccctgctctgaggactacgacagtcaccgcaggttcgaaggctgcactccccgaaagtgcggcagaggtgtcaccgatgtcgtcatcaccagggaggaagcggagcggattcgcagcgtagctgaaaaggggctctccctgggaggatctgacggaggggcatccattctggacttgcactcaggggccctgtctgtcgggaagcactttgtgaacctgtacagatacttcggggataaaatacagaacatcttctcagaggaggacttccggttataccgggaggtgcggcagaaggtccagctcaccattgctgaggcttttggcatcagcgcatcctcgctgcatctgaccaagcccaccttcttctcccgcataaacagcacggaagcgcggacggcgcacgacgagtactggcatgcgcacgtggacaaggtgacctacggctccttcgactacacctcgctgctgtacctctccaactacctggaggacttcggcggagggcggttcatgttcatggaggagggtgccaacaagacggtggagcggagagctggatgtttttgtttccggatgatgtcttgtgggttccaagaagttaatggaccgagagccagtgaagctgctggtgcgaaggctggagtcaggtgtcctccggggactcaccacccgcccgagaggggagagacacatgcgattctggaagctgagagcattgcttattgttgattccttggttgccgtgctgagtcctgctttaaggaagcaggtcgcgtctccttcttcacctcggggtccgagaacctacaccgcgtggagaaggtccactggggcacccgttacgccattaccatcgccttcagctgcaaccccgaccatggcatcgaggacccagcgttcccgtagccagcagccgggccaaggtaacttcaggagggcccgtgtggaggcagccgcgccagtcgtgcacccacccccacgtccacccgctcctgttgcacagagtgccttaggaattctctgattttgatttgctgacgtgttaatcttttcatctgtgagtaaatgaagggaaccagcaaaaaaaaaaaaaaaaaaaaaaaaaaaaaaaaaaaa

SEQ ID NO: 31501 - DNA, 4132 bp, Homo Sapiens
ggacccgccgccctagccgagcagagcacagccgagccgagcggcccgggcgggggccgaccccggccagcgtcggcgcagagagcgggcggaggcgcaggccatgctgcggctggtgcccaccggggcccgggccatcgtggacatgtcgtacgcccgccacttcctggacttccagggctccgccattccccaagccatgcagaagctggtggtgacccggctgagccccaacttccgcgaggccgtcaccctgagccgggactgcccggtgccgctccccggggacggagacctcctcgtccggaaccgatttgttggtgttaatgcatctgacatcaactattcagcaggccgctatgacccctcagttaagcctccctttgacataggtttcgaaggcattggggaggtggtggccctaggcctctctgctagtgccagatacacagttggccaagctgtggcttacatggcacctggttcttttgctgagtacacagttgtgcctgccagcattgcaactccagtgccctcagtgaaacccgagtatcttaccctgctggtaagtggcaccaccgcatacatcagcctgaaagagctcggaggactgtcggaagggaaaaaagttttggtgacagcagcagctgggggaacgggccagtttgccatgcagctttcaaagaaggcaaagtgccatgtaattggaacctgctcttctgatgaaaagtctgcttttctgaaatctcttggctgtgatcgtcctatcaactataaaactgaacccgtaggtaccgtccttaagcaggagtaccctgaaggtgtcgatgtggtctatgaatctgttgggggagccatgtttgacttggctgtagacgccctggctacgaaagggcgcttgatagtaatagggtttatctctggctaccaaactcctactggcctttcgcctgtgaaagcaggaacattgccagccaaactgctcaagaaatctgccagcgtacagggcttcttcctgaaccattacctttctaagtatcaagcagccatgagccacttgctcgagatgtgtgtgagcggagacctggtttgtgaggtggaccttggagatctgtctccagagggcaggtttactggcctggagtccatattccgtgctgtcaattatatgtacatgggaaaaaacactggaaaaattgtagttgaattacctcactctgtcaacagtaagctgtaaaaacagaacaatgacataaatcaagggagaaagaaaatgggcactttatgtctcagaattactcaaatcaatttatttttagttggtaatggatataatatttcttaaaacaaaagtaaggtgttaatgaataggtctctccttctcctcctcctcctcctcttcccttgggggaaaaaaaaatgtgctaataaaacttccctccatggctaagagggaaaacgcttacattcaattctttagtcatggatggtctcgttccagatgttattgttccagggaactaaattcattcctgatgccagatctgatcgagtcagtatgtcttcagcttgatcagattttaaaatcagttttgaaagtggttcccgacttctttgctttgggagaatttggtcttatgctcataagcagttcatgagtgacaagtgtagcaaaagccagccatatattttcagaatctatatcctcaggaaatggtcctttttttttctataaatcaccaaccaactatctaaatggacatttgggggaattccctcccaaatttgattttgttattagaaaaatgattccgtgaacacagatgtgttttgaagaagtagcacgtaatggcttttatctaccatcaacctgataaggcacatgtgaaatggaaatgttctctttcctctgaagcagcaaattaatgttgaaaacttacatagacagaaagtaggttttggaaagggaaaccacagagattagggggacttaaaattaatataggcacaggaaagagaaaagtgtgcgctccattctcagtgggggttcaccacaaaacacgggccccaggagggaagcgctgtctaggcacacggcaaggccttagtaacagcatgctacactgctcgaggtacagtatgtcccatcgccctgtgcaccgtagagacctcagtcatctcaaggaagaatacatttgcttctccttagaggcgttcgaactagaagctatgcgttacctctgattctggaaacagaatagcagccactcattctgcattcccatttttctctccacgtgttctggtggaatgagatgctccttggcactatagcctgatgtcccacattgacccactgaccacacaggaaaagcagcgaaacctgcaccctctcttctgagtcacgcctgtggctcatcggcttccctcttaacctttagtgccctgaagactgctgccgctgtcaccgttgcgctgaaaccccatgggcccgttctgattgaaggtgaagcccaccagattatttttcaaagtcttaggtttcggtgtatctaacctgctcagtaaatatggacgcaattaaagatgctctaggaaatttggggactgtatttaatttttctttccttccatctgaggagcaaggaaatcctactgctgaatagctgttagtatctattttacaagatttactcattttcaggtacctaatgtagctgctagcatgcatgcacaacaatacaatttatatggtaaatggaaccaaataatggcttcactgaatgttatggctgcactgaagggaaatgtcacggtaaatagctgccaaattatggatcatgccgaagtgtcacaactgcactaaagacaaatagcactagaggctattgccactgtgacgcttttgagttatgaagaagggtagcggcctgatgcgaggctctttgtgtcctcattatagcaaagggttactggtgcaggggactaggaaaaacccgtccagtgtggtgcttagttattcatccatccctttcagacctaacagccacagccacacggaaagagactttgcctcacttttacattcacaaacaaacaaaggaggggggagcaggttttatgaatgtaactgtgcacaggaaatgactggtaatggaaaaaatgttgtaataaaataatctaatcaaagaatattattaaatttaacatagtctatgtccaaaaggcttagttgcttcttatgcagatagatgtgtgaaatctaagcagtaatgtactttctccctttgtaaagacttggggagtaaggacattaccaactaaattgcttcttcgaaactgaagtgagtcccggtttgtttcattttaatgggagggtaataaagatgaaagaccaacattttaactgatggatcccttaagctacagaatagaaatttattgtgttttgagggaatatactaaatgcagctatgtaaaaataaaattcaaacgcccaggattaaaataaaatataatctgaaaacctcatgttctctctttccccaaactaagaaagtgcactgcatgctgttttcacttattcttagaaaacaagcatgaaagattcctcccattcagataatgccaaaaatatgtttaaacttttttttattcttttgaaaaatgatttgtaaattgagggtcatagttcagcatcagtttcatcttctgggattattgttcaagaccagcctctaatgggaggtgaaacggtacgatggtctcaacacctttcttctgaactgtaatacatatcacaaaaagtacatccataattcagggcaattgtcagtctttttagagaaggggccagggtggaacaatcccagtgagtaaattatttctcagcgtggacttctctgcatgtcgggcttagggtcaccagccgggcagggtggaaggagcttgcctctttgagaaaccaaggagtcccagtgatctgttaccatttggttatgacttctaaagagccaaatgctattccttcaagcctgttttgcaggcagaaaataccagcagtgtcatttaggggttcctttgatgatgactactgctgttaactgacctcagcattaaaaaaaaaaaaaaa

SEQ ID NO: 31502 - DNA, 2765 bp, Homo Sapiens
ccgaggggttccttggagaaggtggtgcgtcctggggcggcagctgaggaagaaagacgcagtgccccgaagcccctgagctgaaaagggccagaaagggggcggcatggcatggcccaaactgcccgcaccttggctgctgctctgcacctggctcccagcagggtgcctgtccttgcttgtgacggtccagcacacagaacgctatgtcaccctgtttgcctctatcatcctcaaatgtgactacaccacctctgcccagctccaggacgtggtggtgacatggcgcttcaagtccttctgcaaggaccctatctttgactactactcagcgtcataccaggcagctttatccctgggccaggacccatccaatgactgcaacgacaaccagcgggaagttcgcatagtggcccagcggcgggggcagaatgagcccgtgctgggggtagattaccggcagcgcaagatcaccatccagaaccgagcagatctcgtgataaatgaagtgatgtggtgggaccatggagtgtattactgcaccattgaggctccaggggacacatcaggagaccccgataaggaagtaaagctcatcgtcctacactggctgacagtgatcttcatcatcctgggagccctcctcctcctgctgctgattggagtgtgctggtgccagtgctgtcctcagtattgctgctgctatatccgctgtccctgctgtcctgcccactgctgctgtcctgaggaagatttgtccctgccgtccagcctcccgcagatgccaatgacccagaccaccaatcagcctcccatcgccaatggtgtcctggagtatttggagaaagaactgcggaacctcaacctggcccagcctctgccccctgacctcaaaggcagatttggccatccctgcagcatgctgtcctccctgggctctgaggtcgtggaacgcagaatcatccacctgcccccactgatcagagacctgtcatcctcaaggaggaccagtgactccctgcaccagcagtggctcaccccaattccctccaggccctgggatctgagggaggggagaagccaccaccattaccctgatttccaccaggagctccaggaccgggggccaaagtcttgggcattggaaagaagggagttggacccatcgtggagtggaaggcaccgtagctctaggctgaatgggtcacccatacactggtcagacagggacagcctaagcgatgtcccctcatccagtgaggcacgctggcggccgagccaccctcctttcaggagccgctgtcaggagaggccccgcaggcccagcccccgggagagcactcagaggcacgggagacgacgcaggcaccgcagctactctcctcccttgccctccggcctcagttcctggagctctgaagaggacaaggagaggcagccccagagctggcgggcccaccgccgcggctcgcactccccacactggcccgaggagaagccgcctagctaccgctcactggatatcactccaggcaagaatagcaggaaaaaagggagtgtggagaggcgctcggagaaagacagctctcatagtggaaggagtgtggtcatttagtcaccaagcacagcacaacttctgtggctacttctcggctcctgtgtgtcatcagcatcacctaggtttccagctgacttgggaactgcaagtctgagtctaacagtttttggcttagattctgagaatcaaatagaagaattttaaatacaagagtttgagattgggtatagtggctcacacctgtaatcacagcactttgggaggctaagaatcacttgagactaggagttcaagatcagcctgggaaacatagtgagaccccgtctctacaaaaaatataaaaattagttaggtgtggtggcatgcacttgtagtcccagctactcaagaggctgaggcagaaggatcccttgagcccaggagtgcaaggctgcaatgagccaggatcccatgatcacacatctgtattccagcctgggcaatagagcaagtccccattactaaaaaacccaaaaggccaaaaaacaaaaaagttagagttcgaggaattaccaactgtagttttagccttggttcatgctctcttgcatatttatataatctctgacttgtaatggaccctgactggaatgtgatccctcaggaacttagtagcctgagtctttcagtagactacactgcccagaaccctggccattctcaaaatgagaacttgggaatgtttaagaagaaatcaaacatgtttcaggaaaaggaaatctatggagtattatagggacattcccatgggaatgtatcttcctccatggcatgtcttgagggtcctttcttgttaggagtttatcctgccagcccataaatggactatttattgtaagtgtagaaaatcacagagaagcagttttgcaccagccttattcctgtgccttgttttcctcttgctctttttttacctgtatatctaatttatattttcatatatattgtgtattgattgaagtcactttaaatccttcttgggaatgacacagtatataaataaggaagaaagaaaacatgccaagctgagcatgctgctccaaataaatatctgctttcctaaaaaaaaaaaaaaaaaaaaaaaaaaaaaaaaaaaaaaaaaaaaaaaaaaaaaaaaaaaaaaaaaaaaaaaaaaaaaaaaaaaaaaaaaaaaaaaaaaaaaaaaaaa

SEQ ID NO: 31503 - DNA, 4828 bp, Homo Sapiens
ggttgtagtggtggcttaggaataccctcccggctatcgcttcagtgggtagaggggaccactgcccgagagctttaatggagctgggtcctgccttcgcgctgaggagccctcgttttcgagatcaggcctgaccgggataagctccagaaacagtattatgtctcagtcctgtgcaaagtgagatgagctgtagcctttggagacctataattttgaacatagatgttccttaaaagctaaatctttttgaacagatgatgataaacctggaagagattcaccaacaatagcaaattacacactggcttggaaagtactcccatgttccgtttgatcttggcaatttaatgctgttcttgaagactaattagttacactggatatgctgctgttctttactttgggattgcttatacattttgtgttcttcgcctccatctttgacatttattttacatctcctttggttcatggaatgactcctcagtttacaccattgcctcctccagcgagaagattagtgttgtttgttgctgatggccttcgagcagatgcactttacgaattagatgaaaatggaaactctagagcaccgtttattaggaatatcataatgcatgaaggcagctggggcatatctcatacacgtgtgccaacagaatctcggccaggtcatgtagctctgatagctgggttttatgaagatgtcagtgcagttgccaaaggatggaaggaaaatcctgtagagtttgattctctttttaatgaaagtaaatacacatggagctggggaagcccagatatcctgcctatgtttgccaaaggtgctagtggagaccacgtttatacatatagttatgatgctaaaagagaggattttggtgctcaagatgcaacaaaactggatacgtgggtttttgataatgttaaggacttctttcatcatgccagaaacaaccagtctttgttttctaaaataaatgaagagaaaatagtttttttcttacatttattaggaatagatacaaacggacatgctcatcgaccatcctcgagagactacaagcacaatattaaaaaagttgatgatggagttaaagaaatcgtgtctatgtttaaccacttctatggaaatgatgggaaaacaacatttatctttacctctgaccatggaatgacagactggggttcccatggggctggtcatccttcagagactttaactcctttagtcacttggggagctggaatcaagtatccccaaagagtatcagctcagcaatttgatgatgcatttttgaaagagtggagattggagaattggaagaggctagatgtcaatcaggctgatattgcaccattgatgacttcccttattggagttccctttcctcttaactcagtgggaatccttcctgtggattatcttaacaacactgatctcttcaaagcagagagcatgtttacaaatgcagtacagattcttgaacagttcaaggtgaaaatgactcagaagaaagaagttactttaccatttttgtttacaccatttaaactgctttctgattccaaacagttcaacattttaagaaaagcaagatcttatataaaacacagaaagtttgatgaagtggtctccctttgcaaggagctaattcatcttgcattgaaaggattgtcctattatcacacatatgacagattctttttgggcgtcaatgttgttattggttttgtgggatggatatcttatgcctctttgttgatcatcaagtctcattccaaccttataaaaggtgttagtaaagaagtgaagaaaccaagccatctcctgccttgtagttttgtagctattggcattttagtagcattttttctgctgattcaagcctgtccctggacatattatgtatatggtttgttgccactgccaatatggtatgcggttctaagagaatttcaagttattcaggaccttgttgtatcagtgttgacctatcctctgagccattttgttgggtacctgttagcctttaccctgggaattgaagtattagttctcagttttttctaccgctatatgcttaccgctggacttactgcctttgcagcttggccatttctcactcggctgtggactcgagcaaagatgacctcactgagttggactttcttctctttgctcctggcagtgttcccactgatgccggttgtaggtcgaaagccagacatctctctagtgatgggtgcaggcttgctggttcttctgttatccctgtgtgttgtaacatctctcatgaaaagaaaagatagctttataaaggaagagctattggtacatctgttacaggtgctgagcacagtgctctccatgtatgttgtgtatagcactcagagtagtctactcaggaagcaaggactgcctctcatgaatcaaattattagctgggcaacattagcctcttccttggttgtgccactactgagttctccagttctctttcagcgattgttcagcatacttctttcattgatgtcaacctacctacttctaagcacagggtatgaagctctctttccactagtgttgtcttgtttgatgtttgtctggataaacatagaacaagaaactctacaacaatctggtgtttgctgtaaacaaaagctcaccagtatccagttctcttataatactgatataactcagtttcgacagctatatctggatgacatccgtagggcctttttccttgttttcttcttagtgacagcattttttggaactggaaatatagcttctattaacagctttgatcttgcctctgtctattgctttctgactgtgttcagtccttttatgatgggagccctgatgatgtggaagattttaatcccctttgttcttgttatgtgtgcttttgaagcagttcagttgactactcagttatcgtcaaaaagcctttttctcattgttctcgtcatatcagacattatggctttgcattttttcttcttggtcaaggattatggcagctggcttgatattgggacaagcatcagccactatgtgattgtcatgtccatgaccatctttttggtgttcctcaatggcctggcccagctgctcacaacgaagaaactcagactatgtggcaaacccaaaagtcacttcatgtgaggttgctgaagcaccattcagcatctggatcctgattctccttttaagctaaaatctcatcaaggcttcaataagaagatggatatggatatatagtatattctactcctgtaaggaaaatggtatttggaattccgaattgacaggttatctggaacaaaggagcttctttttttttctaggttttgcaggcatgaaatagtgattatatctgtggaaaagcataggaaggcattctcctttttcatttttttcctttggctggcagctcttcccagtgatgttgagagcacctgcagcaatctggtccccagtcgcacaacttcccacatacccagaggagagcatatgcctgtgggggcagtgctgatggcatccagagtcattgctgtggctgagctggaaggaaatcaccaggtgccaccgtcaatatttatcagctttcagcactggttttgttagacagtcagggtgtattatttcaagagcttcaataaaaaaagtgtttgcaggtatttgtcatatttctttagtatgcaataatgctatcttatcctttttagtgctatttctcaggttttctcagtcaaccagctagatgcatgtgatgcatgtctatccttcactttttttttttcatttctggattttcctgggatttctgacaacacaaaagtagaaagtgcttggtatttctgtcttatacataggaaaacatttaaaataaatagtttttaattgtaggctcaacatctgttaccccatagctttttcgtatattgtttctttccctttgaatttctttttactgtcatctattattttaacaggagttaaaataactcctgttaaactttctgacaatatcataagaattcatattaaaggtgttattctttctggttgtgagattctagcacaaaggcctaaaatcatcaaattagatttccatttgtaaacaaattctaatgggcaaaatatcttgagagcagtttttatatggattatccataaaatgacctttacatatccctgcagagttggccttttgcccgtggtgtgctagtagctttggctgatgctaagctttcctggtatgcgccctatttttaagaagtaattgcttttgaattaagttatagcattactaattcatgttaatgactaggaaaccctctgtaatttacaagatttttcaaattggtggggagtgaataaatacaatttaaaagtcagaaatcagtttggcaaagtgtactttcttaatttctatttatgatgaagtatagtcataatttatttgtaatactactttatggtataccagtgaaagaactgtagtataaaaaagaggtattaatgttttatgaaatctcatgcatcagttcatagcataaaatctagctggacaactaagaagctatggtagcaaacagtgatgttgatggaatgagaatcatgaactttcatattacctcaaaggatttttttatcagtttttttcacacatcagaaaaaactgactgtataaacacttatcactgacctttttctatgtgtagttttgccttttatcttttcccaaatttttataaagagaaattaataaatattttattacaacattgtaaaaaaaaaaaaaaaaaa

SEQ ID NO: 31504 - DNA, 2188 bp, Homo Sapiens
ccggaagcctcgaggtttagtcccgcccccctctcctcgctgcttaggctccgcggcctccaagctgtagctatgacggcgcgcgggactccgagccgcttcttggccagcgttctccacaacggactgggtcgctatgtgcagcagctgcagcgtctgagcttcagcgtcagccgcgacggcgcctcgtctcgcggcgccagggagttcgtggagcgggaggtgatcgacttcgcccgacggaatccaggggtcgtaatatatgtaaactcgcgtccgtgctgcgtgcccagagtagtggccgaataccttaacggggctgtgcgcgaggagagcatccactgcaagtcggtcgaggagatctcgacgctggtgcagaagctggccgaccagtcgggcttggacgtgatccgcatccgcaagcccttccacaccgacaaccctagcatccagggccagtggcaccccttcaccaacaagccgaccacgttccgcgggctacgcccccgagaggttcaggatcctgccccagcccaggacactggcctgagactgtctgcagttgcaccgcagatcctcctgcccggctggcccgacccaccagacctccccacagtggatcctatctcatcctcattgacctctgctccagcccctatgctgtccgcagtttcttgcctcccgattgtccctgcactgaccactgtgtgctcagcgtgaaggctgcatagaagtgtgtacggcttgaggtttcagcatccaggctgcagaccccacgcagtgtctcatacagtggaatgtggcagatgagacgggctttcaggaaggaagtccacttcttctgcaggatcttcttccctcccaggtctccctggggaggtagaggcacgggataaggggccagggtcagaggtccagcctctatacccgtgccccaacgtcagcccaatccaccttgcagacacgagccacacgggccacacggtgactgctgcggctctgagtgaagctgccagagccctcctcagtggcacgctccgtgaagaagtagtacaccttgtcatcatcacccactgcactggccttgctctcccgcacgaggacggagaacacaaactccgcatctgtgggtcaggcagtttgagaggcttttgagacaggctggggattcctttcccccactctgaggctgacccctcacttgacaacacacaggaatggaatggacaggctcacctggggatttgggggtggggtggtcagctggccaagggagtaaaaatgaagaaatagtcccctaccccccatcatcctgtgcctcatcctcctaaccattgagccaatgcattggtgtctcctcagttctcagggagtgtgggtggcggctccggcggatgtcaggaatgctccggaattcatacctagtggctgtgtagaggcctccatctggcgtggggatattccaggcatgagagacatgtcatattcaacagggcacatgacatatacatggtggcaggtcctagagatgagatccacatcctaaaaataccatgtctgtgatagggaagaaggcctgctcaccaatgatgaggcctgtgaagccacgggctgggtcataaggacacttctccttcccctcctcgaagctggttggcaaggtgaaggcctcagcatcctagggaacaaggaaccagcagtaagtggttccgaagacaggcagggacagtggctcaaagtcagatcagtctggggtcagggatcagcgatcagggataggggcaggttgtatggcagatgcacctgacagcaataacttaagcatcccctgagaatgaccttatggcctcaaaacaatgtatgtttggagttccaaatctgcaagtggccaacctagagattcactccttatctatgaagaacatctgagcccctagcccatcctgtggaacacatgctgtccaggggatcaaggccctttgttttgggttaaatgaagtttgccaggtggaggtgattagggggaggatgctaagtgaaaatgctataaaaactgcatggtttttacaaaggggaatggttctccagtgcagcccgccgccactggagtgccctgtatggaagtccccttaataaaccatccgtctccttaaaaaaaaaaaaaaaaaaaaaaaaaaaaaaaaaaaaa

SEQ ID NO: 31505 - DNA, 1832 bp, Homo Sapiens
aaggacagaggaggggcccttcctgtcagctggctgggagcagaggtggctttgtcttttcggaagaactggttctgtggaatttgtgcttatttcccatcaaggatcaaggacctgctctggggctacctcagggccccacaggatgaggggctggttttcagatgagttttctgcttgcctgtcatctggatagtgtctaaaaatttgcaaactgccttcttgtcagtgtcttgctcattcttcatgacactcctgatatgtctctcggtttcctcatctgctgcctctccagacttctgccagaacattgcacgcgacagtttcaggcacagaactgactggcagcaggggctgctccacgagtgggaatttgctccagcacttcacggactgcaagcgaggcacttgctaactcttggataacaagacctctgccagaagaaccatggctttggaaggcggagttcaggctgaggagatgggtgcggtcctcagtgagcccctgcctccctgaacataggaaacccacctgggcagccatggaatgggacaatggcacaggccaggctctgggcttgccacccaccacctgtgtctaccgcgagaacttcaagcaactgctgctgccacctgtgtattcggcggtgctggcggctggcctgccgctgaacatctgtgtcattacccagatctgcacgtcccgccgggccctgacccgcacggccgtgtacaccctaaaccttgctctggctgacctgctatatgcctgctccctgcccctgctcatctacaactatgcccaaggtgatcactggccctttggcgacttcgcctgccgcctggtccgcttcctcttctatgccaacctgcacggcagcatcctcttcctcacctgcatcagcttccagcgctacctgggcatctgccacccgctggccccctggcacaaacgtgggggccgccgggctgcctggctagtgtgtgtagccgtgtggctggccgtgacaacccagtgcctgcccacagccatcttcgctgccacaggcatccagcgtaaccgcactgtctgctatgacctcagcccgcctgccctggccacccactatatgccctatggcatggctctcactgtcatcggcttcctgctgccctttgctgccctgctggcctgctactgtctcctggcctgccgcctgtgccgccaggatggcccggcagagcctgtggcccaggagcggcgtggcaaggcggcccgcatggccgtggtggtggctgctgcctttgccatcagcttcctgccttttcacatcaccaagacagcctacctggcagtgcgctcgacgccgggcgtcccctgcactgtattggaggcctttgcagcggcctacaaaggcacgcggccgtttgccagtgccaacagcgtgctggaccccatcctcttctacttcacccagaagaagttccgccggcgaccacatgagctcctacagaaactcacagccaaatggcagaggcagggtcgctgagtcctccaggtcctgggcagccttcatatttgccattgtgtccggggcaccaggagccccaccaaccccaaaccatgcggagaattagagttcagctcagctgggcatggagttaagatccctcacaggacccagaagctcaccaaaaactatttcttcagccccttctctggcccagaccctgtgggcatggagatggacagacctgggcctggctcttgagaggtcccagtcagccatggagagctggggaaaccacattaaggtgctcacaaaaatacagtgtgacgtgtactgtcaaaa

SEQ ID NO: 31506 - DNA, 4242 bp, Homo Sapiens
gggtcagtcagtcgctccctgtcgctgccggagagtctctgcttcccccttcctacgcgctccgcggcggtagctcgggctctccggaggagggggcgacagagtaaaagagaggctgacttaataaagtttcctgaaacaacaactaccaccgaaaaggcccaaggtggggggagacccccatttttctccgcccctctcctaaagcctgagggaccgttgcaggtggagcggcgctggtgggacccgggttgcggcggcagccgttgccccggcgagggaagcctcaggtcctgcccgctccggttccggctccttcggtggtggcggcggcagctgctgccgggcggttcctcctgtcaactgcctccgcccgcgcgcctcccgcctagccacacagcgcggaggacgccgtgagccgccgccgcagtcgtctcggcccgcggagggacgtggtgagctgtggcgcttccgcgtcagcgccggcggggactctttgggagcgcgtcgggcccgagtccgggttcccccgcgtggtcagcggaggctgcgccaggtggggcccgcagccgcctcccacgccaggctgtccccgcggccgcccggcctgccttccttccttccgcccgcccgccggcccgccctaagagttgaccacgccgcaatgaagagcttcttacagtgaaagcaaagtaggtcgagtccactgaaaatgcctttaagggacaaatactgtcagactgaccaccatcatcacggatgctgtgaaccagtttatatcctggaacctggagatcctcctttgttacagcaaccactacagacatccaaatctggtattcaacaaataattgagtgctttcgatcaggaactaaacaacttaagcatattttattaaaagatgtggacactatttttgaatgtaagttatgccgcagtctcttcagaggattaccaaatttaattacccataaaaaattctactgcccaccaagtctccagatggatgacaaccttcctgatgtaaatgataaacaaagccaagccataaatgatctcctagaagccatatatccaagtgtggacaaacgagaatatattattaagctagaacccatagaaactaatcaaaatgcagtatttcaatatatttcgaggactgataatcctattgaagtcacagagtcaagcagtactcctgaacaaaccgaagttcagatacaggaaactagcactgaacagtcaaaaacagtaccggttacagatacagaggtggaaactgtagagccccctcctgttgagattgttacagatgaagttgcacctacatctgatgaacaacctcaggagtcgcaggctgacttggaaacttctgacaattctgattttggtcaccagttgatatgttgtctttgtagaaaagaattcaattctagacgaggtgttcgccgtcacattcgaaaagtacacaagaaaaagatggaagaactaaaaaagtacattgaaacacgaaagaatccaaaccaatcctctaaaggacgcagtaagaatgttctagttccattaagtaggagttgtccagtatgttgtaaatcatttgctacaaaagcgaatgtaaggaggcattttgatgaagttcatagaggactaaggagggattcaattactcctgatatagcaacaaagcctgggcaacctttgttcctggattctatttctcctaaaaaatcttttaagactcgaaaacaaaagtcttcttcaaaggctgaatacaatttaactgcatgcaaatgcctcctttgcaagaggaaatatagttcacaaataatgcttaaaagacatatgcaaattgtccacaagataactctttctggaacaaactctaaaagagaaaaaggccctaataatactgccaacagttcagaaataaaagttaaagttgaaccagcagattctgtagaatcttcacccccttccattacccattctccacagaatgaattaaagggaacaaatcattcaaatgaaaaaaagaacacaccggcagcacagaaaaataaagttaaacaagactctgaaagccctaaatcaactagtccgtcggctgcaggtggccagcaaaaaaccagaaaaccaaaactttcagctggctttgactttaagcaactttactgtaaactttgtaaacgtcagtttacttccaaacagaacttgactaaacacatcgagttgcacacagatggaaataacatttatgttaaattctacaagtgtcctctttgcacttatgaaactcgtcggaaacgtgatgtgatacgacatataactgtggttcataaaaagtcatctcgttatcttgggaaaataacagccagtttagagatcagagctataaaaaagcctattgattttgttctaaataaagtggcaaaaagaggcccttcgagggatgaagcaaaacatagtgattcaaaacatgatggcacttctaactctcctagtaaaaagtatgaagtagctgacgtcggtattgaagtaaaagtcacaaaaaacttttctcttcacagatgcaataaatgtggaaaggcatttgccaaaaagacttaccttgaacatcataagaaaactcataaggcaaatgcttccaattcacctgaaggaaacaaaaccaaaggccgaagtacaagatctaaggctcttgtctgataacttcaagtgatgtacgaaaaggtttggagttcatttttgtggaaagactttaaattggtgttagaaccactaaacatcttcaaatggtactatgaggaaaaaaagaaaaacatttttctaaatattcaactataactgctgttttctgactaaaataaccatctaaccacttgtttctaaggcactgcctattccagcactttcaagtagctgtgatattacatgttgtcatcacagtccatcagctatccacccttgaccttgtgcatttggtcgacagtttctacaaaaatgttacaaattttgttttctaaacaatttgttgattaagtgatcaacaacctgaagaaaatatcaatttttaattgacaaagactttatatcttagtgattttagttttgtttctctttatttggcaacattttcatctgaattgtatagatatatgattttctagtgagtgtatgttaggaacaaaagacaaaatagtatcaacacattataaatatttagcttactaaatatttgtaattatttttacatccatttatttctagcttgttctccagcacttcagtgtttgaaagtttcatcctaaaatatatactacaggaaagctgcagttcattttcatgcatggatcattacatttttcacttgtaaatgtaggtttttatgaaaattaaacattcccctatttttctttaaattttatacaaagcactttaatgatagatgcaaccttatttttcagttcctatttttttaaagaccacacatttactaatgttaatatgaaggtaataaatagcttactgatattttatggatgcagacaatccatgcacaaccacttcttatgatactagtttatttccttaaatattgctacaaaaggaagatgcgggtgtaagccctgatttttttttctcccaagaaaaatcttaaaggaccactttagataatatttgattcctactgtaaaatttagaaaatgatgaattcttgtccatttttgtaatcaagattttaggaaaaacagaagtacatctatctttatgaaattttgggcaggtttttgtgtatcaatattttgtacttttagggaatattttattttttagttatttgtgtcaaattataattataaaaggtacagcagaaaatataccatgtttttatataggttcacacctgtacttaggagggaccctgtccatctatatactttttgtataaaattttaaaatgttaaagatccacaaggtcttaataaaatgattctatagctagaaaaacatttaccttcccagtgctttgcactaaaatatactgtgaaaggaaactagaaagactgtaactattgctggaaatgttctatattgaatgtacatgctcttgttggaaaaatgtactatatgtgatggaaataaaccagaatcgaagttatttcagctaaatgtgcttcagcaaaggtgcattggttgaaacttaaatgttttattatcaaaaaaaaaaaaaaaaaaaaaaa

SEQ ID NO: 31507 - DNA, 5349 bp, Homo Sapiens
ctcacttccgcccaggtgaggcagggccgacaccgagcccgcccgacccgggctcccacctgctcctccagcgcaccaggtgtctttaagagtgattgaagagaataattcaaaatgcctgaaaatcctgctacagataaactgcaggtgctgcaggtacttgatcgcctgaaaatgaaattgcaggagaagggtgacacgtcgcagaatgagaagttatctatgttttatgagacactaaagagtcctctcttcaaccagatactcacacttcagcagtccatcaagcaactgaagggtcaactcaaccatataccctcagattgttcagccaactttgatttttctaggaaaggtttgttagtgttcacagatggttccattactaatggaaatgtccacaggccctctaataactcgactgtatctgggttatttccgtggaccccgaagttgggaaatgaagactttaactcagtcattcaacagatggctcagggccggcaaattgaatatatagatatagaacggccttcaactggaggccttggattcagtgtggtggccctcagaagtcaaaatctcggaaaagttgatatcttcgtgaaggatgtccagccagggagtgtagcagacagggatcaaagattaaaggaaaatgatcaaatattggccattaatcacacgccattggatcagaacatttcccatcagcaagcaattgcattattacaacaaaccactggatctttgagactgattgtggccagggaaccagtccacacaaaaagcagtacttctagcagcctaaatgatacaactctgcctgaaacagtttgttggggccatgttgaagaggttgagctcattaatgatggctctggactaggttttggaatagttggaggaaaaacaagtggcgtggttgtgaggactatagttcctggaggattagcagatcgagatggaagactccagacaggggaccacatcttgaagattggtggcacaaacgtgcagggaatgaccagtgagcaagttgcacaagttctaaggaactgtgggaattcagtcaggatgctcgttgctagagatccagctggtgacatttcagtcaccccccctgcccctgcagccttacctgttgccctgcctactgtagccagcaagggccctggttctgacagttctctttttgaaacttataatgttgagcttgtgagaaaagatgggcagagtcttggaattagaattgttggctatgttggaacatctcatacaggggaagcttcagggatttatgtgaaaagtataatacctggcagtgctgcgtaccacaatggccacattcaagtgaatgacaaaatagttgctgtcgatggcgtgaacattcagggttttgccaaccatgatgttgttgaagtattacgaaatgcagggcaggtggtacacctaaccctagttcgaaggaagacatcctcatctacttctccacttgaaccaccttcagacagaggaactgttgtagaaccactgaaaccaccagctctctttctaactggagcagtggaaactgaaactaatgtggatggtgaagatgaggaaattaaagaaagaattgatactttaaaaaatgacaacatacaagccttagaaaaattggaaaaagtcccagactctccagaaaatgagctgaaatccagatgggaaaacctgttgggtcctgattatgaagtaatggttgctactttggacacacagattgcagatgatgctgagttacagaaatattcaaagctgctgcctattcacactctgaggcttggtgtggaagtggattcctttgatgggcaccattatatttcttcaattgtttctggtggtcctgttgatacattgggtctcctacagccagaagatgagctgcttgaggtcaatggcatgcagctttatggaaaatctcgccgagaagcagtctcctttcttaaagaagtgccacccccttttactttggtttgctgtcggaggttgtttgatgatgaagcttctgtagatgaaccaaggcgcactgaaacctctcttcctgagacagaggttgaccacaatatggatgtcaatactgaagaagatgatgatggggaattagcactgtggtcccctgaagtcaagattgttgaactagtaaaagattgtaaaggtttgggattcagcattttggattaccaggaccctttagatcctacaagatcagtgattgtgatccgctccctggtagcagatggtgtagcagaaagaagtgggggactattacctggagaccgcctggtctcagtcaatgaatactgtttggacaacacctcacttgctgaagctgtggaaatattgaaagctgtgccaccaggcctagtacaccttggcatctgtaagcctttggtggaagataatgaagaagaaagttgttatattttacattcaagcagtaatgaagacaagactgaattttcaggaacaattcatgatataaattcatctttaatactcgaagcacccaagggatttagagatgaaccatattttaaagaagaacttgtggatgaaccatttctagatctgggaaagtctttccattcccaacaaaaagagatagagcaaagcaaggaggcctgggagatgcatgaatttctgactcctagattgcaggaaatggatgaagaaagagaaatgcttgttgatgaagaatatgagttatatcaagatccctcaccatccatggagttgtatcccttgtcgcacattcaagaggccactcctgtgccctctgtgaatgaacttcactttggtacacagtggttgcatgataatgaaccatccgagtctcaagaggcaagaaccgggaggactgtctattcccaggaggcacagccgtatggctattgccctgaaaatgtgatgaaagaaaattttgtcatggagtccctaccatctgtaccatcaactgaaggaaacagtcaacaaggcagatttgacgacctggaaaatcttaattcattagcaaaaactagtctggatttaggcatgatcccgaatgatgtccaaggtcctagcttgctcattgaccttcctgttgtggctcaaaggagggagcaagaagatttgcctttatatcaacaccaagcgacacgagttatttccaaggcctcagcatacacaggaatgttgtcttctagatatgccactgatacatgtgagttacctgagagagaagaaggcgaaggagaagaaactccaaattttagccactggggtccaccgagaattgttgagatttttagagaacccaatgtgtctcttgggatcagtattgttggtggacaaactgttataaaacgtctaaagaatggagaggagcttaaaggtatattcatcaaacaagttttagaagacagtccagcagggaagacgaacgcacttaaaactggagataaaatacttgaggtgtctggagtagatttgcagaatgcctcacacagcgaagcagttgaggccattaagaatgcaggaaaccctgtggtgttcattgttcagagtttgtcatccactccacgagtcattcctaacgtacataacaaggccaacaaaatcaccggtaaccagaaccaggacacccaagaaaagaaagaaaagaggcaaggaactgctccaccgccaatgaaacttcctcctccttataaagctctgactgatgacagtgatgaaaatgaagaagaagatgcctttaccgaccaaaaaatcagacaaagatatgcagatctgcctggagaactgcacattattgaacttgaaaaagataagaatggacttggactcagccttgctggtaataaagaccgatcacgcatgagcatatttgtggtgggaattaacccggaaggacctgctgccgcagatggacgaatgcgtattggagatgaactcttagagataaacaatcagattctgtatggaagaagtcaccaaaatgcatctgccattattaagactgccccatcaaaggtcaagctggttttcatcagaaacgaggatgcagtcaatcagatggccgttactccctttccagtgccatcaagttctccatcttctattgaggatcagagcggcaccgaacctattagtagtgaggaagatggcagcgtcgaagttggtattaaacaattgcctgaaagtgaaagcttcaaactggctgtcagccagatgaaacagcaaaaatatccaacaaaagtctccttcagttcacaagagataccattagcaccagcttcatcataccattcaacagatgcagacttcacaggctatggtggtttccaggctcctctgtcagtggaccccgcaacgtgtcccattgtccctggacaggaaatgattatagaaatatccaagggacgttcagggcttggtctcagcattgtgggaggaaaagacacacccttggttaatggggttgacctgaggaactccagccacgaagaagccatcacagccctgaggcagaccccccagaaggtgcggctggtggtgtatagagatgaggcacactaccgggatgaggagaacttggagattttccctgtggatctgcagaagaaagctggccggggcctgggcctgagcatcgttgggaaacggtaaagacgtgctgtgggagttgggatctgcctttttcatccagagctctgatgcctgtgaacactgaaagagaaagcctaatgtaaagtagtgatgggatttctaaaaataagatatttatgaaaatttgacaacatgggtcatatttctgagcaaggtcttaccagaaaaattgtcatatcaagatagaactccaagtccaatcaatccagactgatatatttctgtacagagtaagaacaactagcaaggttctttcacttggaattactaagatcggagttttgcagaggttgattaaagcaaccatacccaagaaatagctagcatcaagaatgagatttatccaatgttgggtcaagaacattgcttcgacatggaaattaacatggaacattgcttttcgtgatactgttaatttcatactatgttgaaactagttgagtagacatagttaagagataaacataattcttcacgatagtagttttctattaagaaaaatgtcctgctgggcacagtggcatgtacctgttgtctcagctatgtgggaagatcacttgaggccaggagttcaaggctatagtgtgctatgatcatgcctgtgaatagccactgcacttgagcctcttgggaaacataacaagaccccatctgtaaatt

SEQ ID NO: 31508 - DNA, 3320 bp, Homo Sapiens
acttccggacgggactcccctctgtccgcgcctcacatctccccttcctctcgcctagtcctgtgccgttttccgtccgcgactcttccggcccagagctttcggagtgcggttgctcaggggaagccgtcgccgcccccgcctcggggccgagtgagagtgcccgtcgcgtcgcgccgcgtcgccccccgggccgcctccttgccgccagtggcgggctccgttctccctcgaagcactccccccagctccatgaatggaaatcggctccgcaggacccgctggggcccagcccctactcatggtgcccagaagacctggctatggcaccatgggcaaacccattaaactgctggctaactgttttcaagttgaaatcccaaagattgatgtctacctctatgaggtagatattaaaccagacaagtgtcctaggagagtgaacaggtagatttagacgttactttacctggggaaggtggaaaagatcgacctttcaaggtgtcaatcaaatttgtctctcgggtgagttggcacctactgcatgaagtactgacaggacggaccttgcctgagccactggaattagacaagccaatcagcactaaccctgtccatgccgttgatgtggtgctacgacatctgccctccatgaatttctgccactgccttctacaaagcacaacctgtaattcagttcatgtgtgaagttcttgatattcataatattgatgagcaaccaagacctctgactgattctcatcgggtaaaattcaccaaagagataaaaggtttgaaggttgaagtgactcattgtggaacaatgagacggaaataccgtgtttgtaatgtaacaaggaggcctgccagtcatcaaacctttcctttacagttagaaaacggccaaactgtggagagaacagtagcgcagtatttcagagaaaagtatactcttcagctgaagtacccgcaccttccctgtctgcaagtcgggcaggaacagaaacacacctacctgccactagaagtctgtaatattgtggcagggcaacgatgtatcaagaagctaacagacaatcagacttccactatgatcaaggcaacagcaagatctgcaccagatagacaagaggaaattagcagattggtaagaagtgcaaattatgaaacagatccatttgttcaggagtttcaatttaaagttcgggatgaaatggctcatgtaactggacgcgtacttccagcacctatgctccagtatggaggacggaatcggacagtagcaacaccgagccatggagtatgggacatgcgagggaaacaattccacacaggagttgaaatcaaaatgtgggctatcgcttgttttgccacacagaggcagtgcagagaagaaatattgaagggtttcacagaccagctgcgtaagatttctaaggatgcagggatgcccatccagggccagccatgcttctgcaaatatgcacagggggcagacagcgtagagcccatgttccggcatctcaagaacacatattctggcctacagcttattatcgtcatcctgccggggaagacaccagtgtatgcggaagtgaaacgtgtaggagacacacttttgggtatggctacacaatgtgttcaagtcaagaatgtaataaaaacatctcctcaaactctgtcaaacttgtgcctaaagataaatgttaaactcggagggatcaataatattcttgtacctcatcaaagaccttctgtgttccagcaaccagtgatctttttgggagccgatgtcactcatccacctgctggtgatggaaagaagccttctattgctgctgttgtaggtagtatggatgcacacccaagcagatactgtgccacagtaagagttcagagaccccgacaggagatcatccaggacttggcctccatggtccgggaacttcttattcaattttataagtcaactcggttcaagcctactcgtatcatcttttatcgggatggtgtttcagaggggcagtttaggcaggtattatattatgaactactagcaattcgagaagcctgcatcagtttggagaaagactatcaacctggaataacctacattgtagttcagaagagacatcacactcgattattttgtgctgataggacagaaagggttggaagaagtggcaatatcccagctggaacaacagttgatacagacattacacacccatatgagttcgatttttacctctgtagccatgctggaatacagggtaccagtcgtccttcacactatcatgttttatgggatgataactgctttactgcagatgaacttcagctgctaacttaccagctctgccacacttacgtacgctgtacacgatctgtttctatacctgcaccagcgtattatgctcacctggtagcatttagagccagatatcatcttgtggacaaagaacatgacagtgctgaaggaagtcacgtttcaggacaaagcaatgggcgagatccacaagctcttgccaaggctgtacagattcaccaagataccttacgcacaatgtacttcgcttaaatagtccaagtatattctctgagaggaagtactgaaagatgaattgacatacaacgtatgtttccagtgaagtcaattgagtaaggacacctccagccatacagaaaccaacactgtgtgggggccaaggtctgatccttatgttaatacaaggaagattgtttacttcatcaaggaacacagcatcattatgcaatatgaaaccagccaactgctttttgtgcggtctcctataggaagtatcgcaattgttttgttttcatttcttgtagtctaacccttttaatgcctttacctcaagttgcttggcagcacaactatctttgcaaaaaaaagtaaagaaaaagtaaatgatggtttaaaaaatacacaccttcatgaataatcaaagtgatttttcagaattatgtgtgcaaaaaattaatgtgcattcatatattcttgtaaaaggtgtctgtgtatttttaaaatatatacatccatacttcatatgcatatatatctagatctggattgataatagatatatatgtgtctgttatatattttagagttcattccattggggaattttctttcccttttattctacccccactaccgcctttatttctctatttcccttgccttcatcacctacatttttttcccagtcctaccagtgacattcaaatgttgatgtatctggttcgtttgaatataaaatatggcaaactaaaaaaaaaaaaaaaaaaaaaaa

SEQ ID NO: 31509 - DNA, 2051 bp, Homo Sapiens
ggatacgtcgacaatagatgacggggctcacgttgtacgttcacatcaggtcccggcccgccggaacctgggcgatccacgatgccgagtttgccacgctgcgacagcccataggcttgcccccccgggcattcgggtggactacgaacacaaactgaagccctaggacttgtcgcccgtttgcgctctcgccgaggcacaggctgctcgcggaccaccctgctccgaaaactaagaaggggaccagtagacggggtggattcgaggtggggacatgggacgcagcggtcggagccgcctggaggggtacccggtggtcccgatggagctatcatctttgagaggtaggtggtagcccattcatctggttactgatactggccggcatcagtggactgtcggcaggtccttgagcaactggtgtgtgaaatgggacggacgtcaaaggacaagcgggatgtctactaccgcctggccaaggagaatggctggcgtgctcgcagcgccttcaaactgctacaactggataaggaattccaactcttccaaggcgtgacacgggcagttgacctgtgtgcagccccaggcagctggagccaggtgctgagccagaagatcgggggccaagggtccggccacgtggtggctgtggacctgcaggctatggctccactaccaggtgtggtacagatccagggggacatcacccagctgtccactgccaaggagatcatccagcactttaagggctgccctgcggacctagtggtgtgtgacggggctcctgatgtaaccggtctccatgatgttgatgagtatatgcaggcccagctcctcctagctgctctgaacattgctacacatgtcctgaagccagggggctgctttgtggccaagatattccgaggccgggatgtgacgctcctctacagccagctgcaggtcttcttctccagcgtgctgtgtgccaagcccaggagcagccggaactctagcatcgaggccttcgctgtctgtcagggctatgaccctcccgagggcttcatcccggacctgagcaaacccctgctggaccattcttacgatttcaaccagctggatggtcccacccgcatcattgtgccttttgtgacctgtggggacctgagctcctatgattcggaccgcagttacccactggacctagagggcggctcagagtacaagtacactccacccacacagccccccatctcgccaccataccaggaggcctgcacgttgaagaggaaggggcagctggccaaggagatccgcccccaggactgccccatcagcagagtggacacgtttccccagcccctggccgcccctcagtgccacaccctgctggcccctgagatggaagacaatgaaatgagttgttcaccttaacccattacgctggcaaactgatacaactcagaaactgctcaatgtcaggaaaaccggaacttgttgatgaacttgttttcaaaatatcatctcatcaacgaggcctggacaaacaagccctgaggagggatctgcaacaaccctgaagacaacaaggaaagaaaccatgaaagtctgtctgtactgcagtgggaattcttgagtgaggtcttacctcttctttaaacctcttcaggagtgtcctgattatgtccagaattttccctaaaggcagggattcttaacctggatagaagccaggggtaaccatgaacttgatggaagaaaatgttacatctttattttcagcaatgaaactgaaatttagccttactcccaagttataaatgctggcaacaaatcacagtagtaaaagcagtacctgggattttcccaccaatacaaaccagttacagcaactgtaatgtaacataaaaagggcatcttgaagtattgttcatatttgtcacctcttggaatgatagcagatcctgtaagttgatgtattaattaaaaagcccatatattactgcatctcaattttgtttcaatttaatatatagtaataattgtaattcaatgtaattggcttccattgt

SEQ ID NO: 31510 - DNA, 1237 bp, Homo Sapiens
ggaggcggtgcaggaagcctccgaccacgcgggctcctgatcgcgggcgcccacagcgcggacatggcgggctggtggccggcgttgtcgcgcacggcccggcgccacccgtggcccaccaacgtgctgctctacgttgctcgagcaacgtagctctacgctctacgagcgtgccgtagctcgctcgtctccgccggggacgtgctgcagcaacggctgcagggccgctagcgactggcgccagacgcggcgcgtggccacgttggtggtgaccttccacgccaacttcaactacgtgtggctgggcctgctggagcgcgcgctcccgggccgagcgccgcgcgccatgctggccaagttgctgtgcgaccaggtggtcggtgcgcccatcgcggtctcggccttctacgccggtatgagcattctccagggaaaggatgacatatttttggacctgaaacagaaattctggaacacctatatggtggtctatgttgcccgcaacgcaaaggatgtggcagtttcctactaccacttctaccacatggccaaggtgcaccctgagcctgggacctgggacagcttcctggagaagttcatggtcggagaagtgtcctacggatcctggtaccagcacgtgcaggagtggtgggagctgagccgcacccaccctgttctctacctcttctatgaagacatgaaggagaacccgaaaagggagattcaaaagatcctggagtttgtggggcgctccctgccagaggagaccgtggacttcgtggttcagcacacgtcgttcaaggagatgaagaagaaccctatgaccaactacaccaccgtcccccaggagttcatggaccacagcatctcccccttcatgaggaaaggcatggctggggactggaagaccaccttcaccgtggcgcagaatgagcgcttcgatgcggactatgcggagaagatggcaggctgcagcctcagcttccgctctgagctgtgagaggggctcctggagtcactgcagagggagtgtgcgaatcaaacctgaccaagcggctcaagaataaaatatgaattgagggcccgggacggtaggtcatgtctgtaatcccagcaatttggaggctgaggtgggaggatcatttgagcccaggagttcgagaccaacctgggcaacatagtgagattctgttaaaaaaataaaataaaataaaaccaatttttaaaaaaaaaaaaa

SEQ ID NO: 31511 - DNA, 1429 bp, Homo Sapiens
ataggctcagacacaaggagaggcttggagagagcagacgccttctggattcaagaagacgaggctcacctgttactcggcctcccagaaagatggataggagaaatgactacggatatagggtgcctctatttcagtccaagcatctgaatggggatgagagaagtggcagtaattacaggcggatcccatggggccggaggcctgcaccaccgcgagatgtggccattttacaagaaagggctaataagttggtgaaatacctgttggttaaggaccagacaaagatccccatcaaacgctcagacatgctgagggatgtcatccaagaatatgatgaatatttcccagaaatcattgaacgagcaagctacactctggagaagatgtttcgagtcaatctgaaagaaattgataagcaaagtagcttgtatattctcatcagcactcaggaatcctctgcaggcatactgggaacgaccaaggacacacccaagctgggtctcctcatggtgattctgagtgtcatttttatgaatggcaacaaggccagtgaggctgtcatctgggaggtgctgcgcaagttggggctgcgccctggggtgaggcattcactctttggggaagtgaggaagctcatcacagacgagtttgtgaagcagaagtacctggagtacaagagggtccctaacagcagaccacctgaatatgagttcttctggggcttgcgctcctaccacgagactagcaagatgaaagtcctcaagtttgcatgcagggtgcagaagaaagaccccaaggactgggctgtgcagtaccgcgaggcagtggagatggaagtccaagctgcagctgtggctgtggctgaggctgaagccagggctgagtggttccaacaccagcactggctttactggcgaacccagcaccagcacgggcttcagtagtggacccagttctattgttggcttcagcggtggaccaagcactggtgttggcttctgcagtggaccaagcaccagtggcttcagcggtggaccgagcacaggagctggcttcggcggtggaccaaacactggtgctggctttggtggtggaccgagcaccagtgctggctttggcagtggagccgccagtcttggtgcctgtggcttctcgtatggctagtgaggtttcagatttattccccatgtttacagataccgctaataaattgcagtagtccttcccatggagccaaagtacatccttggaatctttgtccacacagcagtcaaggcagttatggccaatcagctgagggtgtcatgtgatggaaaaatctgtttgctgttcctgctttattgtttgctttctgtgtgctgtcatattttggtatcagagttacattaaatttgcaaaatgaaaaaaaaaaaaaaaaaaaaaaaaa

SEQ ID NO: 31512 - DNA, 725 bp, Homo Sapiens
gcggccgtaaagagtttgtagaggcagttcgggtgcggtacgttgcattccggtaccggacgccgagagcggtttgtctccgtctctggagttgtaggcgagaggtgatcatgtccggtcgcgggaaacagggcggcaaagtgcgagcaaaggccaaatcccgctcctcccgcgcgggcctgcagttcccggtgggccgagtgcacagactgctgcgcaaagggaactacgcggagcgagtgggcgccggggcgccggtgtacctggcggcggtgttggagtaccttacggcggagatcctggagctggctggcaacgccgcgcgtgacaacaagaagaccaggataattccccgccacctgcagctcgccatccgcaacgacgaggagttaaacaagctgctgggcaaagtgaccatcgctcagggcggcgtcctgcccaacatccaggccgtgctgctgcccaagaagacggagagtcagaagacgaagagcaaatgaccctgacgccgccctcagggagctggctcccccagcaaaggcccttttcatggtcgtcccgcaatgcttttgaatgtgctggatgtcatggagggccggtgacatctagcggggaggtgggcggcgagggtcccggcgggagccaataaagttggtgaaaatcaaaaaaaaaaaaaaaaaaaaaaaaaaaaaaaaaaaaaaaaaaaaaaaaaaaaaaaaaaaaaa

SEQ ID NO: 31513 - DNA, 3137 bp, Homo Sapiens
attttgcaattgtgggttggctgaagaaaagaagacaacatgggaaaggaaaatctgggtgataaacggattaaacctttaggttaccgctgctctagataaacccatgatgtgactttttgtttttctcctaggtcagctgagggaacagctcagttaccttaagggtgataatttttttaggtttacttgttcggattgctcagcagatggcaaggagcagtatgaaaggctgaagctgacatggcagcaagtcgtcatgttggcaatgtacaacttgtctctggaaggaagtggacgtcaaggttatttcaggtggaaagaagatatctgtgcttttattgagaaacattggacttttttactagggaataggaaaaagacgtctacctggtggagcaccgtggcaggttgcctcagcgtgggaagtcccatgtacttccgttcaggtgctcaggaatttggagagccaggatggtggaaacttgttcataacaagcccccaacgatgaaacctgaaggagagaagttgtctgcctctactttgaaaataaaagcagcctcaaaaccaactttagatcccatcattactgttgagggacttagaaaacgagcaagtcggaatcctgtggaatctgccatggaattaaaagagaaaaggtctcgaactcaggaagcaaaagacattagaagagcccagaaggaggccgctggctttcttgacaggagcacatcttctacccctgtaaaattcataagccgaggccgcaggccagatgtgattctggaaaaaggcgaagtgattgacttttcctccttgagctcctctgaccgcaccccgctgacaagcccatctccttctccttctctggatttctctgcccctggtacacctgcctctcattctgccacacctagcttgctttcagaagcagatctgattccagatgtgatgcccccacaagccttgtttcatgatgacgatgagatggaaggcgatggagtcatagacccagggatggagtacgtcccaccccctgctgggtcagtagcttctgggccagtggttgggggcagaaagaaggtcagaggccctgaacagataaagcaggaggtagagagtgaggaggaaaaacccgacaggatggatattgacagtgaagacacagattcaaacacatctttgcaaacaagggctagagaaaagaggaagcctcagctggagaaggacacaaagccgaaagagcccaggtatactcccgtgagcatctacgaggaaaagctgctgctcaagaggctggaagcttgtcccggtgctgttgccatgactccggaagctcggagactgaaacgcaaactgattgtcagacaagcgaaaagggataggggattaccactttttgacttggatcaagttgttaatgctgctcttttgttagttgacgggatttatggagccaaagaaggaggaatttccagacttccagctggacaagccacgtacagaaccacctgtcaggacttcagaatccttgaccgataccagacttccttgccgtccaggaagggatttcgacaccagaccaccaagtttttgtatcgcttggtaggatcagaagatatggctgtggaccagagtattgtcagcccttatacctctcggatcttgaaaccttatatcaggcgtgattatgaaacaaagccacccaaactgcagctcctgtcacagattcgttcccacctgcacaggagcgaccctcactggacgccggagcccgacgcacctctcgattactgttatgtgcggccaaatcacatcccaacgatcaactccatgtgtcaggagtttttttggcctggcattgacctgtctgagtgtctgcagtacccagacttcagtgttgttgttctttataaaaaagtcatcattgcctttggcttcatggttcctgatgtgaaatacaatgaagcttacatttcatttctgttcgtccaccctgaatggagaagagcagggattgcaactttcatgatctatcatctgattcagacctgcatgggcaaggacgtaacccttcacgtctcagcaagcaaccccgctatgctactgtaccagaagtttggattcaagactgaagaatatgtattagatttctatgataaatattacccattggagagtacagagtgtaaacacgcattctttctgaggctccggcgctgatgcgaatacagctcacagagaaacgcatgtgctattggagaacaggtctttgtggagatctaaaggcagtgattgatttcacagggagctctaatctctgtgattacatggtccttcaaactcccaaccaaagtgagaaaagcggcatgcagtgaaatgagcagtgagcagccctttagcaaaatcgccctccagtccttcctggagatgccttcagccagcatcccagactccacagttatttatgaatgatgtcgtgattctccctccacctgacagtttgtaagagtgaaagagcatctaacctgatgctcttggagagagataacctgtctgtcataacttaaaggatgagaaaatgtggtgtagctattaaagattcatgcagtcccaaaaggcactgtcctgggatgatgagagattataaggtgatttcataaaaggaatccaaccctgtgcccggccattgatgtgttgtcattgaatccaggaggatttctagggcactgaagttttgttgtttcttttgctgactttggttacagtcagaaaaaataaactagatgtttgtgtctacatgttctacctgttgtacctattagcatcttcctgcagggacttgggcccatggcctgggaggttggtttgggattggggttgttgggcagcctgccattcacctggcctatcctggcccttctcatgcccaagacagttgtttcacaggagtggaagtgtgggtgatgcaagtagaaccctctagatgtaccctgtgtggtctgcaggactggactgtttgctgtgtttgtggatgttggcgatagactgtcaattaggttgtttgtgatccaacaagaacatttccaaaagtatctaggtgttctcaaataaaaagctttctttgcacaaccca

SEQ ID NO: 31514 - DNA, 3367 bp, Homo Sapiens
tgaccaagagctgacgtgtgcagaagtccttcttgtcctggtcgttgttcccgtctgagtaccagctccccactgccctgagggcgggccggcctgcggcggagggaaaaaggaagaggagaaggaaattgtcccgaatccctgcagtctttctgtaggttgcggcacaacgccaggcaaaagaagaggaaggaatttaatcctaatcggtggaggtcgatttgagggtctgctgtagcaggtggctccgcttgaagcgagggaggaagtttcctccgatcagtagagattggaaagattgttgggagtggcacaccactagggaaaagaagaaggggcgaactgcttgtcttgaggaggtcaacccccagaatcagctcttgtggccttgaagtggctgaagacgatcaccctccacaggcttgagcccagtcccacagccttcctcccccagcctgagtgactactctattccttggtccctgctattgtcggggacgattgcatgggctacgccaggaaagtaggctgggtgaccgcaggcctggtgattggggctggcgcctgctattgcatttatagactgactaggggaagaaaacagaacaaggaaaaaatggctgagggtggatctggggatgtggatgatgctggggactgttctggggccaggtataatgactggtctgatgatgatgatgacagcaatgagagcaagagtatagtatggtacccaccttgggctcggattgggactgaagctggaaccagagctagggccagggcaagggccagggctacccgggcacgtcgggctgtccagaaacgggcttcccccaattcagatgataccgttttgtcccctcaagagctacaaaaggttctttgcttggttgagatgtctgaaaagccttatattcttgaagcagctttaattgctctgggtaacaatgctgcttatgcatttaacagagatattattcgtgatctgggtggtctcccaattgtcgcaaagattctcaatactcgggatcccatagttaaggaaaaggctttaattgtcctgaataacttgagtgtgaatgctgaaaatcagcgcaggcttaaagtatacatgaatcaagtgtgtgatgacacaatcacttctcgcttgaactcatctgtgcagcttgctggactgagattgcttacaaatatgactgttactaatgagtatcagcacatgcttgctaattccatttctgacttttttcgtttattttcagcgggaaatgaagaaaccaaacttcaggttctgaaactccttttgaatttggctgaaaatccagccatgactagggaactgctcagggcccaagtaccatcttcactgggctccctctttaataagaaggagaacaaagaagttattcttaaacttctggtcatatttgagaacataaatgataatttcaaatgggaagaaaatgaacctactcagaatcaattcggtgaaggttcactttttttctttttaaaagaatttcaagtgtgtgctgataaggttctgggaatagaaagtcaccatgattttttggtgaaagtaaaagttggaaaattcatggccaaacttgctgaacatatgttcccaaagagccaggaataacaccttgattttgtaatttagaagcaacacacattgtaaactattcattttctccaccttgtttatatggtaaaggaatcctttcagctgccagttttgaataatgaatatcatattgtatcatcaatgctgatatttaactgagttggtctttaggtttaagatggataaatgaatatcactacttgttctgaaaacatgtttgttgctttttatctcgctgcctagattgaaatattttgctatttcttctgcataagtgacagtgaaccaattcatcatgagtaagctcccttctgtcattttcattgatttaatttgtgtatcatcaataaaattgtatgttaatgctggaaagaaaaaaagaagaaagaaagaaaccatccctgtccttcagtttataatctagttggagagataagaaacgtacaaaccaaaagataacagaatatctgaagcatgtactcattgtcagatgttccctctgagagcacagaggaggcaaaagcttctgtgggatgtgctagtcggctaaagcttcacagaggaggtggcaattgaaaatgagtcctgaatggggtagggtggttagggaattccatgagacaagacaaggggggcatggtgtgagaaaggcatggaagtaggaaccctcttcctatgacaggagatcattctgcttagagtggagagtgtggagagtgggagtagataattttggaaagctgggtgaagccagttgtggagaattgtttgaatattatcccattgaatacccagagccactaaatctttttttactagaaaataattggggtccatatgaaagtctctattactgagtagtgtcaatgagggtgtggcaaaatggagcctttcacatcctagtggtggccatttggtaatacagatataagccttaaactatgtaaacccttgtcctaaggaagtaattgaataattgcccaaagattgtatgtatgaggctgttcatcccagcactgtctaagctagtaaaaattggaaacaatttaagtatctagcacattggattggttataaagcaaggaatgttcacacagtaggatattataagtatgctgatggaaatctatattgccaggaaaagctattcattatgcgttgtgaagtcagaaagtaaaaaagggtagatagaagtattcgaagtatagttccattttttgagactaataaaacatatgtttaaaaggacactaaaaactggagttatagatatccagatagaaacagtagttatctttgggtagaagaataatgagtgatctttacttttttactttttattcatctttgtgtttttatttatctaaaatgggtattgatttttaggacggttttgaaaaagaaaagtgttgggaatgaagcaagtgattgattggaaaacatactgaatggaagaaatatttagattaaaaatgaggtaggttgaagtttcttctctgaaatgatagataaatggtgaagataaggcttattgtgaggattcagtgaggtaatatatgcaaagtacttacaatgttctggcacatagtaattaattaagaaaatcgagcacccttaattacctagaatgcagggttgttagttttttggttgacttttgttttgctggggcattctgccatgttttagtgtcatttaataaataatagtaacaataaaggttaacatttattaagt

SEQ ID NO: 31515 - DNA, 5863 bp, Homo Sapiens
gtgcctgactgacagaagttcttgcccccggggagctggtgtggacagaggagggagcctagacatggaggagaaggactacagtgaggccgatggcctttcggagaggaccacgcccagcaaggcccagaaatcgccccagaagattgccaagaaatacaagagtgccatctgccgggtcactctgcttgatgcctcggagtatgagtgtgaggtggagaaacatggccggggccaggtgctgtttgacctggtctgtgaacacctcaacctcctagagaaggactacttcggcctgaccttctgtgatgctgacagccagaagaactggctggacccctccaaggagatcaagaagcagatccggagtagcccctggaattttgccttcacagtcaagttctacccgcctgatcctgcccagctgacagaagacatcacaagatactacctgtgcctgcagctgcgggcagacatcatcacgggccggctgccatgctcctttgtcacgcatgccctactgggctcctacgctgtgcaggctgagctgggtgactatgatgctgaggagcatgtgggcaactatgtcagcgagctccgcttcgcccctaaccagacccgggagctggaggagaggatcatggagctgcataagacatatagggggatgaccccgggagaagcagaaatccacttcttagagaatgccaagaagctttccatgtacggagtagacctgcaccatgccaaggactctgagggcatcgacatcatgttaggcgtttgtgccaatggcctgctcatctaccgggaccggctgagaatcaaccgctttgcctggcccaagatcctcaagatctcctacaagaggagtaacttctatatcaagatccggcctggggagtatgagcaatttgagagcacaattggctttaagctcccaaaccaccggtcagccaagagactgtggaaggtctgcatcgagcatcatacattcttccggctggtgtcccctgagcccccacccaagggcttcctggtgatgggctccaagttccggtacagtgggaggacccaggcacagactcgccaggccagcgccctcattgaccggcctgcacccttctttgagcgttcttccagcaaacggtacaccatgtcccgcagccttgatggagcagagttctcccgcccagcctcggtcagcgagaaccatgatgcagggcctgacggtgacaagcgggatgaggatggcgagtctggggggcaacggtcagaggctgaggagggagaggtcaggactccaaccaagatcaaggagctaaagttcttagacaagccagaagatgtcttgctgaagcaccaggccagcatcaatgagctcaaaaggaccctgaaggagcccaacagcaaactcatccaccgggatcgagactgggaacgggagcgcaggctgccctcctcccccgcctccccctcccccaagggcacccctgagaaagccaatgagagagcagggctgagggagggctccgaggagaaagtcaaaccaccacgtccccgggccccagagagtgacacaggcgatgaggaccaggaccaggagagggacacggtgttcctgaaggacaaccacctggccattgagcgcaagtgctccagcatcacggtcagctctacgtctagcctggaggctgaggtggacttcacggtcattggtgactaccatggcagcgccttcgaagacttctcccgcagcctgcctgagctcgaccgggacaaaagcgactcggacactgagggcctgctgttctcccgggatctcaacaagggggcccccagccaggatgatgagtctgggggcattgaggacagcccggatcgaggggcctgctccaccccggatatgccccagtttgagcccgtgaaaacagaaaccatgactgtcagcagtctggccattagaaagaagattgagccggaggccgtactgcagaccagagtctccgctatggataacacccaggagaacagtctcaagtccgggaagggggcagctgccatgatcccaggcccacagacggtggccacggaaatccgttctctttctccgatcatcgggaaagatgtcctcaccagcacctacggcgccactgcggaaaccctctcaacctccaccaccacccatgtcaccaaaactgtgaaaggagggttttctgagacaaggatcgagaagcgaatcatcattactggggatgaagatgtcgatcaagaccaggccctggctttggccatcaaggaggccaaactgcagcatcctgatatgctggtaaccaaagctgtcgtatacagagaaacagacccatccccagaggagagggacaagaagccacaggaatcctgacctctgtgaagagatcctggcatttctggtccaacccaagccagagaaccattaagaaggggccttcattctggattctccgacgcaacactgacgtcccagctgcgacgtactgtcactgatgagagactgggaagggaaaagcatatatatatagatatatagagatatagatatatatacaggaaacaccgcatccttgcactgctgctggggctggcagagcagttggctgacagcaacaaccgacatctgaacacctacatttcctttgcagacaaattgaagaactggtgggatttttttcaagaaaaaaaattatataataactataatcccttgctcacccctttcccccgccaaataagaaacgcaagccagaccacgatgattgtagaagtccctcccgccctggttctgcacgttacagttagcagacgagcaattccatttgttcttctccagcatctctaaggcccacttgaatgcaaaggaaaacacttgcacagcaaagcaagagaagtcacagcagcaagacacgcacagtcaaccattttccgagaaaaaaagaaaattccccacttggaaagaaagaggaggaacactggattcttactttctggatcttgacactgggctgcaaaacctaccttcctctctcccgcctcccctcaccctcaactctcaatgtcttgctgtcattttctgtctcggctccctcctcccccttcccccttcccccaccccacacccttcaccctctgtgtcctggtccttctgagggccactgcagatgactctcctttgaaatgagaaaaagaaaagaaagcaagaacagaaaacgaagccacaggaagggaagtagacattgtatgcttatggtttctcattatgaaggtgcagcttgtaggaggtttgtacggatgtgctttgaagttatgtatattacatataacaggaaaaaatattaaaataaacagtgctggtaagtatgaagctgacattctaaaattataattatctgactgtgattgatgtatcctgaggttcctagatctcactgaactggcccagctaaggagacctggactctgggtgtgggttggctcacagtaggggctgacgggttcagtgtagtaatactgtgtgtggtgtttgtaattggttgattggtggggaggggtggggggccctaatggagaggtgtgggtttggcaagaaagaagcaacacagatgtcgtccccaaaatgccagttcaagacaccttctccctgcccccctggtagtaacagtcagggcctggtctgtgctcaggtactgggtcccagtctgggactctgctgctgaagttgccacagtagaggtccctggcttagtccttatctccctacggggcttgccttggttttcagtcttctctctctttctctcttttttttttttttgccacattctgcccttccctgaccccattgtaataaccaactccatatccaaagggaggtggtgctctcagccattgtagaagatggtggctttaacctgactgtctaaaaattcccagctaagccttttcctctactctcttccttgttctgaatcatttcttcttctcaggccaaagtagccatggtaaggaggcttcatggggcagaccctgaaagatcaaaactgcatttgcaaagccctcccctgtcccaggacaaagctgagactgacgggtgatgttgctcataggctccagctctgcataagaccttggcttggagacctccctctcagtcaacagctgaactctgagcttgtgcccagaaattaccccaagaccacaggaacccttcaagaagctcccatcacaagcttggcattgctctctgccacacgtgggcttcctcaggcttgtctgccacaagctacttctctgagctcagaaagtgccccttgatgagggaaaatgtcccactgcactgcgaatttctcagttccattttacctcccagtcctccttctaaaccagttaataaattcattccacaagtatttactgattacctgcttgtgccagggactattctcaggctgaagaaggtgggaggggagggcggaacctgaggagccacctgagccagctttatatttcaaccatggctggcccatctgagagcatctccccactctcgccaacctatcggggcatagcccagggatgcccccaggcggcccaggttagatgcgtccctttggcttgtcagtgatgacatacaccttagctgcttagctggtgctggcctgaggcagggcaggaaatcagaatagcatttgcttctctgggcaaatgggaagttcagcggggcagcagaatcagtggcattccccctggtgcaggccggtgggtccactccaactccccctgagtgtagcagcacactttccatacaccaggttctttctacaatcctggtggaaaagccacagaaccttcttcctgcccttcttgagagttccccctctttctgggtcaagagctggagtggtggctccatcctctctgggccacttcggtctaggaactcatctttgcaggaaccaggagtcctgagcacactgaacacacctcagagggaggatccttgttgtggattttgcacctggctttggggcaggggtgaagtgaccaggcttagcttgtggagtttatgggccaccagggtttggggaaatcaccatcccgcggatgctgtgacctcccttctacggagatgcaggcagtgccacgagggaggaggggacctgcaaagctagaatctagggcactgtttcctccccatccttctctttgtagagaatagagacgtttgtcttgtctgtcttcaacctacttttccttttctcttttttgtttctcatcctctctgtgccacctctccacccaggaggccatgtagcatagtggaaaaagtccctgagggcggttaggagttctgggtgaccatcctggctcagctcctaactcaccatgtgacatcaggctatccccattccccctcttgggcctcagtttcccgacttgcaaaataagcagaaagaaccagatgctctccagggtctttttctactttgctatctcatgggtcttcattttctcttattttgttttctctggatcttttccatctgagggtacaggaagtaccaggacctgtttcagtttttgaatcctgcaagcacattccaagactggcctgaaactgcatgagcaacatcactcgaaataattttttttttcaaaagcaccttaacaaccaattgcgatgctgtcctgttcctttttactcacacccttctctcctttctcgtccccatgctcccccacctcagtgctccgtgctgtatgcgtgtgctctctgttcttgtatactcaatataagtgaaataaatgtgtttgatgctgaaccata

SEQ ID NO: 31516 - DNA, 1514 bp, Homo Sapiens
ttccggcaggcgctgcgctgctggggggcgcgggcgaggatggcggcggagaacgaggccagccaggagagcgccctgggcgcctactcgccagtggactacatgagcatcaccagcttcccgcggctgcccgaggacgagccggcgcccgcggccccgctgaggggccgcaaggacgaggacgcctttctgggagaccccgacaccgacccggactccttcctgaagtctgcacggctgcagcggctgccatcgtcgtcgtcggagatgggcagccaagacgggtcgccgctacgcgagacgcgcaaagacccgttctccgccgcagcggccgagtgctcctgccgccaggatgggctcacggtcatcgtcacggcctgtctcaccttcgctaccggtgtcaccgtggcgctggtcatgcagatctacttcggggacccccagatcttccagcagggtgccgtggtgaccgatgctgcccgctgcacttcactgggcatcgaggtgctcagtaaacagggatcttctgtggacgcagcggtggcagcagccttgtgtttgggtatcgtggctccacacagttctggcctgggcggtgggggcgtgatgctggtacatgacatccgacgaaatgagagccacctaattgatttccgggagtccgcaccaggggccctcagggaagagaccctgcaaagatcctgggagaccaaggtggggaccctggtgagaagagagagttcaggggagtctctcttcattgcccttctgctaacccaagcattaatttgctaagtatttaccaggggagtgggaaaaagagttgagcaggattctcttaggctatgagagagtcaggcagcccccaagataaaataatgaactagaaaatctggaaccttacttctctgggaatcttacctatctggcacgtgggaaggaagaaaaaaggctactgagtaccctgaaatgtcacgaagttgatgcaatgaaactcacacatctcactctgagccagttgactataactttcccagcccttgatatattggaagattagaggggaattgccagaagtaaaccaactgtctgctgaaagaaaaagaagatatcgaataacttggaaaaatgggtacttagtgcggtggcaaaagccaaacacacccctgagtcttcagagctcagagtaatggtggggtgaaactgaataggttaaatgaaggtcctttgtccaccgttttaaaaggtagggttgcctgggcacagtggctcacacctgtaatcccaacactctgggaagccaaggcaggaggattgcttgaggccaggagtttgagaccagcctgagtgacatagtgagactttgtctctacaaaaaatgctttgaaattagccaggcacagtagcatgcaccaaggatcgcttgacttgagcccaggagttggaggccacagtgagctatgactatgccactgtactccagcctgggtaacaggaaaaaaaaaaaaaaaaaa

SEQ ID NO: 31517 - DNA, 2772 bp, Homo Sapiens
ttccggcaggcgctgcgctgctggggggcgcgggcgaggatggcggcggagaacgaggccagccaggagagcgccctgggcgcctactcgccagtggactacatgagcatcaccagcttcccgcggctgcccgaggacgagccggcgcccgcggccccgctgaggggccgcaaggacgaggacgcctttctgggagaccccgacaccgacccggactccttcctgaagtctgcacggctgcagcggctgccatcgtcgtcgtcggagatgggcagccaagacgggtcgccgctacgcgagacgcgcaaagacccgttctccgccgcagcggccgagtgctcctgccgccaggatgggctcacggtcatcgtcacggcctgtctcaccttcgctaccggtgtcaccgtggcgctggtcatgcagatctacttcggggacccccagatcttccagcagggtgccgtggtgaccgatgctgcccgctgcacttcactgggcatcgaggtgctcagtaaacagggatcttctgtggacgcagcggtggcagcagccttgtgtttgggtatcgtggctccacacagttctggcctgggcggtgggggcgtgatgctggtacatgacatccgacgaaatgagagccacctaattgatttccgggagtccgcaccaggggccctcagggaagagaccctgcaaagatcctgggagaccaagcctgggctcttggtgggggttcccggaatggtgaaggggctacatgaagctcaccagctctatggcaggctgccatggtcccaagtcctggcctttgcagcagctgtggcccaagatggcttcaacgtgactcatgatctagcccgtgccctggctgaacagctgccacccaacatgtccgagcgcttccgggagacgttcctgccatcgggccgcccgccactacctggctcgttgctgcatcggcccgacctggctgaggtgctggatgtacttggcacctccggcccggctgccttctacgcaggtggcaacctcacactggagatggtggccgaggctcagcacgcagggggtgtcataaccgaagaggacttcagcaattacagcgcccttgtggagaagcctgtgtgtggcgtgtacagaggccacctggttcttagtcccccacctccgcacacgggccctgccctcatcagtgctctcaacatcctggagggcttcaatctcaccagcctggtatcccgagaacaggctcttcactgggtggcagagaccctgaagattgcattagccctggccagcagactgggagatcccgtctatgattctaccatcactgagagcatggatgacatgctcagcaaggtggaggccgcctacctccggggccatatcaatgactcccaggcagcccctgccccactcctgcctgtctatgaactagacggagctcccacggctgcccaggtgctgatcatgggacctgatgacttcattgtggccatggttagctccctgaaccagccctttggcagcggccttatcaccccctcggggatcctgctcaacagccagatgctggacttctcctggcccaaccggacagctaaccactctgcacccagcctggagaattcagtgcagccagggaagcggccactctctttcctgctgcccacagtggtccgacccgcggaggggctctgtggaacctacctcgctctgggggccaatggagctgcgcggggcctcagcggcctgacacagcatctgaatagacaaccagccctctttagggtgggatttgaaaggaagggcctgcttttctccagaacacctcagaatggctccatgaatgtcttgagaacctgatatatatgccaggcacctattttggcaggtggttctgctgaatgtcctgaccttgaaccggaacctgagtgacagcctggcccgcggccgcctacacccggacctgcagtccaacctcctgcaggtggacagtgagttcacagaggaagagattgagttcctggaagccaggggtcaccacgtggagaaagtagatgtcttatcctgggtccatggcagccgaaggaccaacaacttcatcatcgctgttaaggaccctcggagcccagatgcagctggagccaccatcctgtagagcagcggggtggggcggggtctctgctcccccactttgcatgttcccagagtccctccttctcccaggtttggtctcagggggaccccagggatgccccagatcaggggccagaggggatgcttagcaaacccaatcccagagtaactggaaaattctccatcaggaggcctgtggtggtggtggtggtggtggtggtggtggtggtggtggtgagtgtcagcatctacagtacagccaggcaggcaggaccttgaggaatcagactatctgtctgtgtgtcacctctcctccttcagccatgctggccccgagcttagggatgtgcttgcaaacccttctcaagggtctcacaaccccaacatcttcagactggcctgacctgggccttgtcttccagttcctttctcccattcccagcctcatttcttaaatgactaggaattttttaatggaccatcatagggagggggtgctcctcttttcccaccaggttgaggtgggggccttgcatcgggggtccccagggtatggggtaggggtgggggtgggcaccagctcaggggcttccatttgcaaagggaaattaaagaaagaatgttgcttaa

SEQ ID NO: 31518 - DNA, 3483 bp, Homo Sapiens
attgtctgggaattgcagccgcggggcgggcggcggcggcggcggcggcggccgggacccagcgggccaggtggggacggcgcggagcgggtgcgggagatgccgtgcgggactggggccacctgagccgcccgcctcgtccccgccttctgtgggaaggatgtgcgcgcggatggccggtcgcacaacagcggcccctcgggggccctacggcccctggctctgcctcctggtggccctcgccctggacgtcgtgagagtggactgtggccaggctcccctggaccctgtctacctgccggcagccctggagctcctagacgcccctgaacacttccgtgtgcagcaggtgggccactacccacctgccaactcctctctgagctcccgatctgagacctttctgctcctacagccctggcccagggcccagccacttctccgggcctcctacccaccttttgccactcagcaggtggtcccccctcgagtcactgagccccaccaacggccagtcccatgggacgtgcgggccgtttcagtggaagcggctgtgactccagcagagccctacgcccgggttctcttccacctcaaagggcaggattggccaccagggtctggcagcctgccctgtgcccggctccatgccacacaccctgcaggcactgctcaccaagcctgccgcttccagccatccctgggcgcctgcgtggtggagctggagcttccctcgcactggttctcacaggcctccaccacacgggccgagctggcctacacgcttgagcctgcagctgagggccctgggggctgtggctccggcgaggagaacgaccctggggagcaggccctcccagtggggggtgtggagctgcgcccagcagaccccccgcagtaccaggaggtacctctggacgaggctgtgactctgcgggtgcctgacatgccagtgcggcccggccagctctttagtgctaccctcctgcttcggcacaacttcacagccagcctcctgaccctgcggatcaaggtgaagaaggggctgcatgtgacagccgcccgcccagcccagcccacactctggactgccaagctagaccgcttcaagggctccaggcaccacaccaccctcatcacctgccaccgtgctgggctcacagagccagattccagtccccttgaactgtctgagttcctatgggtggactttgtggtggagaatagcactggtgggggcgtagcggtcactcgccccgtcacgtggcagctggagtacccaggccaggcccctgaagcagagaaggacaaaatggtgtgggaaatcctggtgtctgagcgggacatcagagcccttatcccactggccaaggctgaggagctggtgaatacagcaccactgactggagtgccccagcatgtccccgtgcgccttgtcactgtggacggcgggggggccttggtggaggtgacagagcatgtcggctgcgagtctgccaacacacaggtcctgcaggtgtctgaggcctgtgatgccgtgttcgtggctggcaaggagagccggggcgcccggggggtgcgagtggacttctggtggcgccggctccgcgcctcgctgcggctgaccgtgtgggcccccctgctaccgctgcgtatcgagctcaccgacaccaccctcgagcaggtccgcggctggagggtacctggccctgctgaagggcctgcggaacccgctgcagaggcgtcggatgaggccgagcggcgcgcccgtggctgccacctgcagtaccagcgggccggtgtgcgcttcctcgcccccttcgcggcccacccgctggacggcggccgccgcctcacgcacctgcttggccccgactggctgctagacgtgtcccacctcgtggcgccacacgcccgcgtgctggactcgcgtgtagcctctctggagggtggccgtgtcgtggtgggccgggagcccggtgtcacctccattgaggtgcgttccccactgtctgactccatcctgggggagcaggcgctggctgtgacggacgacaaggtctcagtgctggagctgagggtgcagccagtgatgggcatctcgctgaccttgagccggggcactgcccaccccggggaggtcacagctacgtgctgggcacagtcagcccttcccgccccaaagcaggaggtggccctctccctatggctgtccttctctgatcacactgtggccccagctgagctctacgaccgccgtgacctgggactgtccgtctcagccgaggagcctggtgccatcctgccagctgaggagcagggtgcccagctcggggtggtggtgagtggggcaggcgccgaggggctgccgctgcatgtggctctgcacccgcccgagccctgccgccggggccgccaccgtgtgcctctggcctctggcaccgcctggctggggctgccccctgcctccactccagcccctgctctcccatccagccctgcttggagcccaccagccacagaagccaccatgggtggtaaacggcaggtggcaggcagtgtcgggggcaacacaggtgtgaggggcaagtttgagcgggcagaggaggaggccaggaaggaggagaccgaagccagggaggaggaggaggaagaggaggaggagatggtccctgcccctcagcatgtcactgagctagagctgggcatgtacgccctgctgggagtcttctgcgtggccatcttcatcttcttggtcaatggtgtggtcttcgtcctgcgctatcagcgcaaagaacctcccgacagtgccactgaccccacctccccccagccccacaactgggtctggctgggcactgaccaggaggaactgagccgccagctggaccggcagtcccctggcccgcccaagggggaggggagctgcccctgtgagagtgggggaggaggggaggcccctaccctggcccctggccctcctgggggcaccaccagctcctcaagcaccctggcccgaaaggaggctggggggcggcggaagcgagtagagtttgtgacatttgcgccagcccctccagcccagtcacctgaggagcctgtaggggcccctgctgtgcagtccatccttgtggcaggcgaggaggacatccgctgggtgtgtgaggacatggggctgaaggaccctgaggagcttcgcaactacatggagaggatccggggcagctcctgaccctccacagccacctggtcagccaccagctggggcaacgagggtggaggtcccactgagcctctcgcctgcccccgccactcgtctggtgcttgttgatccaagtcccctgcctggtcccccacaaggactcccatccaggccccctctgccctgccccttgtcatggaccatggtcgtgaggaagggctcatgccccttatttatgggaaccatttcattctaacagaataaaccgagaaggaaaccag

SEQ ID NO: 31519 - DNA, 812 bp, Homo Sapiens
gaggagacaaaaccacgatgacccctagctttgtggcctgaactgtgggtggctgaggggatcgttaattgaatggggcagactgaggcttgtgaggaagatcagagtctggttcttgacatgagatgcccttcagacatctcttcactcaggtccaactagggatacagaaacactgaatatttcaacagcagaaattgaatggggggattgatagcgctggcgagggaagcagctggaaagagacagatggcaccctgagacagcccagaggtgaataggacccccaggctgcagggataaagctcagtggtggtgttacctcaccggggaccagggtcacacagcaaagctggaacaacagaggcgtgttgtgggggagcctcagaggggacaaaacctctgcctgagatcccaccccaggtgggcatgggggccactgaggttggggatgaaaatgccggtaccgtcagtgcacagccctgttccagacagtgctgcctggaagatttctgggctctcctgaggcgccaccccgcacctgagccacctccttggactcctgtcctctaccccttgaggacctccctcccttctaccctagctgtcttcttgaacttgggactctcctttcccaagacttccatcactagctcctggagggactggactttgcatcttcccttcgcgtggagcctcagtgtgagaggccctagccaatgcgtgcatgtcagaggtggtggggaccacatcagaagaagaggggggtgatgaaattaacaaataaaaagtatggggaaaaccaaaaaaaa

SEQ ID NO: 31520 - DNA, 3001 bp, Homo Sapiens
cgcgtggacgcggctcgggccgcgggtgccgagaggtcgccgggccacccgcacccccgctccccgcctgacgcacggaggggccgggacgcgatttgccgcgagtgactggagccgcagccgtcgccgctgccgccgccgccgcccgggcccgctccgcccccagcccgccttcctcccgccgcgccctccgcctccgcccgcacctcgctagcgttcccctgtcttccccaacgccccggagccgccggccgctagcgtcagcgccagccagaattaaggaagttcactggagtaaaatggaggcctcagtaatattacccattctgaagaaaaaactagccttcctttcaggaggaaaggacagacggagtggcctcattttgacaattccattatgcctcgaacagacaaatatggatgagctgagtgtcaccttagacttcctactcagcattccaagtgagaagtgtaaggctagaggatttaccgtgattgtggatggcagaaaatcacagtggaatgtggtgaaaacagtagtcgtaatgctacagaatgttgttccagctgaggtgtcccttgtttgtgtggtaaagccagatgaattctgggataagaaagtaacgcatttttgtttttggaaggagaaggatagacttggctttgaggttattttagtgtccgccaacaaattgactcgttatatagaaccatgccaattaacagaagattttggtgggagtctcacctatgatcacatggactggttaaataagaggctggtttttgagaagtttacaaaggaatctacatcattattagatgaacttgctttgattaacaatggaagtgataaaggaaatcagcaagagaaagaaaggtctgtggatttaaactttcttccatcggttgatcctgaaacagttcttcagacagggcatgaattgttgtccgaattacagcagcgtcgatttaatggctcagacggaggggtttcatggtctcctatggatgatgaacttcttgcacagccacaggttatgaaattattagattcactccgagagcaatatacccgctaccaggaagtttgtaggcaacgtagcaagcgcacacagttagaagagattcaacagaaggtaatgcaggtggtgaactggctagaagggcctggatcagaacaactaagagcccagtggggcattggagactccattagggcctcccaggccctacagcagaaacacgaagagattgagagccagcacagtgaatggtttgcagtgtatgtggaacttaatcagcaaattgcagcactcttgaatgctggcgatgaggaagatcttgtggaactaaagtcactgcagcaacaacttagtgatgtttgttatcgacaggccagtcagctggaatttaggcaaaatctcttacaagcagctcttgaatttcatggtgttgcccaagatttgtctcagcagttggatggcttattagggatgttgtgcgtagatgtagcaccagctgatggagcatcgattcagcaaactttaaaactgcttgaagagaagctgaaaagtgttgatgtgggattgcaaggtttgcgtgaaaaaggtcaaggtctcctggatcagatctccaatcaggcatcctgggcctatggaaaggatgtaaccattgaaaataaagaaaatgtggaccacatacaaggagtgatggaagatatgcagcttagaaaacaaagatgtgaagacatggtagatgtgcgaaggttaaagatgcttcagatggtgcagttgtttaaatgtgaagaagatgctgcccaggcagtagaatggctaagtgaacttctggatgctctgcttaagactcacatcagattgggcgatgatgctcaagaaacgaaagttttgctggaaaagcatagaaaatttgttgatgttgcacagagcacttatgactatggcaggcagttgctacaggccacagttgtgttatgccaatctttgcgctgcacttctcggtcatctggggatacacttcctcgactgaacagagtatggaaacaatttacaatagcatctgaagagagagtacatagattggaaatggctattgcatttcactcaaatgctgaaaagattttgcaggactgtccagaagagcctgaagctattaatgatgaggagcaatttgatgaaattgaagcagttgggaaatcacttttggatagattaactgttccagtagtttatcctgatggaaccgaacaatattttgggagtccaagtgacatggcttctactgcagaaaacatcagagacaggatgaaactagttaatctcaaaaggcagcagctgagacatcctgaaatggtgaccacagagagctaatagctaccagctacctacagatttgcagttcataatcccgcatgttgtcaacatactacagcattagccaccacaccttaagatgcatttcacagccaaaataagtctcatttcttttcatgacacatttctctttacatgttaacaccttgctactaccaaggcataattacttaacatgcttcgaggctgtagattccaagtatcttaaaagaaggaactataaacattgcactgaaaacttgctttaaagctttacctgacctgtcagtttgtagacaaacaactgataataagctttgaatggtgctaataagagtaggaattctctctattaaaaagaaaaaaaaaagttgccattcctccacaggtgatttagtaaatttagacagtagttaaactcttgttagtagacagtggtgtcctcaaaattttactttgtaattcttcagaattgattatttttattgtgtcaatacagagaaagcctttcagatctttgatatatcatagtcattaaaagaccttttcctatttgtattgataatgtattaaaagttgtttgtgcttaataaaagacttctttaaacatctcaaaaaaaaaaaaaaaa

SEQ ID NO: 31521 - DNA, 3779 bp, Homo Sapiens; identical to SEQ ID NO: 27679

SEQ ID NO: 31522 - DNA, 1420 bp, Homo Sapiens
cactcacacacctacggacacacgctactctgggaggtgatttgcgacttagccaggcccccaaagctgggctcctgtagggagaaagtctgcccaggtccacatccaagccttcatcgtttgtcctccgggttctgggatcctgctggaagaggggagcttctgcaatgggagttgccacaaccctgcagcccccaaccacttccaaaaccttgcagaagcagcatctagaagcagtgggcgcctaccaatatgtgctcactttcctcttcatgggccctttcttctcccttcttgtctttgtcctcctcttcacgtcactctggcccttctctgttttttacttggtgtggctctatgtggactgggacacacccaaccaaggtggaaggcgttcggagtggataaggaaccgggcaatttggagacaactaagggattattatcctgtcaagctggtgaaaacagcagagctgcccccggatcggaactacgtgctgggcgcccaccctcatgggatcatgtgtacaggcttcctctgtaatttctccaccgagagcaatggcttctcccagctcttcccggggctccggccctggttagccgtgctggctggcctcttctacctcccggtctatcgcgactacatcatgtcctttggactctgtccggtgagccgccagagcctggacttcatcctgtcccagccccagctcgggcaggccgtggtcatcatggtggggggtgcgcacgaggccctgtattcagtccccggggagcactgccttacgctccagaagcgcaaaggcttcgtgcgcctggcgctgaggcacggggcgtccctggtgcccgtgtactcctttggggagaatgacatctttagacttaaggcttttgccacaggctcctggcagcattggtgccagctcaccttcaagaagctcatgggcttctctccttgcatcttctggggtcgcggtctcttctcagccacctcctggggcctgctgccctttgctgtgcccatcaccactgtggtgggccgccccatccccgtcccccagcgcctccaccccaccgaggaggaagtcaatcactatcacgccctctacatgacggccctggagcagctcttcgaggagcacaaggaaagctgtggggtccccgcttccacctgcctcaccttcatctaggcctggccgcggcctttcgctgagcccctgagcccaaggcactgagacctccacccactgtggactccatgcctccaataaaaggtagttctgggcccagcgcagtgcctcgtgcctgtgatcccagcactttgggaggccagggtgggaggatcgtttgagcccaggagttgaagaccagcctgggcaacacagtgagacttcatttctacaaaaaaaaaaaaaaa

SEQ ID NO: 31523 - DNA, 6069 bp, Homo Sapiens
gtcctgtctggcggtgccgacggtgaggggcggtggcccaacggcgggagattcaaacctggaagaaggaggaacatggagaggagagcagcgggcccaggctgggcagcctatgaacgcctcacagctgaggagatggatgagcagaggcggcagaatgttgcctatcagtacctgtgccggctggaggaggccaagcgctggatggaggcctgcctgaaggaggagcttccttccccggtggagctggaggagagccttcggaatggagtgctgctggccaagctgggccactgttttgcaccctccgtggttccgttgaagaagatctacgatgtggagcagctgcggtaccaggcaactggcttacatttccgtcacacagacaacatcaacttttggctatctgcaatagcccacatcggtctgccttcgaccttcttcccagagaccacggacatctatgacaaaaagaacatgccccgggtagtctactgcatccatgctctcagtctcttcctcttccggctgggattggcccctcagatacatgatctatacgggaaagtgaaattcacagctgaggaactcagcaacatggcgtccgaactggccaaatatggcctccagctgcctgccttcagcaagatcgggggcatcttggccaatgagctctcggtggatgaggctgcagtccatgcagctgttcttgccatcaatgaagcagtggagcgaggggtggtggaggacaccctggctgccttgcagaatcccagtgctcttctggagaatctccgagagcctctggcagccgtctaccaggagatgctggcccaggccaagatggagaaggcagccaatgccaggaaccatgatgacagagaaagccaggacatctatgaccactacctaactcaggctgaaatccagggcaatatcaaccatgtcaacgtccatggggctctagaagttgttgatgatgccctggaaagacagagccctgaagccttgctcaaggcccttcaagaccctgccctggccctgcgaggggtgaggagagactttgctgactggtacctggagcagctgaactcagacagagagcagaaggcacaggagctgggcctggtggagcttctggaaaaggaggaagtccaggctggtgtggctgcagccaacacaaagggtgatcaggaacaagccatgctccacgctgtgcagcggatcaacaaagccatccggaggggagtggcggctgacactgtgaaggagctgatgtgccctgaggcccagctgcctccagtgtaccctgttgcatcgtctatgtaccagctggagctggcagtgctccagcagcagcagggggagcttggccaggaggagctcttcgtggctgtggagatgctctcagctgtggtcctgattaaccgggccctggaggcccgggatgccagtggcttctggagcagcctggtgaaccctgccacaggcctggctgaggtggaaggagaaaatgcccagcgttacttcgatgccctgctgaaattgcgacaggagcgtgggatgggtgaggacttcctgagctggaatgacctgcaggccaccgtgagccaggtcaatgcacagacccaggaagagactgaccgggtccttgcagtcagcctcatcaatgaggctctggacaaaggcagccctgagaagactctgtctgccctactgcttcctgcagctggcctagatgatgtcagcctccctgtcgcccctcggtaccatctcctccttgtggcagccaaaaggcagaaggcccaggtgacaggggatcctggagctgtgctgtggcttgaggagatccgccagggagtggtcagagccaaccaggacactaatacagctcagagaatggctcttggtgtggctgccatcaatcaagccatcaaggagggcaaggcagcccagactgagcgggtgttgaggaaccccgcagtggcccttcgaggggtagttcccgactgtgccaacggctaccagcgagccctggaaagtgccatggcaaagaaacagcgtccagcagacacagctttctgggttcaacatgacatgaaggatggcactgcctactacttccatctgcagaccttccaggggatctgggagcaacctcctggctgccccctcaacacctctcacctgacccgggaggagatccagtcagctgtcaccaaggtcactgctgcctatgaccgccaacagctctggaaagccaacgtcggctttgttatccagctccaggcccgcctccgtggcttcctagttcggcagaagtttgctgagcattcccactttctgaggacctggctcccagcagtcatcaagatccaggctcattggcggggttataggcagcggaagatttacctggagtggttgcagtattttaaagcaaacctggatgccataatcaagatccaggcctgggcccggatgtgggcagctcggaggcaatacctgaggcgtctgcactacttccagaagaatgttaactccattgtgaagatccaggcatttttccgagccaggaaagcccaagatgactacaggatattagtgcatgcaccccaccctcctctcagtgtggtacgcagatttgcccatctcttgaatcaaagccagcaagacttcttggctgaggcagagctgctgaagctccaggaagaggtagttaggaagatccgatccaatcagcagctggagcaggacctcaacatcatggacatcaagattggcctgctggtgaagaaccggatcactctgcaggaagtggtctcccactgcaagaagctgaccaagaggaataaggaacagctgtcagatatgatggttctggacaagcagaagggtttaaagtcgctgagcaaagagaaacggcagaaactagaagcataccaacacctcttctacctgctccagactcagcccatctacctggccaagctgatctttcagatgccacagaacaaaaccaccaagttcatggaggcagtgattttcagcctgtacaactatgcctccagccgccgagaggcctatctcctgctccagctgttcaagacagcactccaggaggaaatcaagtcaaaggtggagcagccccaggacgtggtgacaggcaacccaacagtggtgaggctggtggtgagattctaccgtaatgggcggggacagagtgccctgcaggagattctgggcaaggttatccaggatgtgctagaagacaaagtgctcagcgtccacacagaccctgtccacctctataagaactggatcaaccagactgaggcccagacagggcagcgcagccatctcccatatgatgtcaccccggagcaggccttgagccaccccgaggtccagagacgactggacatcgccctacgcaacctcctcgccatgactgataagttccttttagccatcacctcatctgtggaccaaattccgtatgggatgcgatatgtggccaaagtcctgaaggcaactctggcagagaaattccctgacgccacagacagcgaggtctataaggtggtcgggaacctcctgtactaccgcttcctgaacccagctgtggtggctcctgacgccttcgacattgtggccatggcagctggtggagccctggctgccccccagcgccatgccctgggggctgtggctcagctcctacagcacgctgcggctggcaaggccttctctgggcagagccagcacctacgggtcctgaatgactatctggaggaaacacacctcaagttcaggaagttcatccatagagcctgccaggtgccagagccagaggagcgttttgcagtggacgagtactcagacatggtggctgtggccaaacccatggtgtacatcaccgtgggggagctggtcaacacgcacaggctgttgctggagcaccaggactgcattgcccctgatcaccaagaccccctgcatgagctcctggaggatcttggggagctgcccaccatccctgaccttattggtgagagcatcgctgcagatgggcacacggacctgagcaagctagaagtgtccctgacgctgaccaacaagtttgaaggactagaggcagatgctgatgactccaacacccgtagcctgcttctgagcaccaagcagctgttggccgatatcatacagttccatcctggggacaccctcaaggagatcctgtccctctcggcttccagagagcaagaagcagcccacaagcagctgatgagccgacgccaggcctgtacagcccagacaccggagccactgcgacgacaccgctcactgacagctcactccctcctgccactggcagagaagcagcggcgcgtcctgcggaacctacgccgacttgaagccctggggttggtcagcgccagaaatggctaccaggggctagtggacgagctggccaaggacatccgcaaccagcacagacacaggcacaggcggaaggcagagctggtgaagctgcaggccacattacagggcctgagcactaagaccaccttctatgaggagcagggtgactactacagccagtacatccgggcctgcctggaccacctggcccccgactccaagagttctgggaaggggaagaagcagccttctcttcattacactgctgctcagctcctggaaaagggtgtcttggtggaaattgaagatcttcccgcctctcacttcagaaacgtcatctttgacatcacgccgggagatgaggcaggaaagtttgaagtaaatgccaagttcctgggtgtggacatggagcgatttcagcttcactatcaggatctcctgcagctccagtatgagggtgtggctgtcatgaaactcttcaacaaggccaaagtcaatgtcaaccttctcatcttcctcctcaacaagaagtttttgcggaagtgacagaggcaaagggtgctacccaagcccctcttacctctctggatgctttctttaacactaactcaccactgtgcttccctgcagacacccagagctcaggactgggcaaggcccagggattctcaccccttccccagctgggaggagcttgcctgcctggccacagacagtgtatcttctaattggctaaagtgggccttgcccagagtccagctgtgtggcttttatcatgcatgacaaacccctggctttcctgccagatggtaggacatggaccttgacctgggaaagccattactcttgtgtctgctactgccctcccacagtcaccccaatattacaagcactgccccagcggcttgatttcccctctgccttccttctctctgcactcccacaaagccagggccaggctccccatccctacctcccactgcatcagcagtgggtgttcctgcccttcctgagtctaggcagctctgctgctgtgatctgcacaccctccaacctgggcagggactggggggatgcagtgtgtgttagtgcccatgtggcattgtggcactgttgccccccatggcggcatgggcaagatgaccttccattagcttcaagtcttgttctcttgtctgtggtctgtttaatatgtgggtcactagggtatttattctttctcccatccttacactctggatcattgtgcagacttaatcagggttttaacgctttcatttttttttttttttttttttttttgagctcaaagagagttctcattttccctattcaaactaatacccatgccgtgttttttaccttggatttaaagtcaccttaggttggggcaacagattctcactcatgtttaagatcttgttatttcagcttcataagatcaaagaggagtctttcccttttctcttttaccctcaggattctcatcccttacagctgactcttccaggcaatttccatagatctgcagtcctgcctctgccacagtctctctgttgtccccacatctacccaacttcctgtactgttgcccttctgatgttaataaaagcagctgttactcccaaaaaaaaaaaaaaaaaa

SEQ ID NO: 31524 - DNA, 1893 bp, Homo Sapiens
cccgaaatcagactgctgccttggaccgggacagctcgcggcccccgagagctctagccgtcgaggagctgcctggggacgtttgccctggggccccagcctggcccgggtcaccctggcatgaggagatgggcctgttgctcctggtcccgttgctcctgctgcccggctcctacggactgcccttctacaacggcttctactactccaacagcgccaacgaccagaacctaggcaacggtcatggcaaagacctccttaatggagtgaagctggtggtggagacacccgaggagaccctgttcacctaccaaggggccagtgtgatcctgccctgccgctaccgctacgagccggccctggtctccccgcggcgtgtgcgtgtcaaatggtggaagctgtcggagaacggggccccagagaaggacgtgctggtggccatcgggctgaggcaccgctcctttggggactaccaaggccgcgtgcacctgcggcaggacaaagagcatgacgtctcgctggagatccaggatctgcggctggaggactatgggcgttaccgctgtgaggtcattgacgggctggaggatgaaagcggtctggtggagctggagctgcggggtgtggtctttccttaccagtcccccaacgggcgctaccagttcaacttccacgagggccagcaggtctgtgcagagcaggctgcggtggtggcctcctttgagcagctcttccgggcctgggaggagggcctggactggtgcaacgcgggctggctgcaggatgccacggtgcagtaccccatcatgttgccccggcagccctgcggtggcccgggcctggcacctggcgtgcgaagctacggcccccgccaccgccgcctgcaccgctatgatgtattctgcttcgctactgccctcaaggggcgggtgtactacctggagcaccctgagaagctgacgctgacagaggcaagggaggcctgccaggaagatgatgccacgatcgccaaggtgggacagctctttgccgcctggaagttccatggcctggaccgctgcgacgctggctggctggcagatggtagcgtccgctaccctgtggttcacccgcatcctaactgtgggcccccagagcctggggtccgaagctttggcttccccgacccgcagagccgcttgtacggtgtttactgctaccgccagcactaggacctggggccctcccctgccgcattccctcactggctgtgtatttattgagtggttcgttttcccttgtgggttggagccattttaactgtttttatacttctcaatttaaattttctttaaacatttttttactattttttgtaaagcaaacagaacccaatgcctccctttgctcctggatgccccactccaggaatcatgcttgctcccctgggccatttgcggttttgtgggcttctggagggttccccgccatccaggctggtctccctcccttaaggaggttggtgcccagagtgggcggtggcctgtctagaatgccgccgggagtccgggcatggtgggcacagttctccctgcccctcagcctgggggaagaagagggcctcgggggcctccggagctgggctttgggcctctcctgcccacctctacttctctgtgaagccgctgaccccagtctgcccactgaggggctagggctggaagccagttctaggcttccaggcgaaagctgagggaaggaagaaactcccctccccgttccccttcccctctcggttccaaagaatctgttttgttgtcatttgtttctcctgtttccctgtgtggggaggggccctcaggtgtgtgtactttggacaataaatggtgctatgactgccttccgccatcccca

SEQ ID NO: 31525 - DNA, 2100 bp, Homo Sapiens
ggggaagcgatcacccggcctcgcagccgccgccgccaaagtttcccggaggagccgcgggccgcccttcctctccggccccgcgctctgccgcccctcaggcccgcaccgccccgaggcgcccggcccggctccattgagctgaccgtcatggacgtgtacgacatcgcgtcgcttgtgggccacgagttcgagcgggtcattgaccagcacggctgcgaggccatcgcgcgcctcatgcccaaggtcgtgcgcgtcctggagatcctggaggtgctggtcagccgccaccacgtcgcgcccgagctggacgagctgcgcctggagctggaccgcctgcgcctggagaggatggaccgcatcgagaaggagcgcaagcaccagaaggagctggagctggtggaggatgtgtggcgaggggaggcgcaggacctcctctcccagatcgcccagctgcaggaggagaacaagcagctcatgaccaacctctcccacaaggatgtcaacttctcagaggaggagttccagaagcatgaaggcatgtcagagcgggagcgacaggtgatgaagaagctgaaggaggtggtggacaaacaacgcgacgagatccgcgccaaggacagggagctgggcctgaaaaatgaggacgttgaggctttacagcagcagcagacacggctgatgaagatcaaccatgaccttcggcaccgggtcacggtggtggaggcccaggggaaagccctgatcgaacagaaggtggagctggaggcagacctgcagaccaaggagcaggagatgggcagcctgcgagcagagctggggaagttgcgagagaggctgcagggggagcacagccagaatggggaggaggagcctgagacggagccggtgggagaggagagcatctccgacgcagagaaggtggccatggatctcaaggaccccaaccgcccccggttcaccctgcaggagctgcgggacgtgctgcacgagaggaacgagctcaagtccaaggtgttcttgctgcaggaggagctggcttactataagagtgaagaaatggaagaggaaaaccgaataccccaacccccacccatcgcccacccgaggacgtccccccagccggagtcgggcatcaagcgactgatctttacagccataatgcctatggtagcagcgggactgataatagatgaccccacactgcagcctgtccgacgacttgtttcccttgtttagcttcttctcccgagataagaagcgcctggccaacacacagagaaacgtgcacatccaggagtcctttggacagtgggcaaacacccaccgcgatgacggttacacagagcaaggacaggaagccctgcagcatctgtgaccttggcccatctccaccctccaacctggactgcccgccaccagcgcctgcaaccgaactgcagcccaggggtcattgctgcctcaagcctctcggtgcagatgcaccctgaaaactgacccctcaaacagactgtctgatttgaggatggacattgaaaaactgacgccaaactctaaagaaatgtttatttatacccagggctatcactgtttctaatagatgactctgatcccgtaggatatatatttaataatcccacaaacggaggccagacttctgcgttaacttcagtaacacaagcttctttaagccaaatacatcacttgccactaccattgctgtttgacttgctttgtataaaatgctatgtgtagaggttttattatcacaggtgacatagttcagcaggaggcatggaagggctagatcttcattagttacattcatgaaattgtgatggtaacgtattatacagaatgtatccatcaggcagacaaggggtctgaagtcacaggctcagtagcccaactcagacacaaagccacagacaatatggatgatggtcctcttacccagaaactggagacaactttgcaggcaccctggctgcgttcctgataatgcctagagcatgtagcaatgttcaaggcaggtgccttggaatctgctgtgagttatgcagtactaaccaaacaaagttgctaaggatgagatgttgc

SEQ ID NO: 31526 - DNA, 1210 bp, Homo Sapiens
gccgaaggaccctgtgctgcctgtgactttgctcctaagtacctactgccgagatgtcctgccagcagagccagcagcagtgccagccccctcccaagtgcactcccaagtgccctcccaagtgtcccacccccaaatgccctccaaagtgtccccctaagtgccctccagtctcttcctgctgcagtgtcagctccggaggctgctgtggctccagctctgggggcagctgtggctccagctctgggggctgctgcagctctgggggaggtggctgctgcctgagccaccacaggcaccacaggtcccaccgtcacagaccccagagctctgactgctgcagccagccctcagggggctccagctgctgtggagggggcagcggccagcactctggaggctgctgctgaagtggaccttgacttcctcttccttctgattctgcctgaatagctgagaggttccagcaaaagcttgaagtcttgcctggagaatccctctgctctggtgtcaggaaacccaaaatctttctccttaatggcatttagagactttcttctgcagatccatggctgccctgggaactccaaagcacacacctacttcctccccagctcacgctgctgtattctgtgctgcctgaactgaagaaataaaatccagaatctgccccccaacttgctaccagcctgcttgattttcctgtttgtgtcatccttgttctgctcccctgtgtctgctggtggctgctgaggccttggtggacagaggatggggaaaggggtcaggaggaaaaagcttgcatttctgtgtgttttgtgttttttcttctttcggtgttttccttttaaaccaagggactgaaatagcattgagaaatatttttctttcaaattctggttcctttcacctatgtaaccgcatccctcaggcatggccaggaggccgacttcatcctccttcccactatcacctcttcattcttgtgttcctcgttccccactccttccactaacaatctccctggactcctcctccatactgtatgtgcatgcattcacacacacatatgtacatgcacatagatgagatgaatctgcattgtaaaaaaattaaatcacatttagtgctgtataatttgcatgcaataaaattcaataaaattaaatgtaaaattaaaaaaaaaaaaaaaaaaaaaaaaaaaaaaaaa

SEQ ID NO: 31527 - DNA, 4801 bp, Homo Sapiens
atcttggattccgcggtagcggaggcggcggtcaggcgccgcttctggggagtggcctttcttttcccctccctcccggttcggtggcggcggctcctcccactgggggggggggtggcgcggcggcggtggcatctgcggccatggcggcgactactgccaaccccgaaatgacatcagatgtaccatcactgggtccagccattgcctctggaaactctggacctggaattcaaggtggaggagccattgtccagagggctattaagcggcgaccagggctggattttgatgatgatggagaagggaacagtaaatttttgaggtgtgatgatgatcagatgtctaacgataaggagcggtttgccagggaaaatcacagtgaaattgaacggcggcgacggaacaagatgacagcctacatcacagaactgtcagatatggtacccacctgtagtgccctggctcgaaaaccagacaagctaaccatcttacgcatggcagtttctcacatgaagtccttgcggggaactggcaacacatccactgatggctcctataagccgtctttcctcactgatcaggaactgaaacatttgatcttggaggcagcagatggctttctgtttattgtctcatgtgagacaggcagggtggtgtatgtgtctgactccgtgactcctgttttgaaccagccacagtctgaatggtttggcagcacactctatgatcaggtgcacccagatgatgtggataaacttcgtgagcagctttccacttcagaaaatgccctgacagggcgtatcctggatctaaagactggaacagtgaaaaaggaaggtcagcagtcttccatgagaatgtgtatgggctcaaggagatcgtttatttgccgaatgaggtgtggcagtagctctgtggacccagtttctgtgaataggctgagctttgtgaggaacagatgcaggaatggacttggctctgtaaaggatggggaacctcacttcgtggtggtccactgcacaggctacatcaaggcctggcccccagcaggtgtttccctcccagatgatgacccagaggctggccagggaagcaagttttgcctagtggccattggcagattgcaggtaactagttctcccaactgtacagacatgagtaatgtttgtcaaccaacagagttcatctcccgacacaacattgagggtatcttcacttttgtggatcaccgctgtgtggctactgttggctaccagccacaggaactcttaggaaagaatattgtagaattctgtcatcctgaagaccagcagcttctaagagacagcttccaacaggtagtgaaattaaaaggccaagtgctgtctgtcatgttccggttccggtctaagaaccaagaatggctctggatgagaaccagctcctttactttccagaacccttactcagatgaaattgagtacatcatctgtaccaacaccaatgtgaagaactctagccaagaaccacggcctacactctccaacacaatccagaggccacaactaggtcccacagctaatttacccctggagatgggctcaggacagctggcacccaggcagcagcaacagcaaacagaattggacatggtaccaggaagagatggactggccagctacaatcattcccaggtggttcagcctgtgacaaccacaggaccagaacacagcaagccccttgagaagtcagatggtttatttgcccaggatagagatccaagattttcagaaatctatcacaacatcaatgcggatcagagtaaaggcatctcctccagcactgtccctgccacccaacagctattctcccagggcaacacattccctcctaccccccggccggcagagaatttcaggaatagtggcctagcccctcctgtaaccattgtccagccatcagcttctgcaggacagatgttggcccagatttcccgccactccaaccccacccaaggagcaaccccaacttggacccctactacccgctcaggcttttctgcccagcaggtggctacccaggctactgctaagactcgtacttcccagtttggtgtgggcagctttcagactccatcctccttcagctccatgtccctccctggtgccccaactgcatcgcctggtgctgctgcctaccctagtctcaccaatcgtggatctaactttgctcctgagactggacagactgcaggacaattccagacacggacagcagagggtgtgggtgtctggccacagtggcagggccagcagcctcatcatcgttcaagttctagtgagcaacatgttcaacaaccgccagcacagcaacctggccagcctgaggtcttccaggagatgctgtccatgctgggagatcagagcaacagctacaacaatgaagaattccctgatctaactatgtttccccccttttcagaatagaactattggggtgaggataaggggtgggggagaaaaaatcactgtttgtttttaaaaagcaaatctttctgtaaacagaataaaagttcctctcccttcccttccctcacccctgacatgtaccccctttcccttctggctgttcccctgctctgttgcctctctaaggtaacatttatagaagaaatggaatgaatctccaaggcttttaggactgtctgaaaatttgaggctgggtgaagttaaaacacctttccttatgtctcctgacctgaaattgtatagtgttgatttgtgctgagatcaagaggcaggttagaagaacctgacatccactgtttgccttggatagtatggcttgtttttggaaagaaattctgaagagagtggaggagaggagaaatgtcctcatatttgaggaccatgaaacattgtaggtatatatggggctttagcaagtttgagcataggctctttttgctgcctgtgagcagtccctctggaaagaaacatgtgagtaagtgagagagagtgtgtgtgtatgtgtgtgtgtgtgtgtgtgcgcacacatgcttctgtatttcactctttctccctattagggagttatgcaaaatttgtccccgattttacctttgtctttctgtgtacttttcaaagagtcctaaggagttaaatcttccaggtattttccacttagtattgcagccaaagaatatttaaataaacgtctttgctgcgcttgcatccatgcccagccaatatacaactgtaaagcaaatatagaaagtcggctgttgatacgattgtctgttatcgaacacattcagtgataaagctgggttactgctgcttttggtgctctcaccttatctggaagatctgcaaacattacctaaataggctggcaagataaacactttctggaacccgagacttggccataaagataatgctgcatttttctgtcagaatcacatatgatgtgtgttctgtagaggttatttctgcatggaaactcaacttcttggattagccgtcccagtgaaaatcctcattgttggagtgtaaaccaaatacgaagccctcttgcaaagtagcctctttcatcccatactcaaaatacccagtttagcaagcaactgagatttaagtctctctggccctaagaggtttttcctctttgctccctccaatcttgagattgggttttgctttagagtgcaagtatcataattccgtatgatagatggggcctggacacccatctcaacagggtcacttggtaattaacaatagccatataaatgcggatacaggttactaccctcaccctttaccttcctcaggtaacagtcgtagataccagcttttttttttttttttttaaattggctttggccagtagctaaagtgcaagactgaattaatgagaagatatattaaatgtagtcataggggactgaggagcaagggtggccttgaagaggccaaaggaatgtccatttgctgagtttcccttccttatgtctccagtctggtgccaggtagtggagtaaaaaaggagacagtttatttttttattctatgtgcacacttacagtatacatatatatttatatcacaatttacgaaaccaaaaagttgagtttccaatggaacccttgttttttaataatcgactttttaaatgtgatcaggactataatattgtacagttattatagggcttttggggaaggggaggatagcgagaagatgctctgggggttttgtttttgcttttccttcagggttttatttttgactgttttgttttcttgttggccatttctgtattgctggcatctgtgctaagctttacagtggcaaaaataatgacatgtagcaaagattttcaaacaaaatattttttccttttgtaaaatttcttgtgttgtgtgatcttgattgcggctttatcattcctttccagttcataaacaacaggcacccacaaccagaggaatctatagtttaagctccagacatacaaacataaggcacattgtgtctttaatttcaggaatcagaaatcatagggttctgatcacattgcacgcctcccccctcacttgtcctcctgatcctgacacattctgagtaacatcagcaggaatgctctgaccatgaggtgggggttttggggtgggcgttgcctgggttcttgggagagaggggaagagtcgggacttgaaaaccactagggcacatctggatgccttcccccagtatgtccttttctggattaaaatgagtgaaatttaaactgaaaaaaaaaaaaaaaaaaaaaa

SEQ ID NO: 31528 - DNA, 2402 bp, Homo Sapiens
ggtgctgcggtgctagagcgcggcgcgaccggacgctgcgggcggggaagaggatggagactgtggcgtccgctgcaacggttggggctgcgcgtgagaaggtggcggtgtaggcacctgcgctcggggaaggctggcggcggcggccgagccatggcgggagacccccttctctgggctccctgaagtctcggggagccgtgacccatgggatcgttgagcagccgggtgctgcgccagccaagaccagcccttgcccagcaggcgcagggtgccagggcggggggctcggcccggaggccggacactggagacgatgcggcgggccacggattctgttactgtgcgggcagccacaagcgcaagcggagcagcgggtccttctgctactgtcaccctgactcggagacggacgaggatgaggaggagggggacgagcagcagcggctcctcaacacccctcgaaggaaaaaattaaagagtacatctaaatatatttatcaaacattatttttgaatggtgaaaacagtgacattaagatttgtgctctaggagaagaatggagcttacacaaaatatatttatgtcaatctggctacttttctagtatgttcagtggttcttggaaagaatccagcatgaatattattgaactggagattcctgaccagaacattgatgtagaagcactgcaggttgcatttggttcactgtatcgagatgatgtcttgataaagcccagtcgagttgttgccattttggcagcagcttgtttgctgcagttggacggtttaatacagcagtgtggtgagacaatgaaggaaacagttaatgtgaaaactgtatgtggctattacacatcagcagggacctatggattagattctgtaaagaaaaagtgccttgaatggcttctaaacaatttgatgactcaccagaatgttgaactttttaaagaactcagtataaatgtcatgaaacagctcattggttcatctaacttatttgtgatgcaagtggagatggatatatacactgctctaaaaaagtggatgttccttcaacttgtgccttcttggaatggatctttaaaacagcttttgacagaaacagatgtctggttttctaaacagaggaaagattttgaaggtatggcctttcttgaaactgaacaaggaaaaccatttgtgtcagtattcagacatttaaggttacaatatattatcagtgatctggcttctgcaagaattattgaacaagatgctgtagtaccttcagaatggctctcttctgtgtataaacagcagtggtttgctatgctgcgggcagaacaggacagtgaggtggggcctcaagaaatcaataaagaagaactagagggaaacagcatgaggtgtggtagaaagcttgccaaagatggtgaatactgctggcgttggacaggttttaacttcggcttcgacctacttgtaacttacaccaatcgatacatcattttcaaacgcaatacactgaatcagccatgtagcggatctgtcagtttacagcctcgaaggagcatagcatttagattacgtttggcttcttttgatagtagtggaaaactaatatgtagtagaacaactggctatcaaatacttacacttgaaaaggatcaggaacaagtggtgatgaacttggacagcaggcttctgatcttccctttatatatctgctgtaacttcttgtatatatcaccagaaaaaaagaattgaaaataatcgtcacccagaaaatccagaaaactgaagatttcatcagttggaaacagtagcactttgaaaactttttaggccagctttaatttaatggccctactgatattcacatcgaaggtgactaacaatgacaaaggccttatgaactgtacagacaatacagaagattattcttatcctcattgcatttctatgcatatgcgtaagaacattttaaagccaagaaaatatctgtcaaaccatttctgttagaacgatgtcaattcatgcttttaatttagcatcaatagaaaattgctgtaggtaaatctcacatttatctgcaacaaaatatagatttaatttttagcttaaactttgtttctaccttatgttagtggacctcagttatccatctgtaaatttctttttatttggctaaaataatctaaaagaataatttggttggccaattagaaatgcctttttcagttggtgtattgaaagctttcctttaacattttcacctgctcattgtgattcctccttttagtctaatatctttccaggtcatacttgtttttaatcattaaatattttcttcctggtaaaaaaaaaaaaaaaaaaaaaaaaaaaaaaaaaaaaaaaaaaaaaaaaaaaaaaaa

SEQ ID NO: 31529 - DNA, 1816 bp, Homo Sapiens
agttgttgagcaggtccgtgaattgtcagcgcgctgtgggcgactgtgtggccgcggcggccgccaggcttgccgcactccccctgaggtgcccgccggaaccaatgtgccctggtccactgggccgtgagcagccaccgactgggggcaacttggcacttagaaccgcagcagggacgtcggtttgctatcgggactcggcgaggacgatggaaatcctgtatgaatgtggaagccattagcagagtaattgctgtctgttaccatgacaaccagccgctgcagtcacctgcccgaagtcctgccagactgcaccagctcagctgcacccgtggtgaagacggtggaggattgtggcagcctagtgaatgggcagccgcagtatgtcatgcaagtttcagccaaggacgggcagctgctgtcaacagtagtgcggactcttgccacccagagccccttcaatgaccggccgatgtgcaggatctgccacgagggcagcagccaagaggacttgctctctccatgtgaatgtacagggaccttggggacaattcatcggagctgcctggagcactggctgtcatcctcaaacaccagctactgtgaactctgccacttcaggtttgcagtcgagcgcaaacccaggccgttagtggagtggctgagaaaccctggcccccagcatgagaagcggactctgtttggcgacatggtgtgcttcttgtttataactcccctggccaccatctcgggctggctgtgcctgcggggcgccgtggaccacctgcactttagtagtcggctggaagccgtcggactgattgcactcactgtcgcactcttcactatttacctcttttggacactagtgtcatttaggtaccactgtcgattgtacaacgagtggcgtcggaccaatcagagggtgattctcctcattccaaagtctgtcaatgtaccttctaaccagccgtccttgctgggcctccattcggtcaagaggaactcaaaggagacagttgtttgatgtttgtatggttggttggttgtttgattcattgtttggggtttggaagtgtctgcactggggtcatgcactgagcgacccccaagcccttccttaagcctgtgggtctaagaacatccagagcatattagcacatcactccaagcaacaacctccgccagaagaaagcaaatgctgttttacttcaaatgatggatgctgcaatcatatgatatttgctaagctgccaaacatgtttatttagcagatactgtatggaattttctgaacacctctttaacgtatgaggaaggttgtcctgctacggatgcaattcaattcttcctttttttattactatttcaaacacacacacatatatatatatattaaacttagatgataatcaaaatcaaaaagtcaacgtaaaaactggtttcttggtttggttgggtcttatttgagttagtttgtttctcagtttctcgtatggattctttggggtactttggtagcctgagtggtctttttcatctctttcgcgtccattactcaaggagacagcataacagatgcagaacaagtcatatttgaagaatgttttgtactaaacttcatttaattattcagtttttaaagggaaaaagggcgtgagctcacacagtgagctgtttatttaaatatcattaaggagaaaaaaaaatatggtgagaagctcgctcctttcaacttgtttggtactgacagctgatagaagctattttctaataataaacatccagtgtgtgaaagacaaaaaaaaaaaaaaaa

SEQ ID NO: 31530 - DNA, 2070 bp, Homo Sapiens
gcggctccggctccggctccggctcccgggcatttaaaggggacgcggcggctgcccgggggggatgaggggcaagtggaggggacggctcagacgcacatcatcctcagtccctcgggactggagggactcgtgagccggagcccagaaatccgggggtggataagacaccgcgtcccctccaattcccgtaagcaccccttgctccatcctgcgccccaatacctcagctagcccccttccccacttcttacactccaaactcagccgggacagcaagtggaggggacggctcagacgacctctgctgccgccgcccccacgaacgtgtgacgacggctggaggccaacagagtccctacaggtggtgctcacggtaatgcaccgacaatgagtggctgttttccagtttctggcctccgctgcctatctagggacggcaggatggccgcgcagggcgcgccgcgcttcctcctgaccttcgacttcgacgagactatcgtggacgaaaacagcgacgattcgatcgtgcgcgccgcgccgggccagcggctcccggagagcctgcgagccacctaccgcgagggcttctacaacgagtacatgcagcgcgtcttcaagtacctgggcgagcagggcgtgcggccgcgggacctgagcgccatctacgaagccatccctttgtcgccaggcatgagcgacctgctgcagtttgtggcaaaacagggcgcctgcttcgaggtgattctcatctccgatgccaacacctttggcgtggagagctcgctgcgcgccgccggccaccacagcctgttccgccgcatcctcagcaacccgtcggggccggatgcgcggggactgctggctctgcggccgttccacacacacagctgcgcgcgctgccccgccaacatgtgcaagcacaaggtgctcagcgactacctgcgcgagcgggcccacgacggcgtgcacttcgagcgcctcttctacgtgggcgacggcgccaacgacttctgccccatggggctgctggcgggcggcgacgtggccttcccgcgccgcggctaccccatgcaccgcctcattcaggaggcccagaaggccgagcccagctcgttccgcgccagcgtggtgccctgggaaacggctgcagatgtgcgcctccacctgcaacaggtgctgaagtcgtgctgagtctggccgcctgcaggggggtacccgggccaacggcggagggggcggggaagggagattcggcaaagacagctttactactcccttttccctttggctttgttatgtccctctgggaatttctggaatctcgtatttgggggcttggggaagggggctcagagccgtccctatctattcagttaacccacctcggctgcctcccccactccactgtgcacggttgagttctggagtctgacccatcgcggggtggcgcgcaaaccttggaaggcagcagtatttcctggtcctcccaactgggaggaaggggcccccccggcaggtgagagaaggaacatctcccgccgctgtaacttgttgcctcgggctgcgtgaccgcccctcctccagtctactgtggagggaacccaggatcctgaaattctcctggccgcaagaactccccacagaggcagaagagggtctccacctatggccccaggcctttgcgatcttgcttcacccaccgcgaccccacactatttctgtgctgtccacactctcttgcctcccgacccccgcactcccttctagcacccccaaaggaaaagccagaggaacaatcgcctcctggtggtggtacgaggtagcgcaccgtccggctcgggtccggacagccagtaacctcgcagagagtgacggtgtctccttgcatcccagcctcgtctatgcagcaagagaccagggacttcaccaaagtcaccctcgcgggctgggccttccacgcatcccccccaccccccatggaacagaaagccatgtttttaagcagaaccagcgaaacccaagcccctccttcctctggtgttttacaactataaaggaggtgaaggg

SEQ ID NO: 31531 - DNA, 2029 bp, Homo Sapiens
ctcagtcatgtgaccggcaatggcggcgctgacgagagctgcatttggaagtgttgtggagacagccccgtagcccaatgcgaccagactcagggaaaacatcaggcccctccagctgagcccttgtgtgagccccgcccctccctaaatgccagacttgggagctgacagacagcactgcctgtgctgggtttaaaagtcctggtcagctgagtggaaatagaaggatttctgctgccatcatcttccatgggctttccaggtcacacgacctacaagtagggagcagggaaagaagagtgagcctgcatgccaattctaagctcttcaggatcaaatgtcgttcgtcctgtccagaatggcagcctgtggaggcacctgcaagaacaaagtgactgtgtccaagcccgtgtgggacttcctgagcaaagagaccccagcccggctggcccggcttcgggaggagcaccgtgtgtctatcctcatagatggcgagacttctgacatctatgttctccagctttccccacagggtcctcccccggcccctccaaatgggctctacctagcccggaaggctctcaaggggctgctaaaagaggcagagaaagagctgaagaaagctcagaggcagggggagctgatgggctgcctggctctggggggtggaggggagcaccctgagatgcaccgcgcaggcccaccccctctccgagcagccccacttctgcccccaggagctcgggggctcccccctcctcctccccccctgcccccacctcttcctcctcgccttcgggaggaggcagaagagcaggagagcacctgccccatctgtctgggggagatccagaatgccaagacattggagaagtgccggcattcattctgcgagggctgcatcacccgggctctgcaggtgaaaaaggcctgccccatgtgcggccgcttctatgggcagctggtgggcaaccagccccagaatgggcggatgctggtctctaaggacgccaccctcctactgcccagctatgagaagtacggcaccattgtcatccagtacgtcttcccgcccggtgtccagggggctgaacacccaaacccaggagttcggtatcctggcaccacacgggtggcctacctcccggactgccctgagggcaacaaggtgctgaccctgttccgcaaggcgtttgaccagcgtctcaccttcactatcggcacgtccatgaccacagggagaccgaatgtcatcacctggaacgacatccaccacaagaccagctgcacagggggaccccagctgtttgggtacccagaccccacctacctgacccgggtgcaagaggagctgagagcgaagggtatcacagatgactgaaggacatcgcctttgccaaggcccctgctgtctgcctctactaggacccagcagaagcctctttctcctctctgccccctgccccccacaccacacctgtaggggacctgtctgactgggaagggagttccgagagggagggggcaatcccttcccccatcccccactggccaagtgtttcaatgcagtgtgagccactcccttctggcagaggccgacctccaaggctctgttctcccctccccgtgtacatatactcccggtttccctgcccctccattgcccttggctttttctggtatgtgctgtgctccacgaccaagccgagaaaggacctagggtggggaagggagggtctcttgattcctaaccgcccccacatactgctccaccgctgaacttcgggtgccggggaggagaaattgggctgatgtgagctccccgtcacccgccatggagccggctgtgtgtgttcatcagatacagttctcccttaaccttgtcctttctctcctgtgtctcagtctccgtcagtctgtctttctccgctcttctctgacccctgtgaggaacctccttaccctgttctggaatcgctgccagactgtagcttttaatttaataaaaataaagtaaaatatgcaactc

SEQ ID NO: 31532 - DNA, 2611 bp, Homo Sapiens
agttctaccggcatcgggcgctgagggtgagaagggaccacaagcagcagcaggtctcagtgcttgtcatattcctgctcaccggtgggctccgggcacgcccggcagggtcctgggggcgcaggcaaggggacgtaggcagagtgctccggccagcatggagggactggtcttccttaacgccctggccactcggttgctgttcctgctgcactcgctggtcggggtctggcgagtgaccgaggtgaagaaggagccgcggtactggctgcttgcgctgctcaacctcttgctcttcctggagactgcgctcaccctcaagttcaagcgcggcagaggctacaaatggttttcaccagccatatttttatatctgattagcatcgttccatcattatggcttcttgaattgcaccatgagacccagtattgcagtatccaggctgaaggaacatcacagaataccagcagaaaagaagacttcaatcaaacattgacatccaatgaacaaaccagtagagctgatgatctcattgagacggccaaagtttttgtgaataacttatctacagtatgtgagaaagtttggacattgggactccatcagacattcctgttaatgctaataattggaagatggcttctacccattggaggcgggatcactcgagatcaactctctcaacttcttcttatgtttgtggggacagcggctgacatactggaattcacaagtgagaccctagaagaacaaaatgtgaggaatagtcctgcactagtctatgccatccttgttatatggacttggagcatgctgcagtttccacttgacctggcagtacagaacgttgtgtgccctgtgtctgtgacagagaggggattccccagcctgttcttttgccagtacagtgccgatctgtggaacatcggaatcagcgtcttcatacaagatggccccttccttgtcgtgcgtctcatactgatgacctatttcaaagtgatcaatcagatgctggtgttctttgccgcgaagaacttcctcgtggtggtgttgcaactctaccgcttggtggtgctggcattggcagtccgtgcttcgttgagaagtcagtcagaaggcctgaaaggagaacatggttgccgggcacagacctctgagagtgggccctctcagcgggactggcagaacgagtctaaggagggcctggctattcctttgcggggctccccagtcacctccgacgactcccaccacaccccttagttattgattgacagtggtctgcggctagaacctgactccctggttcttcttacagggaggatcctttttctcctccaaccttggcgtataataattttcaaaagaacaacataaaaaggtgatcttaaaccaaagctgaggaattttcttttttcaactgaatagaaggaactttgattagtgactattgctacaacttctgtgtgatggtatcagatgttatagttgttcaacgactaagtgatttgtttgtcttgaactgtttgaaaagctatggaagaggttacagtgacatgccctcgaaagatttggtgcagaccaactgtcgcggctgttacctggaaatagagaagctttgaactttgcctccattgtcagactatttcgtctgatcttttctgcaatgttcctctgacatcaaaaaatgtacattcagtgaatgcagaacaaatgaagggaaaagtgcctttaaaattacctcactgtgggctggaagaagcgaaaatctctgcccagcttccgtatcatagagagccctattcatcgctgcccaggccttcccaggaaaatcattttttctgggctgatgttgtattctgccatggcgcatatgttcttacagaaattttattgcttttgtcttgggtgctacaaaattcacagcaagccattttggttacatatctactggttgcaaggcaggaaatattggtgaaatgctagcaaagtcacaatttctactctgaacatgatttgcagtgttcatcagtatttttctgaaccctgctttaccattttctatattgccaagttgaatcatgtgggctgatgcagggaagctctgaagcagtgaataaaggtgtttcgggccctgagagaaagaattgcaaatgccaggcatctgtccactttagccctcctccaatgctaagaaagagggatggtgacgtatactacagagacgcaaatgaaacaccaaacagtcttgaattacaagaaaaaaaggggatttttttttttttctaatttcagacttggctttttacttagaggacattctgatttgctctcagaaacatctgatttggggttaaactaggcggctggaggatgtttacagctttgaggcttcaaataagtttccatatgcagggagtaactttaaacaatgtttgaataattaactgctaagtcttatattttatgtgtatctatttcatcctctgtctctttcttactagaataccatataagaatattttctctgcagtatttatatttatactattttgctatgagtggcctttgtattttattatatgcattaaatagtgtgtgcacaacttt

SEQ ID NO: 31533 - DNA, 2255 bp, Homo Sapiens
acgtagaccgtctgctgggggcgccggcaccatttggagtacgtgaggaagaaaaatgtctgaaaagcagatgaaggaagcttttgtcagtaacctcaatggaaccaccgtgctggaaatcacccagggattgtgctttcctgcattctgtatcctgtgcagagggttcctgatcattttctcacagtacttgtgttctttttcacctacctggaaaactagattcctcactgactttgttgtcctaatagttcccatggtagccactttgaccatttgggcttcatttatcctccttgagcttctcggtgtaattatctttggggcagggctgttgtatcaaatataccgaaggaggacctgctatgccagactgcctttcctaaaaatccttgaaaaattcttgaacatcagtctagaatcagaatacgatccagccatctcctgtttccgtgtaattaccagtgcgtttactgctattgctattttggctgtggacttcccactttttcccagaagatttgccaaaactgagctctatgggacaggagcaatggattttggagtaggtggctttgtttttgggtctgcaatggtttgtctagaggtcaggaggagaaaatatatggaagggtccaaattgcattactttacaaactcattgtactctgtttggccattagtcttcctaggaatcggacgattagccattataaaatcaataggctatcaggaacatttaacagagtatggagttcactggaactttttctttaccataatagttgtgaaattgataacaccactgctgttgattatttttcccctaaataagtcctggattattgccctcggcattactgtattataccagctagcccttgactttacctcactgaagaggttaatattatatggcactgatggtagtggcacacgggttggtctattaaatgccaaccgcgaaggaataatctctaccctggggtatgtggcaatacacatggctggtgtgcaaacagggttatatatgcataagaaccgatcacatatcaaagacttgataaaagtagcctgttttcttttactggcagctattagcctcttcatatctctttacgtagttcaagtaaatgtagaagcagtatctcgaagaatggcaaatttagccttttgtatttggatagttgcttctagcctgatccttcttagtagtttattactgggtgatataattttgagttttgccaaatttctaattaaaggagctctagtaccatgttcttggaaacttatccagtcacctgttacaaataaaaagcattcagaatctctagtccctgaagccgaaagaatggaacccagtctttgtttaatcacagctctaaacagaaaacagttaatatttttcttgctgtcaaatataacaactggcctgatcaacctgatggtagatacattacacagcagtaccttgtgggccttatttgtggtcaatctctatatgttttccaactgtttaattgtatatgtactatatttgcaagataagactgtacaattttggtgatcagcaggagtaggatatataagtatttgggcaatatttaatgaggaatattaattgtaaagaaattgtgcttttggcaacagtgttaaccatattttattataaaatagtttcagtcatctaaacagcagtgatgcttaattatttttttttttgagacagagtcttgctctgttacccaggctggagtgtagtggtgccatctcagctcactgcaacctccacctcccgggttcaagcaattctcctgcctcagcctcctgagtagctggcactgtaggcatgtaccaccatgcccagctaatttttatatttttagtagagatggggttttgccatattggccaggctggtctcaaactcctgaactcaagtgataacacccaccttggcctcccaaagtgctgggattacaggtgtgagccaccacactgggccaatgcttaatattttaatgtatctcaacaataaaaccaagaagaaacaaagccttttgacttgttagaatgtattaagtagtattttaaagaaactttatagttgtgacattgaaagactgttggggtggggggaggaaaatttttactttccatcttaatgtaaccttatgctattctgtatttttactgtatattgcttttacaataaatataaaatgaaatgtttatgttgacatttcagtgtg

SEQ ID NO: 31534 - DNA, 2970 bp, Homo Sapiens
acgtctgcggtgttacccacgactgcctgggacctggccaagggctccacacaccaagaccaaggcagcaggaaggagaaaggagggaaggtaaaagactactgaaaagctttcagctggggctgggcatggaggctcacacctgtaatcccaacactttgggaagccgaggctggtggatcacttgagcccaggagtctgagaccagcctggccaacatggcaaaaccctgtcgctacaaaaaatacaagaattagccatgtgcacctgtggtcccagctcccagggccgggagcctgaaaccaaggtgtccacagggccctgctgcccccagaggctctgggcagagcccttccgcctttccagctccccctggttcccgtgctcctcggcctgtggccccatcactctggcctctgccttcatctcatgccgagatccctgaagcgggcccagctccgttcactgctcccccggcctcctgctgtttcccacacgcagccatggtacagggcagctcatcccaccacctccccaaccgcagcctccagggatgtacaccctgcctcaggggctgtgcctgggccctggctggtggagggcacagccgtcagggaaggccctcagctgcaggatgccgtgcctcagagaccaaccaggccctcgaaggcactgtggccggcccagatgtcagcagctccagcaattaggctgggacagatggtgcctggtgacacaaggggactgtgggggccacaggggaccctgctcacctggacctaccgtggaggccagggagggagatggactcgaagggcggaagggcccagagaaggcacatttgcagagcagcggccgcatttccagagctcgggagcccaacaggaatcccgtctggccatgggaccaccgcccttggggctgggggatgccgcaggggacggcagagggcagacaggccaggaaaaggggagggcagagggcagacaggccaggaagagcgcctgcaagtgcccaaggaagggaccaaacccaggcccctggaccagagcggccgcctggtggggcaggctggaaggggccaaggccagcgccaagggggagcaggtgagggaccctggtgggcatctgtgggaacaaggccacgtttctccctgcgcacgctttaatcaaggacattcctgtggttctccaaaagtgtcgcacactacatgggtgtcgtgagctgggctccgtgagagtgtgcgggtggctgggggcagcaagggagcagcaaggcctcaaacccgggcggcggcctggcctgcgcgccaggatgtgcggtgtgagtttcccgagctgcaggaacaaggcccacagactggggagcttcacacaacagaaactgcctcgcagttcccgaggccagagcccatcggggtggctccctgaggccgtgagcccggactgtcctgggccgccccctcttccacaggctgagatcatccttggcgtctgttggcctgcggccgcctcgcccaacctctgccctcatgtccacacgggtcctccctgtgtgcatgttggtgtctggatctgccctttctactgtggggcaactgtcgtcgaggatagggcccaccacacaacacggcctcatcgtaactaagtatagtcagcagtgatcctatttcccaataaggtcccattctgaggtcctggacttcaacatgtgaattttgggggccacaactctaccctggcatgcagagagagaaggggggcgtggagtccccctggggggaagtcccttgggaagtcacaggcccccttggtggggcaattgggacgtgggtgtgagggtcctgggtacagggagcctgcctaccaaggctctgccgacagctatttctaaattcctcgtggaaaataccctgtggccctcctcatctggagcgagcgacgggctggagggtgtctgagccaggctggtgccggggagcagatgtgggtggcccaacccagccccttgttcttgttccccacctcccaggaaagggggagggtgggcggagccggccctcctgggctctctccttgggtcccggagccacctggggaggggaggctcaaccccctaccttggccagctggctgcaggtctctcagggctggcacagaacagctgggctttgccaggtgtcccccatcctgatgcacggcccggtggtgcggtctccaggcctcccaggattctcagctgcgccgtctccccagtccccaaaccccagtggtggccgccaggggactggaccgtcagtctgtggagctggggctgcagctggtggtgtttccaacaagggtcttttggctgcctggccccagggagaggcctctggaggcaaggggtaacctaccgggaaagcctcaaaggcacccccatccccgccccgcacagactccaccggccccccatggttcctccaggccctcttcagtcatgacaggcagtgcctgggtgcccggcctgctcagtacaccctgggcctcagccccacccaagccttggcctagcatgggagccaccacgggaacacacacacgggctggagggtgtctgagccaggctggtgccggggagcagatgcgtcagatggaggagaaaagccctggggcagcggcttctggagctctggccaaggatgggctctgagcacacccctgcccggcccagagcaccaggccggggcagggtcaggaacagcttgaagccccctgcaaagtctgtccctcctcctggagcctcagctgcccctccaacacagccctctgtgggagcctagatggcccccgtgtggccatgagacatgggcgggcgctggtggattcctctgtgtcaggtgacatggtggcaccccggccgcaggctgtgccccggctgtggcgttaagaagggctatggatctaaataaaatccagtctctttgctgg

SEQ ID NO: 31535 - DNA, 971 bp, Homo Sapiens
gcttgaattcggcgcgccagatatcacacgtgccaagggctggctcaagcatggcccgggggccgctggccgcccgcggactgcggctgctgctgccgctcctgccgctcctgccgctcctgccgctgccgcaggtggcgctgggcttcgcggacggcagctgcgacccctcggaccagtgcccgccccaggcccgctggagcagcctgtggcacgtggggctcatcctgctggcggtcctcctgcttctgctgtgtggtgtcacagctggttgtgtccggttctgctgcctccggaagcaggcacaggcccagccacatctgccaccagcacggcagccctgcgacgtggcagtcatccctatggacagtgacagccctgtacacagcactgtgacctcctacagctccgtgcagtacccactgggcatgcggttgcccctgccctttggggagctggacctggactccatggctcctcctgcctacagcctgtacaccccggagcctccaccctcctacgatgaagctgtcaagatggccaagcccagagaggaaggaccagcactctcccagaaacccagccctctccttggggcctcgggcctagagaccactccagtgccccaggagtcgggccccaatactcaactaccaccttgtagccctggtgccccttgaaggaggtaggagaacggaccagagcttggagaactaatgcttggagccaagggccccagcccaccccaccgtcccacacattgctgtggccccaacctcggtgccatgttacaccggcccctggcgtcacccactaggcaggctgctgctttcagcctcagcccctggcccagccccagcaggccctcagcctggaagaggccccttgggcctaagcctcgggtgggagctcagggccacctgtgacgtctgcatcttcttggagagagaataaagtttgtatttaagtgg

SEQ ID NO: 31536 - DNA, 3042 bp, Homo Sapiens
agcggggacgggacggcttccgggatttggcggggcctttgtctctagctgctgcgggagctccaggtctagtctttactgctctgtgtattctgctcctagaggcccagcctctgtgactccgttatctgcaggtattgggagatgcacagctaagatgccaggaccacctggaagcctagaaatgggaccactgacatttagggatgtggccatagaattctctctggaggagtggcaatgcctggacactgcacaacggaatttatataggaaagtgatgtttgagaactacagaaacctggtcttcctgggtattgctgtctctaagcctcacctgataacctgtttggagcaaggaaaagagccctggaataggaagagacaggagatggtagccaaacccccagttatatattctcatttcactgaagacctttggccagagcatagcataaaagattcttttcaaaaagtgatactgagaggatatggaaaatgtggacatgagaatttacaattaagaataagttgtaaaagtgtggatgagtctaaggtgttcaaagaaggttataatgaacttaaccaatgtttgagaactacccagagcaaaatatttcaatgtgataaatacgtgaaagtctttcataaattttcaaattcaaacagtcataagaaaagaaatactggaaagaaggttttcaaatgtaaagaatgtggcaaatcattttgcatgctttcacatctaacacaacatataagaattcacactagagagaattcttacaaatgtgaggaatgtggcaaagttcttaactggttctcagagcttattaaacataagggaattcatatgggagagaaaccctacaaatgtgaggaatgtggcaaagcctttaaccaatcctcaacccttattaaacataagaaaattcatattgaagagaaacccttcaaatgtgaagaatgtggcaaagcctttagtttattctcaatccttagtaaacataagataattcatactggagacaaaccttacaaatgtgatgaatgtcacaaagcctttaactggtttgcaacccttactaaccataagagaattcatactggagagaaacccttcaaatgtgaagaatgtggcaaaggctttaaccagttttcaaaccttactaaacataagaaaattcatactggagagaaaccctacaaatgtgaagaatgtggcaaagcttttaaccagtttgcaaaccttactagacataagaaaattcatactggagagaaatcctacaaatgtgaagaatgcggcaaagcttttatacagtcctcaaaccttactgaacatatgagaattcatactggagagaaaccctacaaatgtgaagaatgtggcaaagcttttaatgggtgctccagccttactcgacataagagaattcacactagagagaatacctacaaatgtgaagaatgtggcaaaggctttactttattttcaacccttactaaccataaagtaattcatactggagagaaatcctacaaatgtgatgaatgtggcaatgtttttaactggcctgcaactcttgctaatcataagagaattcatgctagagagaaaccctacaaatgtgaagaatgtggcaaagcttttaaccggtcctcacaccttactagacataagaaaattcatactggtgagaaactctacaaacctgaaaaatgcgacgataattttgataacacctaaaacttttctaaacataaaagacaccatcctgttgagaaaccctaaaaatgtgaagaatttgacaaagccttccaatgattgttacacttgcttgtaggtaagataatttatattggagaaaactttataagtgtaaagaatgtgacaaaacttaaccaatactcacatcttattgcacaggaaagcatttttacttgagaaagattgtacaagtataaagaatgtgaaaaagtcattgatatcttttcacatcttactcaacaccagagtttatacttattaaaagcattataaatgcaattactgtcaaaagaaatttcagaaaacataacactttaaagtgaagaagcatgtttattttgaagacaaacataacaaatataaggagcataggagggttgtagtacctttacttgtattacaaatcttattgtacgcattttgtactagagaaaaacactgaagcagttgctcaaactttgttcaacatcagggaatttatattggagaaaaatcctgcaaatgtaatgaatttggaaaaacattttttttcaaaaactacggcgtagaaaacatgaatttatattgaaatgtgtttttgcagatgcagtaagtatgaaaaatatttaatccaaaattgagtctatgtaaatattaaataatttacagtagaaataactaaggcactgacactttagacattacactaaaacagagtgttgagtataaaaaaatctataagttgttagattatttgtaaataactttaaaaggagtagaagattctttggagagttataattacattgaaagtatactttttttcttgaaaaaattatggcttatttgaaaagtaaataatgatgaaattcaactctcaaattactttatttcattcctattgtattcacatgtgaaagcatgtgataaattgttgctgtgtcagatataggagagattcttttttattagatgggcattatttatggttttttctgtggaagagtatgggcattaaaatgtaaggtttatgatgaaaatctaagtggagaggccctgttagtttacttttcatattgagtgatgcatgaggtaggtgtttggagtaatattctgcatcatagagaaaagcatttttaattttactttaaattaaatgtaattaaattactagtgaatcattttactaattgtacttttatgctataaatgcagtacatttgaaaatttttagattatgtataagcttaattttataattaaacatttctttaacaaaaaaaaaaaaaaaa

SEQ ID NO: 31537 - DNA, 3204 bp, Homo Sapiens
ctctggcataggctcttggtagtgggggcccagacagggaggcacctgccacctgcttcccttctcagccacccacagccctcatagggcagaatgggactcttgctgatgtagacgccgaagtcgcgggcgctcatggcgggcctggaggtactgttcgcatcggcagcgccggccatcacctgcaggcaggacgcgctcgtctgcttcttgcattgggaagtggtgacacacggttactgcggcttgggtgtcggtgaccagccgggtcccaatgataagaagtcagaactgctgccagctgggtggaacaacaataaagacctgtatgtcctccggtatgagtataaggatgggtccagaaagctccttgtgaaagccatcaccgtggagagcagcatgatcctcaatgtgctggaatatggctcacagcaagtggcagacttgaccctgaacttggatgattatatcgatgcagaacacctgggtgacttccacaggacctacaagaacagtgaggagcttcggtctcgtattgtgtctggaatcatcacacctatccatgagcagtgggaaaaggctaatgtaagcagtccccaccgggagttcccccctgctaccgccagagaggtggacccactccggattcctccacaccacccacacaccagtcggcagcctccctggtgtgatcccctgggcccgtttgttgtcgggggagaagacttagacccttttgggcctcggagaggtggcatgattgtggatcccctgagatctggcttcccaagagcacttattgacccttcctcaggcctcccgaaccgacttcctccaggcgctgtgcccccaggagctcgctttgacccctttggacccattgggaccagcccacccggacctaacccagaccatctccccccgccgggctacgatgacatgtacctgtgaaggcctcaagaatgtaacatcccaggcttccctccattctcctggagctgccaccgctgtccccatcagcaaccatgttcttgcaggctgggggcaagggattctgctcatgtgtttgcagaccggctgggatagcctccccaccccttatcagagccaagacacctgctgcagctctccacctagctgcagatagctcccaaagagaaatcagtgtgtctctttcaccatcagctcctcccctttcaccaccagctcctctccacttcccaagggagactccggcaaccttcagcaacatatatcctcgaccagatgcagtgctataagaacagaacgcattttggatgttattattaagaaccaaatgtcaatacagaattcatgttgccggtttcccacttttctttttacattaatgcatagctgcttccatttatgagactttagagtttgagtttctgtagggctgaatgactctttttcctgcccagggcccattcttgcttctcaggcaccttccgtttattaattgccattgctcctgacatcactaagatgggtccccttctggctgcatgaatggaaatgagtgactggaaatcccataggccacaagaatgactttcacaagggcaggaacattgtggaaagactgcatcattctgatgaggcaaaatcctccagctattcctgtctgggccagttttgtaggtccatctgtgcatgggcagcagtagtcaaaaagccaaggaaaaaacagagcagacctgaaggctaatcttatttttgccactaacttagtgaatgaccctaagcaagttccttctcctcttagggccttgtgccaagcctatgaaattggaggtggctttcctgctctaaagcattttgatgtctcattctgtgtttggtaacccctataaactggggcagaggaaaagaatgatggttcaaggccatacttcccttgaaccttgtgtggttcttgcctaactctgtggtttttggaccccatggggcccagacagagcacaggagcatgggctgcctctgagtgtggtgttgaacttcgggaggagcagggagccctgcaccttgtgtcctggcccacctgacctttggtgttctccggatccttttcagcccgaggcctgacagacgcgggcagtgatgagccctgttctggagtggaaagagcacgatagagcaccaggctaagaggcacgagatcaaggcggtagtcacttccgctctgcagctagcatttcaaccatatgtggatcctttcatttctcagctccctggattccttcccctaaattaggacctattatttacctgtaggtaagcaagctactgtagctcttctgaggtatctgccaggctgttttctgtagcctcagattgcctatctgcttagcctgagaacaggtagatgaaaactaaactgatgcctaggcccagggtcagtctcagatggaagctgggcctgggtggggaggctagcatgcgtggctccctgggtatttctgtcagtccccatggcaagcagtgatttagtaaaacaccccagagtcagggaagccaaccaccttgaaacctttagaacatctctgctttggagaaagacccagagatcaggcagaggtgcagattcaatcattactcataacctttgagagctggcaaatgggaggagtgttagtctttgttttggaattggaccattcttgcaaccaaaaggacttagagcagtttgctcataaagacatcctttattataaaaggaagtatttaaaggatgatagagaccatcagatagaagcagggaaggtagataacttttaggaccttgatgtgaggaaaagataaaatttaaacaataaatttgccacttagattttctagcagcaaagtccgaaaagatagttatatacaaaattctgttttctgaaaacaaaattgtgattcaccttcagaattggccattttttttgtgagtttccttgcatcaaggacactgagaaacacagtcattgtcttaggtgttctatgggaggaagtgaatagagcctttaggaacttcctggtcaagcttatggtgcttattttgatctgggccacttccctccttccagtcatgagtaatcatcaaggagcaagttggagtgtttcaggtgtatattttgtagaacccaaaagattggagccttaacaataaacatcagcactaagtgacctgttaaaaaa

SEQ ID NO: 31538 - DNA, 3158 bp, Homo Sapiens
ggcttccccgccccgccccgtccccgggcgtctccattttggtctcaggtgtggactcggcaagaaccagcgcaagagggaagcggagttatagctaccccggccgcggagccggctcactgcactacccccgcccccttctttcctccagacgccgaagtcgcgggcgctcatggcgggcctggaggtactgttcgcatcggcagcgccggccatcacctgcaggcaggacgcgctcgtctgcttcttgcattgggaagtggtgacacacggttactgcggcttgggtgtcggtgaccagccgggtcccaatgataagaagtcagaactgctgccagctgggtggaacaacaataaagacctgtatgtcctccggtatgagtataaggatgggtccagaaagctccttgtgaaagccatcaccgtggagagcagcatgatcctcaatgtgctggacctacaagaacagtgaggagcttcggtctcgtattgtgtctggaatcatcacacctatccatgagcagtgggaaaaggctaatgtaagcagtccccaccgggagttcccccctgctaccgccagagaggtggacccactccggattcctccacaccacccacacaccagtcggcagcctccctggtgtgatcccctgggcccgtttgttgtcgggggagaagacttagacccttttgggcctcggagaggtggcatgattgtggatcccctgagatctggcttcccaagagcacttattgacccttcctcaggcctcccgaaccgacttcctccaggcgctgtgcccccaggagctcgctttgacccctttggacccattgggaccagcccacccggacctaacccagaccatctccccccgccgggctacgatgacatgtacctgtgaaggcctcaagaatgtaacatcccaggcttccctccattctcctggagctgccaccgctgtccccatcagcaaccatgttcttgcaggctgggggcaagggattctgctcatgtgtttgcagaccggctgggatagcctccccaccccttatcagagccaagacacctgctgcagctctccacctagctgcagatagctcccaaagagaaatcagtgtgtctctttcaccatcagctcctcccctttcaccaccagctcctctccacttcccaagggagactccggcaaccttcagcaacatatatcctcgaccagatgcagtgctataagaacagaacgcattttggatgttattattaagaaccaaatgtcaatacagaattcatgttgccggtttcccacttttctttttacattaatgcatagctgcttccatttatgagactttagagtttgagtttctgtagggctgaatgactctttttcctgcccagggcccattcttgcttctcaggcaccttccgtttattaattgccattgctcctgacatcactaagatgggtccccttctggctgcatgaatggaaatgagtgactggaaatcccataggccacaagaatgactttcacaagggcaggaacattgtggaaagactgcatcattctgatgaggcaaaatcctccagctattcctgtctgggccagttttgtaggtccatctgtgcatgggcagcagtagtcaaaaagccaaggaaaaaacagagcagacctgaaggctaatcttatttttgccactaacttagtgaatgaccctaagcaagttccttctcctcttagggccttgtgccaagcctatgaaattggaggtggctttcctgctctaaagcattttgatgtctcattctgtgtttggtaacccctataaactggggcagaggaaaagaatgatggttcaaggccatacttcccttgaaccttgtgtggttcttgcctaactctgtggtttttggaccccatggggcccagacagagcacaggagcatgggctgcctctgagtgtggtgttgaacttcgggaggagcagggagccctgcaccttgtgtcctggcccacctgacctttggtgttctccggatccttttcagcccgaggcctgacagacgcgggcagtgatgagccctgttctggagtggaaagagcacgatagagcaccaggctaagaggcacgagatcaaggcggtagtcacttccgctctgcagctagcatttcaaccatatgtggatcctttcatttctcagctccctggattccttcccctaaattaggacctattatttacctgtaggtaagcaagctactgtagctcttctgaggtatctgccaggctgttttctgtagcctcagattgcctatctgcttagcctgagaacaggtagatgaaaactaaactgatgcctaggcccagggtcagtctcagatggaagctgggcctgggtggggaggctagcatgcgtggctccctgggtatttctgtcagtccccatggcaagcagtgatttagtaaaacaccccagagtcagggaagccaaccaccttgaaacctttagaacatctctgctttggagaaagacccagagatcaggcagaggtgcagattcaatcattactcataacctttgagagctggcaaatgggaggagtgttagtctttgttttggaattggaccattcttgcaaccaaaaggacttagagcagtttgctcataaagacatcctttattataaaaggaagtatttaaaggatgatagagaccatcagatagaagcagggaaggtagataacttttaggaccttgatgtgaggaaaagataaaatttaaacaataaatttgccacttagattttctagcagcaaagtccgaaaagatagttatatacaaaattctgttttctgaaaacaaaattgtgattcaccttcagaattggccattttttttgtgagtttccttgcatcaaggacactgagaaacacagtcattgtcttaggtgttctatgggaggaagtgaatagagcctttaggaacttcctggtcaagcttatggtgcttattttgatctgggccacttccctccttccagtcatgagtaatcatcaaggagcaagttggagtgtttcaggtgtatattttgtagaacccaaaagattggagccttaacaataaacatcagcactaagtgacctgttaaaaaa

SEQ ID NO: 31539 - DNA, 2326 bp, Homo Sapiens; identical to SEQ ID NO: 26375

SEQ ID NO: 31540 - DNA, 3599 bp, Homo Sapiens
gggggactacgggtcggcgttgggctcagtgggctcgaaacaaagggctgtccggtggggattcgtcgcggcgccttctgagtggtcgggtcgaggcttctcggcctagcagtgccctcgctgcgcgatctcaggcgggttctcctcggctccgcgcagcccgcgccgcggtgggggacccggcgcagcggcacctgctgccgagggaccccgcggcccgccccggtgctcgtgatggggctgatcttcgccaaactgtggagcctcttctgtaaccaagaacacaaagtaattatagtgggactggataatgcagggaaaaccaccattctttaccaattcttaatgaatgaagtggttcatacttctccaaccataggaagcaatgttgaagaaatagttgtgaagaacactcattttcttatgtgggatattggtggtcaggagtctctgcgatcatcctggaacacatattactcaaatacagagttcatcattcttgttgttgatagcattgacagggaacgactagctattacaaaagaagaattatacagaatgttggctcatgaggatttacggaaggctgcagtccttatctttgcaaataaacaggatatgaaagggtgtatgacagcagctgaaatctcgaaatacctcacccttagttcaattaaggatcatccatggcacattcaatcctgctgtgctctcacaggagaagggttatgccaaggtctagagtggatgacctcccggattggtgtgagataacttttttgcttgaaagagactgctctatttattctgtgacatgaacattttttcctagtacctttggctgctaaggcagcagcatgtttaatttataacaacacaaacctctgagagcaacacttgaatcaagtgcagctgaactggaacataaaagattttttcttaactttttttttttaacacactaatcttcagttggatgaatgtaatgtataactatgttttcagcaacaattcttctgtttattctaattaatcagtgactgccttgtaagaaatgtttgtcatatgcgtgatgtcttctgaaatattcttataaccttaatgaccaattgctttcaattcttgaccagcactccctcccaaccagagaattactggtttgatagagtagtcttggaaagcatcaggtactgcctgcagacttctccagcactaaatatatttgttccctctataaaccattcatctttcggacagaacttactgtaaagaaagaaatctgcctagaggatatatgtaaggaagattccacatcatgagtacttgccttttaactttcccccacattactgttgagtcatggaataatgtttaagttgttatttgcatggaaattaagtaggctgtttatttatctaaaggaatcaagtccactcttctgcctgcaacatttgttcaaaaactaaccaaggtaaaatatttatttgaaagcccaactttgatgttaaatattcttgaataaatctgttattttaagaatatcacattattcaatgcatataaaactatcagaagttagtaaatcataccagcactaaaaataagacaattggaatatattttagcatcagtttacaaacaactttattatcaacagaaattttagctcttttctttgcaagatatatcacagctgctttgggcagtagctgaagccgaagtatgaacagtccattttgtttcttaaaatttgaagtcgtgtctgtcatagcatttttactaccagcagtatgttacttaaaaaactacatggctttccttgaatttatttgacggtattatgtaatagacttgaaacaattgccatctttgtagttatgccttgggttctaaaatgttataggaaactgctgaattgaatcctagcttttagaatattaataggagactcaaagttaatattcttaacaacttaaaattaaaaaaagtcataatctatcaaaagtttatttattggatggcattaaaacatttttgaggcagttgtctaatatgaacaataatctaaacaatatattccttaaattaagaggaaagacaagtgtcgtatttcgattctgtttattcaaatgtgtgattttgctgaaatgaaagggataaaatgaatacttagagaataatacttcatttttgcagtactttttaattttgataaaaaagatacaaagttcataatatcaaaatatgtgttcaaaattggtattttaattttaatatttttgtaagttgatttaaattttgctcttttttcaggtgtgcttggtttattatatttagtcaagttaatttagtcgaatgtggtaacatttttctgatttatctttagttggagcacacccttgaactgaacagtggccaaaggaaagctttctgggctttggaaagtagttgtttaactttgttttaagccgttttcttagtgattctgtatcaagtagaggataagtgtagtttaacttagtttttaatataacccataatcaagaacatgagcgaaaagcagacataaatcgatatggatggtttgtggtgtgtgtgggatgtgggggaattaagaaaatgccatttacctaagcacagtttgcctgaatttctgcttggttgtgttgtttaccgtaagtactgagggtagtttccctaagtctgtcctgagaaaaagcatacttagtactcctgtatttgttcttatgaaatgactatctgccttcttgtatctagtaagattggctggctcaattttcttctgtcaaattatatggttattttttatattaccacatcagcattatattaaaagtgtttttaatagttgattgtattttgccaactactagtatagactcaaatttgctatttaatttttaaaatacaatttattttgtaaatcctttaaaaaatatttggttagttttggattagaaatgatttatgttagccatgtgttgaagatgaaattggcatcagtgtagacggtgctgattgggaaaagttcatgattaggaaattcatgtaagactttttaagagtattttttaggttttcactcaatctttcctgttacagtaacgtgaaaactgattattctttactccaagagaatgttttaacccaagcaagtatctaatactagagcattggttctgacattcattgtaaatcagtgaactgtaagatactgtctaaaaaatgtacatttgtaattagtgcctttattcatattttgaaataagttcttagttttatattatacctgttctttagaagtcatgttagcagctaattatttcagtgatgaaataatttgtgttttatatcccccttcacctccatgtattggttagcacagtttatagtaagtgaaaagcaagggacccacctacattaccttcaggagactgttctaccttttaatttgaaaacaaggaaattaaattttaacagaaatcttttaagtatgttataaccaaagtgttcaattatccttgcaagttcaaatacagcatttttctaaaaaaaaaaaaaaaaaaaaaaaaaaaaaa

SEQ ID NO: 31541 - DNA, 2447 bp, Homo Sapiens
cggtgtctcgtcatctccgggaagactcggcgcctgggtccgcgctctctgggtaagctttccgggaagctttcccgggagctcgctggtcctggccccagaagcctgcggacccgcccagggaggataagcagctgaaagaccgcgcggtgccgctccgaggccccgggacgtgggcccatggtcggcctggcgccacctttccgggggaagccacgcgcaccaggcatcgcacgcggctctgcacccgcgccgccggacctgaaacccggcggagggcacacggggctgccgctgcgggccccggaccaacccatgcttactccggagcctgtaccggcgccgacgggtcggacctccctgcgcggtgtcgcccagcgggttcgtgcgaaaggcggggccgactacacgcggtgccgcgccctgagaccgtttatctgcagtcaacgcagcctcccggctcagcctgggaagatgcgcgaatcgggaaccccagagcgcggtggctagaccgggctccgccgcctcccccacagcccctttcctaatcgttcagacggagcctggtcgacttcgccggagactgccagatctcgttcctcttccctgtgtcatcttcttaattataaataatgggggatgaagataaaagaattacatatgaagattcagaaccatccacaggaatgaattacacgccctccatgcatcaagaagcacaggaggagacagttatgaagctcaaaggtatagatgcaaatgaaccaacagaaggaagtattcttttgaaaagcagtgaaaaaaagctacaagaaacaccaactgaagcaaatcacgtacaaagactgagacaaatgctggcttgccctccacatggtttactggacagggtcataacaaatgttaccatcattgttcttctgtgggctgtagtttggtcaattactggcagtgaatgtcttcctggaggaaacctatttggaattataatcctattctattgtgccatcattggtggtaaacttttggggcttattaagttacctacattgcctccactgccttctcttcttggcatgctgcttgcagggtttctcatcagaaatatcccagtcatcaacgataatgtgcagatcaagcacaagtggtcttcctctttgagaagcatagccctgtctatcattctggttcgtgctggccttggtctggattcaaaggccctgaagaagttaaagggcgtttgtgtaagactgtccatgggtccctgtattgtggaggcgtgcacatctgctcttcttgcccattacctgctgggtttaccatggcaatggggatttatactgggttttgttttaggtgctgtatctccagctgttgtggtgccttcaatgctccttttgcagggaggaggctatggtgttgagaagggtgtcccaaccttgctcatggcagctggcagcttcgatgacattctggccatcactggcttcaacacatgcttgggcatagccttttccacaggctctactgtctttaatgtcctcagaggagttttggaggtggtaattggtgtggcaactggatctgttcttggatttttcattcagtactttccaagccgtgaccaggacaaacttgtgtgtaagagaacattccttgtgttggggttgtctgtgctagctgtgttcagcagtgtgcattttggtttccctggatcaggaggactgtgcacgttggtcatggctttccttgcaggcatgggatggaccagcgaaaaggcagaggttgaaaagataattgcagttgcctgggacatttttcagccccttctttttggactaattggagcagaggtatctattgcatctctcagaccagaaactgtaggcctttgtgttgccaccgtaggcattgcagtattgatacgaattttgactacatttctgatggtgtgttttgctggttttaacttaaaagaaaagatatttatttcttttgcatggcttccaaaggccacagttcaggctgcaataggatctgtggctttggacacagcaaggtcacatggagagaaacaattagaggactatggaatggatgtgttgacagtggcatttttgtccatcctcatcacagccccaattggaagtctgcttattggtttactgggccccaggcttctgcagaaagttgaacatcaaaataaagatgaagaagttcaaggagagacttctgtgcaagtttagaggtgaaaagagagagtgctgaacataatgtttagaaagctgctacttttttcaagatgcatattgaaatatgtaatgtttaagcttaaaatgtaatagaaccaaaagtgtagctgtttctttaaacagcatttttagcccttgctctttccatgtgggtggtaatgattctatatccccaaaaaaaaaaaaaaaaaaaaa

SEQ ID NO: 31542 - DNA, 2577 bp, Homo Sapiens
ggcgtggctgtgggtcccggattagcggcggcatgggacggttgagttggcaggtggcggccgcggcggctgtgggcctggctctgactctggaggcgctgccttgggtgctgcgctggctgcggtccaggcggcggcggccgcggcgcgaggcgccgttcttcccgtctcaggtgacctgtaccgaggccctgctgcgggctccgggcgcggagctggccgagctccccgagggctgcccgtgcggcctgccccacggcgagagcgcgctaagccgcctgctgcgtgccctgctggccgcccgcgccagcctggatctctgcctgttcgccttctccagcccgcagctgggccacgccgtgcagttgctgcaccagcgtggggtgcgagtgcgggtcgtcaccgactgcgactacatggccctcaacggctcgcaaatcggtctgctgcgcaaggcagggatccaggtccggcacgatcaagacccaggctacatgcatcacaagtttgccatcgtggacaagagggtgctcatcactggctcgctcaactggaccacgcaagccatccagaacaacagggagaatgttctcatcacggaggacgacgagtacgtgcggctttttctggaagaatttgagcgcatctgggaacagtttaaccctacaaagtatacctttttcccaccaaagaaaagtcacggaagctgtgccccacctgtctccagagctggagggagattgctttcatggcacagaacttgcggcacctccagcgaaagccaaacctaaccaagaatggggctgagccctccctgcgggctgctgtgcgttctgagggagggagacctcggcactagaaaaaaatcgttaaactaaagtctcgtctattagaatactaaattgaactaaagaaggttaggaaagggaaatttctgttacttcgggtcagttatttcgggccagacctttttcttgctcctttgccaaaataacttcagtcacgacctgccacggggtgctttcatgagtgtggtccgtatcttggtttggaatcgaaacttctgctacagcacagaaaaggcacagtgcctcttccaggtcgatcccattcccttccctgattctagaaaagtccctcctgctttggctgatgtgggccctttcagcatctccctgagattttatccctctctccatgtggcacgactggggttggttggggcctacagtctccttgtccctcacagtctgcccctgtcagggctaggtcctcagagtaaggaaaggaaatggaagtcaggaggaagggaagatgtgagtgtgcggtgcgggtggcaaaagcagccttcggggcaaccccgtgagcgtcattgccaccaaaggctggctgttcccttgattccttgcataattgctctttaaaaccagtatgcacgccagtgccaagctcttcagcagcctgtccttgggtagtaagtgctgtggtctgtcaggactgatggccagcagctgtttctatgttgggcttttaactttttttattttatttatttatttatttatcttttttgagatggagtctcactctgtggcccaggctggagtgcagtggcgcaacctcggctcactgcatcctctgcctcctgggttcaaacgattgtcctgcctcagcctcccgagtagctgggattacaggtgcctgccacaacacctggctgattttttttttggtatttttagtagagacagggtttcaccatgttggttaggctggtctcaaactcctgacctcaagtgatccaccacttccgcctcccaaagtgctgggattacaggtgtgagccgccatgccaggccgggcttttaacttttaatgtcataatgttaaggtaattttgttgtgtgtttagaagtgaccttacctttaacacctgtggagttagtgcgtgcacattgctggctcagcgtaacccatcacgggaccggaggagaggagagcggggaagaggagagcagcttcaggccgtggtgtctcccatgtctgtgttcttatttgcagctcagggtttgcattcccaggtagaacaggtgtcgtacactgtgaaatgttccaggttatttgtttataatgtgtgtgtcatatacagatagctccgatgacatctgaagttgtgacttcatcatcttgtcatatttctgtatgatgagccccagggcccatcctgaggtctgctagccatgtgcttagtctcacctccccagcccacgctggcattaccacccagagacccttcagtgctgtgtgtttttcctttttagggttacttttgactcacagtgttaggcaagccagcttggaagttaacttttaaaaaaattcaattgaagctgtaaagtataatatatagattggaagtcaccagaaattgttttagtttgtgaattcccccagtgtatgttctgaaaagaaaatgggagagcttgtaaagcatctcctaaatgcgaagccgggtgaccctggacttctggcacatctgaataaacatgttcttattctggaaaaaaaaaaaaaaaa

SEQ ID NO: 31543 - DNA, 454 bp, Homo Sapiens
ctcgttgcacacgctaccaggagcaggggcatggagcacagtgagggggctcccggagacccagccggtactgtggtaccccaggagctgctggaagagatgctttggttttttcgtgtggaagatgcatctccctggaatcattccatccttgccctggcagctgtggtggtcattataagcatggtcctcctgggaagaagcatccaggcaagcagaaaagaaacgatgcagccaccagaaaaagaaactccagaagtcctgcatttggatgaggccaaggatcacaacagcctaaacaacctaagagaaactttgctctcagaaaagccaaacttggcccaggtggaacttgagttaaaagagagagatgtgctgtcagttttccttccggatgtaccagaaactgagagctagtgagggttcagagaagccccatcctaagccagacaca

SEQ ID NO: 31544 - DNA, 2481 bp, Homo Sapiens; identical to SEQ ID NO: 24840

SEQ ID NO: 31545 - DNA, 1750 bp, Homo Sapiens
ctgcccggcgccggcttccgggtggtgcgagcgagatggggcggagggccggtcttgcagagtagctgcggtgagtgggcgtgtgcgccgagcggtctggcccaagggctgggggccggccgagggtcttcgggagcaggccgcagggcgcggagagatcctgggatcgccgtccgccgctgctacccggcatgtcggcggaggcctcgggcccggctgccgccgcggccccgtccctggaagcccccaagccctcgggtctcgagcctggccccgccgcctacggtctcaagccgctgaccccgaacagcaaatacgtgaagctgaacgtgggcggctcgttgcactacaccacgctgcgcaccctcacgggacaggacaccatgctcaaagccatgttcagcggccgcgtggaggtgctgaccgatgccggaggttgggtgctgattgaccggagcggccgtcactttggtacaatcctcaattacctgcgggatgggtctgtgccactgccggagagtacgagagaactgggggagctgctgggcgaagcacgctactacctggtgcagggcctgattgaggactgccagctggcgctgcagcaaaaaagggagacgctgtccccgctgtgcctcatccccatggtgacatctccccgggaggagcagcagctcctggccagcacctccaagcccgtggtgaagctcctgcacaaccgcagtaacaacaagtactcctacaccagcacttcagatgacaacctacttaagaacatcgagctgttcgacaagctggccctgcgcttccacgggcggctactcttcctcaaggatgtcctgggggacgagatctgttgctggtctttctacgggcagggccgcaaaatcgccgaggtgtgctgcacctccattgtctatgctacggagaagaagcagaccaaggtggaatttccagaggcccggatcttcgaggagaccctgaacatcctcatctacgagactccccggggcccagacccagccctcctggaggccacagggggagcagctggagctggtggggctggccgcggggaggatgaagagaaccgagagcaccgtgtccgcaggatccatgtccggcgccatatcacccacgacgagcgtcctcatggccaacaaattgtcttcaaggactgacctctgaccctccccctgccttcctcttgccttgggacccagtccctctctctttccctccccttcccagacttttgccccggctctgctggccaagtcgtgggtcctcctctgtcccttcattgcatggcacagctcactttggcccttctccacccatcccaaccccattgctaacaacatggtacattccggccccaccactcagagccttccgaagccaacacttgtccccaccctggccctgcgtccttccctctccagctggttaagagggatttagaattccctttctctttttttagtgcatcgtccatgccaaagtgtgcggcccttcctgacatcaccacagtctgagcagcctcccgcgtcctgcagggtagtccgccccctcctccccaccatcctccctacctccttaactttgtactagactggcctgggcctgcccagctcagcgttatcagtctgtttcatattatttattattttaattttctattaaattattgaaataaagttaagttgagaaaaaaaaaaaaaaaaaaaaaagaaaaaaaaaaaaaaaa

SEQ ID NO: 31546 - DNA, 1185 bp, Homo Sapiens
ggcctccaccgccttccccggctgcccggcagcctcccctcgctcgctctcctcttcctctagggccccagcgcagctcgggagcccgcgcaccgaggcgctaggggcaccgcgcactagagggacacccgccgcgcctggacagcccccggcgggcgcccccctcgcacctcctgccccgcgcgggccgcgctcccctcccccgcgcctgtgtccccagggcgcagggccgcgcgtccagccccagacccgccggggtccctggggacgcgccagcccggcagtggctcgacgatggaggagccgcagcgcgcccgctcgcacacagtcaccaccaccgccagctccttcgcagagaacttctccaccagcagcagcagcttcgcctacgaccgggagttcctccgcaccctgcccggcttcctcatcgtggccgagatcgttctggggctgctggtatggacgcttattgctggaactgagtacttccgggtccccgcatttggctgggtcatgtttgtagctgtattttactgggtcctcaccgtcttcttcctcattatctacataacaatgacctacaccaggattccccaggtgccctggacaacagtgggcctgtgctttaacggcagtgccttcgtcttgtacctctctgccgctgttgtagatgcatcttccgtctcccctgagagggacagtcacaacttcaacagctgggcggcctcatcgttctttgccttcctggtcaccatctgctacgctggaaatacatatttcagttttatagcatggagatccaggaccatacagtgatttaccattttgataattaaaaggaaaaaaaaaggaagactctcactgtaaaaacagctgtaggtataatgtatattcccagagaattgtatttaactaattaatgttttttatattcttaaatttgctcacaaattgtggtttgttacaattaaactggatacttatttgcaaagtgttgtagcttataatgaactcttaagtatcttattaatgtattaatgtcttcatagatcatattttcttagacaatgtttaaatagataaattgctaatattgagaatgtgtcaagtttgtaaacctaacttttaagatgccagattcttttttgattaaatgttgcaaaatcccaaaaaaaaaaaaaaaaa

SEQ ID NO: 31547 - DNA, 3871 bp, Homo Sapiens
cgtcggtgcagacctggagacgggcatgggggggctgcggctgctggctgtggccctcacgtgctgctggtggccgcagggcagccagggtaagaccctgcggggcagcttcagcagcaccgcggcccaggacgcccagggccagcgcatcggccacttcgagttccatggtgaccatgctcttctgtgtgtcagaatcaacaacatagcagtagctgttggaaaagaagctaaactctacctgttccaagcccaggaatggctaaagctacagcaaagcagtcatggttatagctgtagtgaaaaattatccaaagctcagttgacaatgaccatgaaccagaccgaacataatctgacagtgtcccagattccgtctccacaaacgtggcatgtgttttatgcagacaagtatacatgccaagatgacaaggagaattctcaggtggaagatatcccatttgaaatggtgttactaaacccagatgccgaagggaatccatttgatcattttagtgctggagaatctgggttacatgagttctttttcctcctagtcctagtgtactttgtgattgcttgcatttatgctcaatcattgtggcaggctattaagaaaggcggacccatgcacatgattttaaaggttctgacaactgcattgctgttacaagctggttcagctttagctaattacattcatttctccagttactccaaagatggaataggggtaccatttatgggaagtttggcagaattttttgacatcgcttcccaaattcagatgttatacttacttttgagtctatgcatgggttggacaatagtcagaatgaagaagtctcaaagcagacctctccagtgggattctacgcctgcatccactggcattgcagtattcattgtcatgacacagagtgttttgctactttgggaacagtttgaagatatcagtcatcatagctaccattcacaccacaacttagcagggatcctcctaattgttctaagaatttgcctagcattgtcattaggctgtggactctatcagatcatcacagtggagagaagtacactcaaaagggagttctacatcacatttgccaaaggctgtatcttgtggtttttatgccatccagttcttgcatgcatttctgtcatttttagcgactaccaaagagacaaggttattacaataggtgttatcctttgccagtctgtttccatggttattctctacagactctttctgtctcacagtctatactgggaagtttcttcactttcttcagtaacactaccactgaccatatcatctggacacaaaagtcgccctcatttctgatacttgatttttgttgagaggaaaagtgaattggttaaaagagtgcaataaggatccaaatacagtgacttttttttcatacatttagtatgaaaacttgaacagcgaaagcagagcatgttatttatataactgcatttaagcagtaccaagactgaaaaaaaaggtaataaatgaaatgttttgaaatatacttaaacaacaaactttgaagaaagtgttgttataaaattattgaagcgatttctatgtggaaataaatgtgaaaaataactatgatattttggtaaaatattcaccacttataatgcctcatcttaatagctaactcaggtttaatagtcttataaaaagtaatcagttaaatgattacttgcttataaatatctaaactagtccagttatgaaatcagtgtaatacattgatttttaaaactgctgctttttatgctttaaggaaaatgtatttcatatttgagtttaaaggaattgaaattacttcaggaaatgaatataaaataggttcacagttaaatgaataagcttttgtttatttgtgggtggagttattctccaattttttctgccatttttggctctagttcaggttttagcttgattagcaaaggtttttgacaaacagtttatgaaaaaataaaacttaaatacattacacgggttgtaaggacaaaggattttaaaatctgagcacttaggtgaagggacaagcaggtttatgtgtttaaacagaaagaagggaaaaggtactatgtgatatggtactgaaattttgatcccaatagaattcatttctcttacgttgaatccccaatcataattaagccgtatacacagattaaattaacagaagcatttcacataaatgttggtttcagtcatcaactacccatgaattcctgcccaaggatacttaatcaggattaaattttctatgaataattgaaaaacaaaacactcactggatttgttataatccgtgttggcactggattctaagtagttgccatcttgaatcctttgtaataaagccatacttttgtgtgtgtgtgtgatgccccagtattgagtatgctagctaaaaaatatcaagtgcctgattaaagaattgctaaatggttgtcaatactcgctgtataaaatgagtattcccattaatagtcactgattggaaattattctgttgctgtttgtcaagctgttcaggccttttcctttttacttctggcttattttaaaaatattttttatctatttactgtgtgtttaagcaagcaacagtgcactgatctggtagttaaattttttaattaaatagttaaaataatgtagtgcaacttaaaaatatctatggctttgtttttgtttttcttttgtacctagtctcattggaaatgactagtattctgcctcattttcagggcagaatatgtgtttgtgacccaaaatgacaaagttaccaagttcaacctgctcattaaatcatctctctattagttctttgtaaatcacttagtacattagagctacaggttaagactagaaagtctgagttatgttttaggtatacatgatcgtctgagtggtcataaccttttcttttatcatgtctcgctaataaccccagctattgtctgttgtgttcagctgagatgcaaaaaagaaattaagcaaaaaagaaaaagatgaagacttttcatgaattttgtgaacttgccaaaaggggaagggaaaaatctttgtgttacttcactcaaagaacataagtaactgcaattaacatatatgaaatttattactctgcttgcatttatgaaactaaccagttttttaaactttaattcttaaatttatggttggaaatgctgataatttattttgttatttaagagctgttgttaagtggaggaaagtagttgttaataaatgtataaaactgttcttgactagtaatcagggacaaaatttatagttcataagtcatgacacagtattcgctctttttctgaatgtttacatagagattcatcactgcagattacagaaagttaagtgtatactacaaactctaattaaagataaaaatcttttctacttttctttgtcagataatgcttttttatgtgtttttacattttttgaaagaagataaatggttcatccagagctttattaagaagcatttcttttcttcccttaaaaaatagatgcttatttttattgacatgtgtataataagatgggtgcctactgtgatgcattttaccaggcattttaccttcattattactcatctctattgtgataaccaggctcccatttaactgagtataagagagaataaatgatttctctaaggtcatcaaactatttagtttttccactttaccttcatgatttaaggaacatgtattagctgtgttttagtgagaatgaattgctatccatcataatttttgctgttgatttgaacattaaaactggaattgtgctaaaatcagaaaa

SEQ ID NO: 31548 - DNA, 5334 bp, Homo Sapiens
cccacgccgcgccttccggttggtccttgaggcgacgggtgaggcacagctgagcgccaaagccacaggctggggcgctaacgcccccgctcagcgctctgcgctccagacagctgcgagctggagtaggaaggttcaggcggtggcggagagtgcgctggaggctggagggccaggaggcgggaagcttcccgcacgggggcgctgtcacctgcctgtgggaggagccagagagggacctggctctgctgctctgaagcaccggagtcgggagaacccatccagacatgaagagcgccaaaggtattgagaacttggcttttgtcccctccagcccagacatcctgcgccgcttgtctgcgtcgccctcccaaatcgaagtctctgccttgtcctctgacccccaaagagagaattctcagccacaggagcttcagaagccccaggagccccagaagtcaccagagccatctctgccttcagcccctcccaatgtctccgaagagaagctccggtcactgtcgctgtccgagtttgaggaggggtcttacggctggaggaacttccatcctcaatgtctccagcgctgcaacacacctggaggctttctgcttcactactgcctcttggccgtcacgcaaggtattgtagttaatggcctagtaaatattagcatttccactgttgagaagcgttatgaaatgaagagttccctgactggcctgatttcatcaagctacgatatttcattctgtttgttgtctttatttgtatcattctttggtgaaagaggacataagccgagatggcttgcatttgcagcctttatgattggactgggagcacttgtattctcattgccacaatttttcagtggagaatataaattggggtctctttttgaagacacttgtgtaacaacaaggaatagcaccagttgtacatcttcaacttcttcactttctaactacttgtatgtcttcatcttgggacaactattgctgggggcaggaggaactcctctttatactctgggaacagcctttcttgatgattctgtgcccacacacaagtcttctctctatataggaaccggttatgctatgtcaatcttaggccctgctattggctatgtattgggaggacaactgctaaccatatacattgatgttgctatgggagaaagcactgatgtcactgaggatgatccgcgatggttgggagcttggtggattgggtttcttctatcatggatctttgcttggtctttaataatacctttttcttgctttccaaaacatttaccaggtacagcagaaattcaagctggaaaaacttcccaggctcatcagagtaatagtaatgcagatgtgaaatttggaaaaagtattaaagattttccagctgctctaaagaatttgatgaagaatgctgtctttatgtgtttagttctatcaacttcttcagaagccttaattactactggatttgctacatttttacctaaatttatagaaaatcaattcggattgacatccagcttcgcagctactcttggaggggctgttttaattcctggagctgctctcggtcaaattttaggtggcttccttgtttcaaaattcagaatgacatgtaaaaacacaatgaagtttgcactgttcacatctggagttgcacttacgctgagttttgtatttatgtatgccaaatgtgaaaatgagccatttgctggtgtatctgaatcatataatgggactggagaattgggaaacttgatagccccttgtaatgccaattgtaactgttcgcgatcatattattatcctgtctgtggagatggagtccaatatttttctccctgctttgcaggctgttcaaacccagttgcacacaggaagccaaaggtatattacaactgttcctgtattgaaaggaaaacagaaataacatccactgcagaaacttttggttttgaagctaaagctggaaaatgtgaaactcattgtgcgaaactgcccatattcctttgcattttctttattgtaattatttttacctttatggccggtactcctataactgtgtctatcctaaggtgtgttaatcacagacaacggtccctagccttgggaatacaatttatggtccttcgattattagggacaattcctggaccaattatatttggtttcacaatagacagcacatgtattctttgggatataaatgattgtggaattaaaggagcttgctggatttatgataacatcaagatggcccatatgctagtagccataagtgttacttgtaaagttatcaccatgttcttcaatggatttgcaatctttttgtataaaccacctccatcagccacagatgtgtcatttcataaagagaatgcagttgtgactaatgttttagcagaacaggatctcaacaaaatagtaaaagaagggtgaaatgggaaaagagaagactgttttacacctggaaaatttacctcgatttttaagaacacacattgccatggcaggattatctatccaatatggacaatcatatttacaaaattgatgtttttataatcaaatgtatttttttacttatgtagtttttgttttatgcaagaaacagacctgtgccttcaaagcccacgtaaagcctcaaaacacagcacacacacacacgagcacacacacacacacacacacgaacacacacacacacacacacacgcacacatacacacttatttcctattcccattgtctaggtatgaaatcctcaagcaataacaagaaaaaaggcccacaattagaaaaatttacatttaaaaaaaatgttgtttctatccccattacaacttgtttaattttaattttcattgtcaatattttgagcttagaacatttatggtataaaaatttaaactaatcaaagttgtgtgatgatttccgggaattattattgaaagcctatgaatttaaaaccaggtttaccatgtaatttgtttttaaatttatgtatactagcctggcctttctccaagcaaattattgaactattagaatatgttagttatcatccttgtgtcttagtatatagtgaatacagaaacatcagcattgtatacacatattttcactttaactcaagaattccaggaggtaatttgttgatattacaatttttaacacatttatgattctgtgataatattattcaattgcatatatttcagaggaaagtaccagtcagtaaagaaaaatgccaactaaacatgaaactattgatcaatacttatatacctttaatttttcctatttgaaaagccaaccacttaacacattactcatagcacctaagacagtgccttgcatagtgtagtcatctattattattgtttaattagaatattaaaccctaccctttaactcagcagtccccaaccttttttgcatcagggaccatttttgtggaagacaatttttccatgggggaagaaggtatggttttgagatgaaactgctccacctcagaccatcaggcattagttagattctcataaggagagtgcaacctagatcccttgcatgtgcagttcccaatggagtgtgcactcctatgagaatctaatgccactactgatctaacaagaggtggagctcaggcagtaatgctcactcacctgcctctcagctcaccaactgtgtggcccgattcctaacaggccacacacagcccagggctggggacccctgctttaactgatgcattgatttgataaagtattttacaagcctgataatgttataaccctgtttattcaggtcagatttatgccaactttgctgagaatatggagggtatagatgagtgaacatcaacaaacataacttctaccatggttaagaattttacttaggaaaagtattgaagttcaaatccagatagtattacatttgaaattgttataagggttattaatttaataaaattcatcatcaggtttcccctataagctttctcctaggttaattttccacaagcattgttttatatacactgtaatcaggataacacaagcttagtgttagatcttgtaggaaaccaagattagaaacattagaaatttgcagaatttaagaaattatgttttgtggtaatctatggccaacgatgttagaacctagcgcaattgtaaagtgaaattcaaggagaaggaatgaggagttagggaagcagcatacttgaatattagagaaggagaggagctgtgggtcaggaatcagagagacctgctaaaaccagacagatataaacaccaaagacggaagccaaataggtagccaaaaatccagatatttgagaagcaggaaatttatagcaaccaaagaaatagggcaagagaggcaggtgaacacacatgatacctcaattgacaatcttcctcccaccaagccagacacgttgtaaatgctgcttcctattggagcccagaaaaaaggaaaaggaaagtttaggctttctttgtcctttgtgtggaagcagggaattggattgaagactttcatagttgtaacataaaggcaaatcctgaggaactcactgatggagatgtgaaatggcagtaaggaagaaaacagaataactgaacaaatatattagtctagggccacttaatttagaggaagaaaaaaaatcaacccatccatagaaatagtttgataaacaggtcactaaatcattggcgtttataaagattcttagctatcaagggctgcattgtattttatatactcagttttataaggtgatactttttaaataagcgctttaatgaaaatggttagactgaaaataattttggtccttaaaaggagtcaggagcttttatatataaggtacatattttaaaagaatacctcctttataacagggttttacagacactaccataatttataatcattattttttacttttgggttcacctagatcatatgagttgatgtgatacttctagaacaaaattattcatagtgcgttttttgtaatttatgattgttaagtaagcttgacttataaattgacattgtaattgtgtacataattggatatatgtgttaaaatttaacatttagatttacttaattgtagaaaatacaaatgtaaaacttacacatggaaagaactgtatgcagttgactttactatgtaaattggagggaaacaaagttttagatccattttctttcaaaattttctttattgtaaagtatgcaaaatatatattcataccatttattaaatcagaatgtttatacaaaa

SEQ ID NO: 31549 - DNA, 5659 bp, Homo Sapiens
ggcagcggcggaagcggcgagggcggcgggcgtccggctctgaggtggtggaggcggcggaggcggcggcggaggcggcggcggctcgggactgggctcggctggaagcagcgagggtcagagcgccgcagcaagcgccgatctcccggctcgaccatccgcctgccgcccggacgcctgggccgcggagtttgtgtcccggctcggaccccggcgcccagcccggagccgtaaccttgaggcggcggcggcggggccgggccgggccgggctggggggcggtggcgctggatccgcggctgcccgatcgttggcgggagatgtcgaaccccgggacacgcaggaacggctccagcatcaagatccgtctgacagtgttatgtgccaagaaccttgcaaagaaagacttcttcaggctccctgacccttttgcaaagattgtcgtggatgggtctgggcagtgccactcaaccgacactgtgaaaaacacattggacccaaagtggaaccagcactatgatctatatgttgggaaaacggattcgataaccattagcgtgtggaaccataagaaaattcacaagaaacagggagctggcttcctgggctgtgtgcggctgctctccaatgccatcagcagattaaaagataccggataccagcgtttggatctatgcaaactaaacccctcagatactgatgcagttcgtggccagatagtggtcagtttacagacacgagacagaataggaaccggcggctcggtggtggactgcagaggactgttagaaaatgaaggaacggtgtatgaagactccgggcctgggaggccgctcagctgcttcatggaggaaccagccccttacacagatagcaccggtgctgctgctggaggagggaattgcaggttcgtggagtccccaagtcaagatcaaagacttcaggcacagcggcttcgaaaccctgatgtgcgaggttcactacagacgccccagaaccgaccacacggccaccagtccccggaactgcccgaaggctacgaacaaagaacaacagtccagggccaagtttactttttgcatacacagactggagttagcacgtggcacgaccccaggataccaagagaccttaacagtgtgaactgtgatgaacttggaccactgccgccaggctgggaagtcagaagtacagtttctgggaggatatattttgtagatcataataaccgaacaacccagtttacagacccaaggttacaccacatcatgaatcaccagtgccaactcaaggagcccagccagccgctgccactgcccagtgagggctctctggaggacgaggagcttcctgcccagagatacgaaagagatctagtccagaagctgaaagtcctcagacacgaactgtcgcttcagcagccccaagctggtcattgccgcatcgaagtgtccagagaagaaatctttgaggagtcttaccgccagataatgaagatgcgaccgaaagacttgaaaaaacggctgatggtgaaattccgtggggaagaaggtttggattacggtggtgtggccagggagtggctttacttgctgtgccatgaaatgctgaatccttattacgggctcttccagtattctacggacaatatttacatgttgcaaataaatccggattcttcaatcaaccccgaccacttgtcttatttccactttgtggggcggatcatggggctggctgtgttccatggacactacatcaacgggggcttcacagtgcccttctacaagcagctgctggggaagcccatccagctctcagatctggaatctgtggacccagagctgcataagagcttggtgtggatcctagagaacgacatcacgcctgtactggaccacaccttctgcgtggaacacaacgccttcgggcggatcctgcagcatgaactgaaacccaatggcagaaatgtgccagtcacagaggagaataagaaagaatacgtccggttgtatgtaaactggaggtttatgagaggaatcgaagcccagttcttagctctgcagaaggggttcaatgagctcatccctcaacatctgctgaagccttttgaccagaaggaactggagctgatcataggcggcctggataaaatagacttgaacgactggaagtcgaacacgcggctgaagcactgtgtggccgacagcaacatcgtgcggtggttctggcaagcggtggagacgttcgatgaagaaaggagggccaggctcctgcagtttgtgactgggtccacgcgagtcccgctccaaggcttcaaggctttgcaaggttctacaggcgcggcagggccccggctgttcaccatccacctgatagacgcgaacacagacaaccttccgaaggcccatacctgctttaaccggatcgacattccaccatatgagtcctatgagaagctctacgagaagctgctgacagccgtggaggagacctgcgggtttgctgtggagtgaaaagcaaccaaaggcaacagagtctagctcatggccaccagaccaaaagcatccagcttctgtgcacctcctgcaaagctggcagaggccctggaattccagatcacctgaggggaaagggttgtctctctcctttctgttgggggagggggatgggggacttttgttggtggctcccacccatatatccctcctttaccatagtactcccacccacttccatcacccatccaataaaatgcagccaggtttagcctttggctttggtcacacaggatattctgctgtgttgcaacccatgtggtgataaggctcacagccctgagctctttacgggagcatcaactcacagttaggggactgggcgtggctgattgagggtttggaactggtggctatgccagctattccatctcaaaacagccttgaggccccttttcaatttgagcagctgctagatatcttatcagagctcagattccagatttcacatcccagcagccggttctgggtagcagatcaatttccaactggaaaataactatataatgtatgcttattggaattctgccacagcaggaagcttgagtcaaaatgtgtttcccctttgaaaggagaaggaattggagcagcttttcctggaggcccaggatatttcttttctgggtatcttggctgaaaattttgttttacatagagaaaaacgatcttttaagggtcccttttgctgcattatctgtccagtttgacttttttttcagtgaaaacaccatgtcatggagtgtaggaaagagcagaccaaaatcagccctagagccaaccagtcagtcccaaagctgtgacctctgtgccactgttgtccatagaagagcatcgactgtgtcacttaaaatattagtaaaccatgatgcagcaactgctaagagctaaactaacaaaattgtgtcatcatagctgctggcttggtgtgaactcgcttaaaagcaatggtgaaaggataacctcgatgatgtaaatccacccaaagatactgttctacaaaaagtagggtgtggacgcaaacctgtgacagcagagggggacgacttcacactcactgcctcatgtggcccctttcccagtggcagctggtgacactaacgattgctactcggttcacttgcccagatgtcttcatatgatgagcaaggccagaagcaaggctagattcgaagtttctgacaccatttccagtttgcacaaaagtcagtattttatcttaaagtggcttgatttccaatagctgaacttgggcagaaaacagcaggccaatgttcctatgtggtttctttgttgttgtttttgtttggggtgggggcaagtacagggtaattcatgagcaagacatttcactgctgtcgaagtctctgggatcccgctgtgggtctgagatggcctgggaaggaccttgtggacaatggttttatctgttctttttgtcactgttaatttctgggctgctgaggttctagaatagaagggctgccaaatgaggtttgctgcaggaggaaagtttaatcccccattccaaaagtccaggccaaatggtgggcttagcctctttgaaaagttctgccttgcccccacaggtgggcacatcctgtgtctcattcaccatgatgcttcctgagggtgttctagaagcccgttccccagtggctgtatccagcctttccttgcatcatcttcctcttgaaggtgaggaagtgaaaactacagacctcccccggacagcccactctctatcacgagcctaacccgcgggaggcggaagagacatccattcgagaactgaagcggcctccgggatgaggtcagaggccccacctgattttcctggtggtggtatccaaaatcttcagtaactaggaaggaaaccagggtctcatggtttaaaagactttgaagcaggaatgttgcatttgacgcctttaaaactacctttttgctgttgggaggagtcgggggcgagccttagcagctgcaccgccatccccatgctggttggtgctgccctgcctctcgtgccgggtgttgcttcagcccagagccagagggctgggtcccgggtcctccacaggtgaccccggtggacacacgcgttcccatcctggcctccgtctctgcttttccacttctacctgcgtgtgggtttgccgccttgtcatcggttgtgtgagtgtcgcagacctttccagagctccggttcactctttccaaacaggcctccctgtcggtggcactgcactcctagaaccttcagtttctacgatggtttgtttggtccttttgaaccaccccaaagaactcaacatggcaaagcaaatggtaaaagcttcccgactgttctactttgggtccgcgcgaagcccactcacgtgtgatctgtgttgcccctctcggtggtcccaggcgatccagccatgccccctgcccctctgcccagatgcttcaggggcccggcttttcaggcttgccctcaccagcggccgtcagccgacactcagggatgtagctaacaccactccgccagtgctttcagtaggaagagctgaggctgcctgggaggcccggggcgaccggaaaagggctctctcaagttctgaaaagagaatctgccaccagatcgaatttcgacccctgagcttgttcggacgtatggtccaaattcagattaaggtggtcacccaacccgagatgtcaggaaaggccttctgcagagaaaatgtccccccacccgccatctgcagccaggtgtgtgccacacggcagccttcccgaaacatagtatggattttaaaaatgtgtttatttttgtttctcaaccactttataacgtattttttaatttattttgtaatgtcttgttttgaagtattgctgctatccttgttatccttcccactgtttttatcactgatttattttgtgaaagttgtacactaatgttctatgtcaaaatcaaaagtatttaatgaaatactagttctatttaatgtggttatggaaccagctggaaacacaaaacaaacagtgattgtacagcaggctgggcccaggaggtcaggttcattttgttacatatgcaataaactcacgacttt

SEQ ID NO: 31550 - DNA, 4208 bp, Homo Sapiens
gagatgcgtgacgagcgaagcgcgtgacggaggagcggttggccaacgcagtggcggcagtcggtgtaaacaaggcctcgcgccgctgcgggtcctgcgaccgctcctggctggtgggtggtctcgcgtggggcggttaccgccggcttcagtgggaggtgcttctcggcttcctccccctcatggcgtacacacccccggcgcaccacgtgggcgtgaggcgaggaaggaggggtgttaggccaaattctattttcattggctgtcactgctgccggcctttgtaagggggcgctctgattggtcgataaggtgggggcgtcgagggtctttgagtcctaaggcttctaattggttagatgagataagctagtgaagcgctttcttccgagagggatttcgattggtcggtcagagaggttacctggaaatccaacaccgcccaacacccctcccgctccccagtccggggacttcgataggattggagaaggtttgtgttcccgacgccttggtagttggcataggctaaagaaaagggatctcagccccgaggaagggtcaccctcctagagatagctactaccccgtctcaggagaccctggtatttctagagcacgctttgctttcaccaaacccaaggaggtgacaggaggagcccccgcacaggacctaagaatgctgtgaccagaagatgggatcgcggaacagcagcagtgcaggatccgggtccggagacccctccgagggcttgccccgaagaggggctggcctgcgtcggagtgaggaagaggaagaagaggatgaagatgtggatctggcccaggccctcttggactcagaggaagagaatgacagagcttgggatggtcgtcttggggatcgatacaacccacctgtggatgctacccctgacacccgggagctggaattcaatgagatcaagacacaagtggaactggccacagggcagctggggcttaggcgggccgcccagaagcacagctttcctcgaatgttgcaccagagagaacggggcctctgccatcggggaagcttctcccttggagaacagtctcgagtgatatctcacttcttgcccaatgatctgggcttcactgatagctactctcagaaggctttctgtggcatctacagcaaagatggtcaaatattcatgtctgcttgccaagaccagacaatccgactctatgactgccgatatggccgtttccgtaaattcaagagcatcaaggcccgcgacgtaggctggagcgtcttggatgtggccttcacccctgatgggaaccacttcctctactctagctggtctgattacattcatatctgcaatatctatggtgagggagatacacacactgccctggatctcaggccagatgagcgtcgctttgctgtcttctccattgctgtctcctcagatggacgagaagtactaggaggggccaatgatggctgcctgtatgtctttgaccgagaacagaaccggcgcacccttcagattgagtcccatgaggatgatgtgaatgcagtggcctttgctgatataagctcccaaatcctgttctctgggggagatgatgccatctgcaaagtgtgggatcgacgcaccatgcgggaggatgaccccaagcctgtgggtgcactggctggacaccaggatggcatcaccttcattgacagcaagggtgatgcccggtatctgatctccaactctaaagaccagaccatcaaactctgggatatccgacgcttttccagccgggaaggcatggaagcttcacgccaggctgccacacagcaaaactgggactatcggtggcagcaagtgcccaaaaaagcctggcggaagctgaagctcccaggggacagctccttgatgacctaccggggccacggagtgctgcacaccctcatccgctgccggttctcccccattcatagcactggccagcagttcatctacagtggctgctccactggcaaagtggttgtgtacgaccttctaagtggccacattgtgaagaagctgaccaaccacaaggcctgtgtgcgtgacgtcagttggcacccctttgaagagaagattgtcagcagttcgtgggacgggaacctgcgtctgtggcagtaccgccaggctgagtacttccaggatgacatgccagaatctgaggaatgtgccagcgcccctgccccagtgccccaatcctctacacccttttcctcaccccagtagatccaacctccagccccatatagggtgaacctcttgataagctctctgcctcctcctccctttctcccttgtggggaatgtttggaggaatcactggcatttgatggggaataacataagcctgggctctgagcctcagctgagccctggaagattctccccatggggcagagtggtctccttacgtgctcacacccagtcagcttgggtccctatctctggccagagtttggcaggactgccattatctggggtgtggcctctgccagcaagagaagtgtcctgggtgtttttaatcatgtttgaatgttaggggttggatcctagagtagatgcctgaggccacatctgaacagacctgtcagccaggcctgccaggtcttcacgttgaggattcaactggccaatcacaggacaggtgtcctggcctttcttcctgaggtctctaggggaggggcatgggtaagggtgtttcctcagcaccctcctggggtggggattatgtctgctgtcatgtctgggtctttagggtaggacaggctgtggtatgagaggcaggagtctccacaaggcttcatgtggccccttatagggcaggccctgccctctgggaaggtcccttcatgctggaggcacacagctttaaggaagtaggttgaagtaggactccttcgtcctctcactggctttggctccctcaataaactgtgtgggaacctggctcagtgtctgtctctctctctcactctctgtttttcctatctgaggtctttcatctcctcacttcaggaaaacacagttcagcaaagtcttcagatgcgatcctgtgtaggagaaaatacccttctggtgccccatgaaaaagggaaataccaaaaccatttgttcactgagccttgcaataggtgctcccttaccaatttcagaagcttccctgcaagtagatatcgagagagcacactttccattagagcctggtaatacccatatcacctctgctctgaggctgggcctgcagctgtgtagtctttggaagaggtagcccctgaacgcagagcctaagagaagcaagtcggccctgacgccaggccccagtgggcgcctcacactcagaacctcataccccagagcaaaccgatggtcagggagagggctagagctcacacccagctcggaatagatcttccctgatgacatttcatgccctctaaggcagtttttaaatgaaggtacacacatccaggggtgttcacaggctttcacagcaagggtacctatttcatggcaaaataggcagttttaaaagaataaacaagctaggtgtggtggctcatgcctgtaatcctagcactttgggaagccaaagctgatggatcgcttgagcccaggagtttgagaccagcctgggcaacatggcaaaaccccatctctacaaaaaatacaaaaagtaggccgggcacggtggttcacacctgtaatcccggcattttgggaggccgagataggtggatcacctgaagtcaggtgtttgagaccagcctggccaacatggtggaacccaatctctactaaaaatacaaaaaaactagccggatatggtggcgggtgcctgtaatctcagctacttgagaggctgaggcaggagaatcgcttgaacttgggagcagaggtgagctgagtgcagtgagccaagaccatgccattacactcaagcttgggcaacgagagcaaaactctgtctcaaaaaaaaaattagccagatgtggtgacgcatgcctgtagtcctagctactcaggaggctgaggtgggaggatcacctaaggccaggaggtcaaggctgcggtgagccgtgattgtgccaatgtactccagcctaggtgacagagtgagaccctgtctcaaaaataaataataaataaataaatgttcagaaaaaaaaaaaaaaaaaa

SEQ ID NO: 31551 - DNA, 4082 bp, Homo Sapiens
ggcggtcccctgttctccccgctcaggtgcggcgctgtggcaggaagccaccccctcggtcggccggtgcgcggggctgttgcgccatccgctccggctttcgtaaccgcaccctgggacggcccagagacgctccagcgcgagttcctcaaatgttttcctgcgttgccaggaccgtccgccgctctgagtcatgtgcgagtgggaagtcgcactgacactgagccgggccagagggagaggagccgagcgcggcgcggggccgagggactcgcagtgtgtgtagagagccgggctcctgcggatgggggctgcccccggggcctgagcccgcctgcccgcccaccgccccgccccgcccctgccacccctgccgcccggttcccattagcctgtccgcctctgcgggaccatggagtggtagccgaggaggaagcatgctggccgtcggctgcgcgctgctggctgccctgctggccgcgccgggagcggcgctggccccaaggcgctgccctgcgcaggaggtggcgagaggcgtgctgaccagtctgccaggagacagcgtgactctgacctgcccgggggtagagccggaagacaatgccactgttcactgggtgctcaggaagccggctgcaggctcccaccccagcagatgggctggcatgggaaggaggctgctgctgaggtcggtgcagctccacgactctggaaactattcatgctaccgggccggccgcccagctgggactgtgcacttgctggtggatgttccccccgaggagccccagctctcctgcttccggaagagccccctcagcaatgttgtttgtgagtggggtcctcggagcaccccatccctgacgacaaaggctgtgctcttggtgaggaagtttcagaacagtccggccgaagacttccaggagccgtgccagtattcccaggagtcccagaagttctcctgccagttagcagtcccggagggagacagctctttctacatagtgtccatgtgcgtcgccagtagtgtcgggagcaagttcagcaaaactcaaacctttcagggttgtggaatcttgcagcctgatccgcctgccaacatcacagtcactgccgtggccagaaacccccgctggctcagtgtcacctggcaagacccccactcctggaactcatctttctacagactacggtttgagctcagatatcgggctgaacggtcaaagacattcacaacatggatggtcaaggacctccagcatcactgtgtcatccacgacgcctggagcggcctgaggcacgtggtgcagcttcgtgcccaggaggagttcgggcaaggcgagtggagcgagtggagcccggaggccatgggcacgccttggacagaatccaggagtcctccagctgagaacgaggtgtccacccccatgcaggcacttactactaataaagacgatgataatattctcttcagagattctgcaaatgcgacaagcctcccaggttcaagaagacgtggaagctgcgggctctgaaggaaggcaagacaagcatgcatccgccgtactctttggggcagctggtcccggagaggcctcgacccaccccagtgcttgttcctctcatctccccaccggtgtcccccagcagcctggggtctgacaatacctcgagccacaaccgaccagatgccagggacccacggagcccttatgacatcagcaatacagactacttcttccccagatagctggctgggtggcaccagcagcctggaccctgtggatgataaaacacaaacgggctcagcaaaagatgcttctcactgccatgccagcttatctcaggggtgtgcggcctttggcttcacggaagagccttgcggaaggttctacgccaggggaaaatcagcctgctccagctgttcagctggttgaggtttcaaacctccctttccaaatgcccagcttaaaggggctagagtgaacttgggccactgtgaagagaaccatatcaagactctttggacactcacacggacactcaaaagctgggcaggttggtgggggcctcggtgtggagaagcggctggcagcccacccctcaacacctctgcacaagctgcaccctcaggcaggtgggatggatttccagccaaagcctcctccagccgccatgctcctggcccactgcatcgtttcatcttccaactcaaactcttaaaacccaagtgccttagcaaattctgtttttctaggcctggggacggcttttacttaaaccgccaaggctgggggaagaagctctctcctccctttcttccctacagttgaaaaacagctgagggtgagtgggtgaataatacagtatctcagggcctggtcgttttcaacagaattataattagttcctcattagcattttgctaaatgtgaatgatgatcctaggcatttgctgaatacagaggcaactgcattggctttgggttgcaggacctcaggtgagaagcagaggaaggagaggagaggggcacagggtctctaccatcccctgtagagtgggagctgagtgggggatcacagcctctgaaaaccaatgttctctcttctccacctcccacaaaggagagctagcagcagggagggcttctgccatttctgagatcaaaacggttttactgcagctttgtttgttgtcagctgaacctgggtaactagggaagataatattaaggaagacaatgtgaaaagaaaaatgagcctggcaagaatgtgtttaaacttggtttttaaaaaactgctgactgttttctcttgagagggtggaatatccaatattcgctgtgtcagcatagaagtaacttacttaggtgtgggggaagcaccataactttgtttagcccaaaaccaagtcaagtgaaaaaggaggaagagaaaaaatattttcctgccaggcatggtggcccacgcacttcgggaggtcgaggcaggaggatcacttgagtccagaagtttgagatcagcctgggcaatgtgataaaaccccatctctacaaaaagcataaaaattagccaagtgtggtagagtgtgcctgaagtcccagatacttggggggctgaggtgggaggatctcttgagcctgggaggtcaaggctgcagtgagccgagattgcaccactgcactccagcctgggtgacagagcaagtgagaccctgtctcaaaaaaagaaaaagaaaaagaaaaaatattttccctattagagaagagattgtggtttcattctgtattttgtttttgtcttaaaaagtggaaaaatagcctgcctcttctctactctagggaaaaaccagcgtgtgactactcccccaggtggttatggagagggtgtccggtccctgtcccagtgccgagaaggaagcctcccacgactgcccggcagggtcctagaaattccccaccctgaaagccctgagctttctgctatcaaagaggttttaaaaaaatcccatttaaaaaaaatcccttacctcggtgccttcctctttttatttagttccttgagttgattcagctctgcaagaattgaagcaggactaaatgtctagttgtaacaccatgattaaccacttcagctgacttttctgtccgagctttgaaaattcagtggtgttagtggttacccagttagctctcaagttatcagggtattccagagtggggatatgatttaaatcagccgtgtaaccatggacccaatatttaccagaccacaaaacttttctaatactctaccctcttagaaaaaccaccaccatcaccagacaggtgcgaaaggatgaaagtgaccatgttttgtttacggttttccaggtttaagctgttactgtcttcagtaagccgtgattttcattgctgggcttgtctgtagattttagaccctattgctgcttgaggcaactcatcttaggttggcaaaaaggcaggatggccgggcgcggtggctcacgcctgtaatcctagcactttgggaggccaaggtgggaggattgcttgagctcaggagtttgagaccaacctggg

SEQ ID NO: 31552 - DNA, 4538 bp, Homo Sapiens
cggccgcggcgcgagccggagtccgccgagccggagcgcgacgaggccccgggcgcgccctccccgctgccgccaccgccgtgccgccgccatccgcccgccgccgccgccgctgtccggcccccgagcacgccggccccgcgcgcgcctcgaggccgagtcaagaaactatgttccaacttcctgtcaacaatcttggcagtttaagaaaagcccggaaaactgtgaaaaaaatacttagtgacattgggttggaatactgtaaagaacatatagaagattttaaacaatttgaacctaatgacttttatttgaaaaacactacatgggaggatgtaggactgtgggacccatcacttacgaaaaaccaggactatcggacaaaacctttctgctgcagcgcttgtccattttcctcaaaattcttctctgcctacaaaagtcatttccgcaatgtccatagtgaagactttgaaaataggattctccttaattgcccctactgtaccttcaatgcagacaaaaagactttggaaacacacattaaaatatttcatgctccgaacgccagcgcaccaagtagcagcctcagcactttcaaagataaaaacaaaaatgatggccttaaacctaagcaggctgacagtgtagagcaagctgtttattactgtaagaagtgcacttaccgagatcctctttatgaaatagttaggaagcacatttacagggaacattttcagcatgtggcagcaccttacatagcaaaggcaggagaaaaatcactcaatggggcagtccccttaggctcgaatgcccgagaagagagtagtattcactgcaagcgatgccttttcatgccaaagtcctatgaagctttggtacagcatgtcatcgaagaccatgaacgtataggctatcaggtcactgccatgattgggcacacaaatgtagtggttccccgatccaaacccttgatgctaattgctcccaaacctcaagacaagaagagcatgggactcccaccaaggatcggttcccttgcttctggaaatgtccggtctttaccatcacagcagatggtgaatcgactctcaataccaaagcctaacttaaattctacaggagtcaacatgatgtccagtgttcatctgcagcagaacaactatggagtcaaatctgtaggccagggttacagtgttggtcagtcaatgagactgggtctaggtggcaacgcaccagtttccattcctcaacaatctcagtctgtaaagcagttacttccaagtggaaacggaaggtcttatgggcttgggtcagagcagaggtcccaggcaccagcaagatactccctgcagtctgctaatgcctcttctctctcatcgggccagttaaagtctccttccctctctcagtcacaggcatccagagtgttaggtcagtccagttccaaacctgctgcagctgccacaggccctcccccaggtaacacttcctcaactcaaaagtggaaaatatgtacaatctgtaatgagctttttcctgaaaatgtctatagtgtgcacttcgaaaaagaacataaagctgagaaagtcccagcagtagccaactacattatgaaaatacacaattttactagcaaatgcctctactgtaatcgctatttacccacagatactctgctcaaccatatgttaattcatggtctgtcttgtccatattgccgttcaactttcaatgatgtggaaaagatggccgcacacatgcggatggttcacattgatgaagagatgggacctaaaacagattctactttgagttttgatttgacattgcagcagggtagtcacactaacatccatctcctggtaactacatacaatctgagggatgccccagctgaatctgttgcttaccatgcccaaaataatcctccagttcctccaaagccacagccaaaggttcaggaaaaggcagatatccctgtaaaaagttcacctcaagctgcagtgccctataaaaaagatgttgggaaaaccctttgtcctctttgcttttcaatcctaaaaggacccatatctgatgcacttgcacatcacttacgagagaggcaccaagttattcagacggttcatccagttgagaaaaagctcacctacaaatgtatccattgccttggtgtgtataccagcaacatgaccgcctcaactatcactctgcatctagttcactgcaggggcgttggaaagacccaaaatggccaggataagacaaatgcaccctctcggcttaatcagtctccaagtctggcacctgtgaagcgcacttacgagcaaatggaatttcccttactgaaaaaacgaaagttagatgatgatagtgattcacccagcttctttgaagagaagcctgaagagcctgttgttttagctttagaccccaagggtcatgaagatgattcctatgaagccaggaaaagctttctaacaaagtatttcaacaaacagccctatcccaccaggagagaaattgagaagctagcagccagtttatggttatggaagagtgacatcgcttcccattttagtaacaaaaggaagaagtgtgtccgtgattgtgaaaagtacaagcctggcgtgttgctggggtttaacatgaaagaattaaataaagtcaagcatgagatggattttgatgctgagtggctatttgaaaatcatgatgagaaggattccagagtcaatgctagtaagactgctgacaaaaagctcaaccttgggaaggaagatgacagttcctcagacagttttgaaaatttggaagaagaatccaatgaaagtggtagcccttttgaccctgtttttgaagttgaacctaaaatctctaacgataacccagaggaacatgtactgaaggtaattcctgaggatgcttcagaatctgaggagaagctagaccaaaaagaggatggttcaaaatacgaaactattcatttgactgaggaaccaaccaaactaatgcacaatgcatctgatagtgaggttgaccaagacgatgttgttgagtggaaagacggtgcttctccatctgagagtgggcctggatcccaacaagtgtcagactttgaggacaatacctgcgaaatgaaaccaggaacctggtctgacgagtcttcccaaagcgaagatgcaaggagcagtaagccagctgccaaaaaaaaggctaccatgcaaggtgacagagagcagttgaaatggaagaatagttcctatggaaaagttgaagggttttggtctaaggaccagtcacagtggaagaatgcatctgagaatgatgagcgcttatctaacccccagattgagtggcagaatagcacaattgacagtgaggatggggaacagtttgacaacatgactgatggagtagctgagcccatgcatggcagcttagccggagttaaactgagcagccaacaggcctaagtgccaggttccctggcgttggtgacatgctgcagcctggaactctgatctccagtgtgactgcaaagctgtcttctcactggtactgccttgtgagtactggttggactgtggggcatgtggccgctgcagttccagtggttatttctaagtctatgacaggacaggctgttcttgcttcagaaccttctctgacagacacggtaactaaatgtgaaaaaccaataagctggtgactcatgaatacacacgaggaaaagcagaggtttattttatctgccttttcaacatttctttccctctgtgaaatgattggtcagatgtctttgagaagtgttaaactaattcacatggtagtgtagggccaacatacaagctaccagtctaatgtgtatagtagactttgggaaaagcgattttttttcatgtattcattctgaatagttgaaatgtatatttgtacagtcttttagacctattcaagtgatgctcatgatcctgttactgtgtgcccatcatagatttctttttttagtgttgcccttgctgtgtaataaacgctctatctagtttacctagcaaaagctcaaaactgcgctagtatggactttttggacagacttagtttttgcacataaccttgtacaatcttgcaacagaggccagccacgtaagatatatatctggactctcttgtattataggatttttcttgttctgaatatccttgacattacagctgtcaaaaacaaaaactggtatttcagatctgttttctgaaatcttttaagctaaaatcacatgcaagaattgactttgcagctactaattttgacaccttttagatctgtataaaagtgtgttgtgttgaagcagcaaaccaatgagtgctgcattttggatatttagttttatctttagttcaacaccatcatggtggattcatttataccatctaatatatgacacactgttgtagtatgtataattttgtgatctttattttccctttgtattcattttaagcatctaaataaattgctgtattgtgcttaatgt

SEQ ID NO: 31553 - DNA, 4880 bp, Homo Sapiens
cgcgaggggagactgaagttcacgttccgctcttagtgcgcggtgagttccccggcgctaagccgggagacaagatccgatctactgagagctgcgaggtactgccctggatgtggtggagctgggctgggacctccgggctgctggtctgtgagcctggctttgaaaattggttactgggtctcctctcaagaaatctcaagatattaaagttactgctgttaaaaaggtgaggaatactgtatctatcattcaacaagtttcagctttctggctaaatggcttttgtgccagtgataccagagtcctacagccatgttcttgcagagtttgaatctctggatccattactctcagccctgcggctggactccagtcgtctaaagtgcacgagcatagctgtgtctcggaaatggttggctttgggcagttcaggaggaggactccatctcattcagaaagaaggctggaagcacaggctttttctttcacacagggaaggtgcaatttctcaagtcgcctgttgtttacatgatgatgattatgttgctgtagctaccagtcaaggtcttgtggttgtttgggaattaaatcaagagcgtcgtgggaaaccggaacaaatgtatgtgtcttcagaacacaaaggccgaagagtcacagctctctgctgggatacagctattcttagagtttttgtaggtgatcatgctgggaaggtttctgctatcaaactcaatacttctaaacaagcaaaggcagctgctgcttttgtgatgtttcctgttcagacaatcacaactgttgactcctgtgttgtacagttagattatttggatggaaggctacttatatcttcacttactcgatccttcttgtgtgacactgagagagaaaagttttggaaaattggaaacaaggaaagagatggagaatatggagcttgtttctttcctggaagatgttctgggggccagcaacctctgatatattgtgctcgcccaggctctaggatgtgggaagtgaactttgatggagaagttataagtacacatcagttcaagaaactcctctcgttgccacctctccctgtgattactctcagatcagaacctcagtatgatcatacagctggatcctcccagtctttgtctttccccaaactcttacatcttagtgagcattgtgtgctgacttggacagaaagaggaatttatattttcattcctcagaatgttcaagttcttctttggagtgaagtcaaagatattcaggatgtggctgtctgtaggaatgaattgttctgtttgcacctaaatgggaaagtctcacatctctccctgatatctgtggagcgctgtgtggaacgcctgctaagaagaggcctatggaacttggctgctcgtacatgctgtcttttccaaaattctgtcattgccagcagagcaagaaaaactttgactgcagataaattggagcatttgaaatctcagctggaccatggcacctacaatgatctaatttctcaactggaagaattgatcttaaaatttgaacctttggattcagcttgtagcagtagaagaagctccatttcatcacatgaaagtttcagcatcttggactctggtatttatcgtatcattagtagtagaagaggcagtcagtcagatgaagactcttgctcccttcacagccaaaccctctcagaagatgagagatttaaagaattcacctcacagcaggaagaggacctgccagatcagtgttgtggctcacacggaaatgaagacaatgtttctcatgctccagtgatgtttgagacagataagaatgaaacttttctcccgttcggcattccattaccatttcgttctccatctcctcttgtgtctcttcaggctgtcaaagaaagtgtttctagctttgtgcgtaaaactactgagaagattggcacccttcacacgagccctgatctgaaagtgagaccagagctcaggggtgatgagcaatcatgtgaagaggatgtgagttcagatacctgcccaaaggaggaagacactgaggaggaaaaagaggtaactagtccacctccagaagaagacaggttccaggagcttaaagtagcaacagcagaagcaatgaccaagctacaggaccctctggttttatttgaatccgagtctctgagaatggttttacaggagtggctttcacatttagaaaaaacatttgccatgaaggacttttcaggtgtttcagatactgacaactcatccatgaaattgaaccaggatgtgctattagttaatgaatcaaaaaagggaatattagatgaagataatgaaaaagaaaaaagggactctttaggcaatgaagaatctgttgataaaacagcatgtgaatgtgtaaggagtccaagggagtctttggatgacctgtttcaaatatgttctccatgcgccattgcaagtggtcttcggaacgacctggctgaattgacaacattatgtttggagttgaatgtattgaattctaagatcaaaagcaccagtggacatgtggaccacactttgcaacagtactctcctgaaattctggcttgccagttcctgaagaagtacttttttctcctgaacttgaaaagagcgaaggagagtatcaagcttagttacagtaatagcccttctgtttgggatacttttattgaaggattgaaagaaatggcaagttccaatcctgtgtatatggagatggaaaaaggagatctaccaacaaggttaaagttactagatgacgaggttccttttgatagtccgttgttggttgtttatgctacccggttgtatgaaaagtttggggagtctgctcttcgatccttaatcaagttctttccatccattttgccatcggatatcatacaactttgtcatcatcatcctgctgagtttttggcctatttagacagtctggtgaaatcaaggcctgaagatcagcggtcatcttttcttgagtcccttctgcaaccagagtctttaaggttggattggctgcttttggcagtgtcccttgatgctccaccaagcaccagcacaatggatgatgaaggttatcccaggcctcattcacacttgctttcctggggttacagtcagctgatccttcatctaattaaacttcctgcagattttataaccaaagagaaaatgacagacatctgcaggtcttgtggtttctggcctggatatctaattctctgtttggagctggagagaagaagagaggccttcaccaatattgtgtatctgaatgatatgagcctgatggaaggggacaatggttggatcccagagaccgtggaggaatggaagcttctccttcatctcatacagagcaagagcacgaggccagccccccaggagtcactaaatgggagcctcagtgatgggccttcccccatcaatgtggagaatgtggcacttctgttagctaaggccatgggcccagatcgggcttggtcactgctacaggaatgtggtctggcccttgagttgtcagagaagtttaccagaacctgcgatatcctgaggattgctgagaaaaggcagagggccttgatacaaagcatgcttgaaaaatgcgatcggtttctctggtcccagcaggcctagtgggagaagattcagcaggatgtcatgacattttgagaaaaactaaatcatgctcctgaaccttctgaacgcatttgttattgaaggaaagacaccacccccaaatcctgccatcttattggggctacttttgtcagtgtctgtacccttggcatcggcatctgtgactctttatccatgacctcagtgtttcttaaccaaagttgtactcagcatttcttaaccaaagttgaattttgaaaagagtcagtccttgtttgctggaattagaatgttaatgtcctagtattattccgaactacagtattaactgcttgttgctagtggattagacagattcttttcttactgtggcttccatgttgggagcagaagcttttcatcctggtcacatgaagacagatggtattattgactggagttgaattatttttatatcttgtctggcacaatatggaaattactgaaataagacggtgtataatggaattaacacccaaaataagtagaacactgaagatttgaatttgatatttaagtaaaatgggactgggtgcagtggctcaggcctgtaatcccaaccctttggaaggtaaagacgggaggatcacttgaggccaggagttcaagaccagcctgggcaacatagtgagaatgcatctctacaaaaaataaaaaaaattagctaggcatagtacctgaggccaggaggtccaggccgcaatgagatgtgtttgtgccattgcacaccagtctgggtgacagagaaagaccctgtctcaaaaacaaattaaataaaatatcttcatatataaattaagctaattaaaaatatttttccctgtatttatttaatattttctaatctgaacccatatacagctgactaattcattcttagaaatgtgttatctgtaatctttcctaaacagagtagcccacaagaatcatgcactttttaaaattatttctaagaagccataacaaagctgtgtactaataaagactgcagcaagcacttgtgttatttaaattatgtaagtagattgtcatttgtcaggctcctgtacatttacatagcatgttatattaataataaatgtaaaatatgactaaagttttcattggaacacaatgtagacaggaggtttattatgagcattttgcagaaaggtgtggagtaagtaaagtgttggatgcactgaacaattc

SEQ ID NO: 31554 - DNA, 6453 bp, Homo Sapiens
tacaaccaggctcaactgttgcatggtagcagatttgcaaacatgagtgctgaggggtaccagtacagagcgctgtatgattataaaaaggaaagagaagaagatattgacttgcacttgggtgacatattgactgtgaataaagggtccttagtagctcttggattcagtgatggacaggaagccaggcctgaagaaattggctggttaaatggctataatgaaaccacaggggaaaggggggactttccgggaacttacgtagaatatattggaaggaaaaaaatctcgcctcccacaccaaagccccggccacctcggcctcttcctgttgcaccaggttcttcgaaaactgaagcagatgttgaacaacaagctttgactctcccggatcttgcagagcagtttgcccctcctgacattgccccgcctcttcttatcaagctcgtggaagccattgaaaagaaaggtctggaatgttcaactctatacagaacacagagctccagcaacctggcagaattacgacagcttcttgattgtgatacaccctccgtggacttggaaatgatcgatgtgcacgttttggctgacgctttcaaacgctatctcctggacttaccaaatcctgtcattccagcagccgtttacagtgaaatgatttctttagctccagaagtacaaagctccgaagaatatattcagctattgaagaagcttattaggtcgcctagcatacctcatcagtattggcttacgcttcagtatttgttaaaacatttcttcaagctctctcaaacctccagcaaaaatctgttgaatgcaagagtactctctgaaattttcagccctatgcttttcagattctcagcagccagctctgataatactgaaaacctcataaaagttatagaaattttaatctcaactgaatggaatgaacgacagcctgcaccagcactgcctcctaaaccaccaaaacctactactgtagccaacaacggtatgaataacaatatgtccttacaagatgctgaatggtactggggagatatctcgagggaagaagtgaatgaaaaacttcgagatacagcagacgggacctttttggtacgagatgcgtctactaaaatgcatggtgattatactcttacactaaggaaagggggaaataacaaattaatcaaaatatttcatcgagatgggaaatatggcttctctgacccattaaccttcagttctgtggttgaattaataaaccactaccggaatgaatctctagctcagtataatcccaaattggatgtgaaattactttatccagtatccaaataccaacaggatcaagttgtcaaagaagataatattgaagctgtagggaaaaaattacatgaatataacactcagtttcaagaaaaaagtcgagaatatgatagattatatgaagaatatacccgcacatcccaggaaatccaaatgaaaaggacagctattgaagcatttaatgaaaccataaaaatatttgaagaacagtgccagacccaagagcggtacagcaaagaatacatagaaaagtttaaacgtgaaggcaatgagaaagaaatacaaaggattatgcataattatgataagttgaagtctcgaatcagtgaaattattgacagtagaagaagattggaagaagacttgaagaagcaggcagctgagtatcgagaaattgacaaacgtatgaacagcattaaaccagaccttatccagctgagaaagacgagagaccaatacttgatgtggttgactcaaaaaggtgttcggcaaaagaagttgaacgagtggttgggcaatgaaaacactgaagaccaatattcactggtggaagatgatgaagatttgccccatcatgatgagaagacatggaatgttggaagcagcaaccgaaacaaagctgaaaacctgttgcgagggaagcgagatggcacttttcttgtccgggagagcagtaaacagggctgctatgcctgctctgtagtggtggacggcgaagtaaagcattgtgtcataaacaaaacagcaactggctatggctttgccgagccctataacttgtacagctctctgaaagaactggtgctacattaccaacacacctcccttgtgcagcacaacgactccctcaatgtcacactagcctacccagtatatgcacagcagaggcgatgaagcgcttactctttgatccttctcctgaagttcagccaccctgaggcctctggaaagcaaagggctcctctccagtctgatctgtgaattgagctgcagaaacgaagccatctttctttggatgggactagagctttctttcacaaaaaagaagtaggggaagacatgcagcctaaggctgtatgatgaccacacgttcctaagctggagtgcttatcccttctttttctttttttctttggtttaatttaaagccacaaccacatacaacacaaagagaaaaagaaatgcaaaaatctctgcgtgcagggacaaagaggcctttaaccatggtgcttgttaatgctttctgaagctttaccagctgaaagttgggactctggagagcggaggagagagaggcagaagaaccctggcctgagaaggtttggtccagcctggtttagcctggatgttgctgtgcacggtggacccagacacatcgcactgtggattatttcattttgtaacaaatgaacgatatgtagcagaaaggcacgtccactcacaagggacgctttgggagaatgtcagttcatgtatgttcagaagaaattctgtcatagaaagtgccagaaagtgtttaacttgtcaaaaaacaaaaacccagcaacagaaaaatggagtttggaaaacaggacttaaaatgacattcagtatataaaatatgtacataatattggatgactaactatcaaatagatggatttgtatcaataccaaatagcttctgttttgttttgctgaaggctaaattcacagcgctatgcaattcttaattttcattaagttgttatttcagttttaaatgtaccttcagaataagcttccccaccccagtttttgttgcttgaaaatattgttgtcccggatttttgttaatattcatttttgttatccttttttaaaagtaaatgtacaggatgccagtaaaaaaaaaaaatggcttcagaattaaaactatgaaatattttacagtttttcttgtacagagtacttggctgttagcccaaggttaaaaagttcataacagattttttttggactgttttgttgggcagtgcctgataagcttcaaagctgctttattcaataaaaaaaagaaatgaaaaagatatatgaatatgacaaagtattgctgagtccaacaatgttgttttaagactcttaaaatacggtacctggcaatgtttatttcataaagaattgtgaacttcttgaatctagggagggggaatgtagtgaagggatgtatcaagtggggtggtgggagggggaggcaaggttatatgcactttctcatgatttacagagaagtgaataactgcaaagtgaagttgcttcttctacttcagtcttctctcactttgatttgctagttgttatcaattaatgacaattacaaacctactgtatctctaatacagtgtgactggtcaggtatttcagttcttaggaaggaagtgccaagtttgtttttgggttcctggaacagcgctcacctttgtttagaacactggtttaaagggataatcatctctgtcacattagactatccatcatgaccagcaaatactcattttaggaaaaaaaaaagcatgatctgaaaaatacttttggtggtatgttggttaccctcctagctttccatttggtttagaacataaagcaaatagacacagtcatactgtcactgctctggactgtgtggagctcgctaaagtcatggtcattgcaggaatccaagtggcagtccttctcattcattctaatcattgtatgtgcttcactacgggggggagaaggaaacgttagcatcatgtttcccatttagggcaggagtgagaggtctctcttcctgatttagatatgcaaaagctggtatgttcagtaggaactgtacatgtgttgggaggcataaagactaattagcaaccataatatggtcactaccctaatagactaaatgaaatcttgcaatttcaaattactctttctccatattagatttacccacagctatatttctgtttaagtactagggtgagggttttctgttactttgttttttaatgttgttccttttgaaagaatcagtcttgcagctgagtgaaaaatctgtggaatgtattatttgtcctctttacatgaaactactcatacttaagcaaaagtcagtcttatagcaagactgttagccctcaaacttgactctactgatctgaccatttccctctcatcgccagacaactgacgatttccctggttttagtctgcgtctctgctttaaagttattgtgatatccttctagatcatacacaagtctaacagttaattagttaacagtttttaaactaggtttgtgggtatttttttggtagcacatgtatgctattacatacaaatttttatttctaaaatataagatctgagattgaatattttcattaaaagctacagttttgtgaatctttgtgcttcaacattctttgcaagatgatacggtatttaggcatttgccttatttttgcatctcacaaacataagtgcaatagatcttttcattgaacagcaaagtaggattcatcattccatatgacttgagttacaccagacctgttctgcccaatgcctttttgattacagtgtagcttgcccaccgcatttgtcgttttagatactttgctagccggccactttggatttcatcagacagtcctaacaatattgtctgaacggctgaatatgaatagatacagcagaggcactcctgatatatgatttttatccatgcgtcagtttttcccacccagtgtagcatcctaaagataaagccagaagctaagctgcagtgaggctgtgattgggcgtagaagtgggagcattgggacctcacattacacacacgagagatcataaccatgtgaaaaggcaaaaagcatgtgtttgcaacatctgataacttcatggcctttgataaatgtatatatgtatatgtgcatggactgtgtttccagtacacctttcagccaaaacagatccacagtagttgttgagttcaagtacataaagtacataacaagcgaacgtctagtacaattcttacttatgtgtatgggatttttccctttgaggttgctttgttttgtcttacaaaggtgaaaattgtttgtaagtgaagtgagaagttcatatttctttggcttttttgtgtttttaaaagttactccttttagggagctggtctgatgacttgcttagcttggaaatccttgttttcagtgtgtcgagtcaaaatgtgtttatgtgagctgtcactgtggggaaccaattgctttgtcatatagctggttatgaactagtaacatgtttgggaagtcctactgatgttcctttggaagaaaaaatctgctggttttaacaactgtgcttttgctatgtatggtatccaagttagttgaaacgcagacactgagatctgtttgagtttagggtcatttttagaaaggggcagtttaaagcacaatgtctcacatgggacaaagttccaaaatgccaaattcttattttttaaaaagctagttctataaaatactggtattatgggtggggaggaaatagaattgagtcaattggaaagactatccaacttaacatgaaacttgtcaccatgagatagcattagctgcccaggatgctgctatatatatatatatatatatatatgtgtgtgtgtgtgtgtgtgtgtgtgtatatatatatatatatatatatatatatatatatatatatgtgtgtgtatatatatatatatgtgtatatatatatgtatatacatatatgtatatatatgcacatatatatatgtatttaaaaaaatcaaaacaaaaaaaaactcatttatacctgtgtattttttaaagctacaatctgttcaatgtttttaaaaatctgtttatatgacattgttaaaataaagttggtcttttgacgagagggaggatgtcacggtcagttgtaactttgccttcacaaggcaactggggtggggggtgggggtagtgtgcctccttgacatttcgttcaagttatagattcaatggagctatgtcttgttttaagttgctttaatgcattgtattagatcttcaaacagaataaaggttgttttgaaactgaaaaaaaaaaaaaaaaaa

SEQ ID NO: 31555 - DNA, 5823 bp, Homo Sapiens
agcgaaatccagttggcttctcaatgaggagccggcagtgagcggcggtggcccggacgcactgccgggcggggcgtggggcggagggacgagccgagccgagccaagcggagctgggccactgtgcacgcccggagggtcctggcggcgcccccgctcctgcgcgcactctcggcgccggacacgagcactgcctgccgggaacaggctggggggaggtgcgggggcttggcccacttggtggaagaacagctttggggattttttttttttcattgtcggatacaggcatttcaaagggaaaccgttgaaatgcataacctgcaaacactgcctcctaaaccaccaaaacctactactgtagccaacaacggtatgaataacaatatgtccttacaagatgctgaatggtactggggagatatctcgagggaagaagtgaatgaaaaacttcgagatacagcagacgggacctttttggtacgagatgcgtctactaaaatgcatggtgattatactcttacactaaggaaagggggaaataacaaattaatcaaaatatttcatcgagatgggaaatatggcttctctgacccattaaccttcagttctgtggttgaattaataaaccactaccggaatgaatctctagctcagtataatcccaaattggatgtgaaattactttatccagtatccaaataccaacaggatcaagttgtcaaagaagataatattgaagctgtagggaaaaaattacatgaatataacactcagtttcaagaaaaaagtcgagaatatgatagattatatgaagaatatacccgcacatcccaggaaatccaaatgaaaaggacagctattgaagcatttaatgaaaccataaaaatatttgaagaacagtgccagacccaagagcggtacagcaaagaatacatagaaaagtttaaacgtgaaggcaatgagaaagaaatacaaaggattatgcataattatgataagttgaagtctcgaatcagtgaaattattgacagtagaagaagattggaagaagacttgaagaagcaggcagctgagtatcgagaaattgacaaacgtatgaacagcattaaaccagaccttatccagctgagaaagacgagagaccaatacttgatgtggttgactcaaaaaggtgttcggcaaaagaagttgaacgagtggttgggcaatgaaaacactgaagaccaatattcactggtggaagatgatgaagatttgccccatcatgatgagaagacatggaatgttggaagcagcaaccgaaacaaagctgaaaacctgttgcgagggaagcgagatggcacttttcttgtccgggagagcagtaaacagggctgctatgcctgctctgtagtggtggacggcgaagtaaagcattgtgtcataaacaaaacagcaactggctatggctttgccgagccctataacttgtacagctctctgaaagaactggtgctacattaccaacacacctcccttgtgcagcacaacgactccctcaatgtcacactagcctacccagtatatgcacagcagaggcgatgaagcgcttactctttgatccttctcctgaagttcagccaccctgaggcctctggaaagcaaagggctcctctccagtctgatctgtgaattgagctgcagaaacgaagccatctttctttggatgggactagagctttctttcacaaaaaagaagtaggggaagacatgcagcctaaggctgtatgatgaccacacgttcctaagctggagtgcttatcccttctttttctttttttctttggtttaatttaaagccacaaccacatacaacacaaagagaaaaagaaatgcaaaaatctctgcgtgcagggacaaagaggcctttaaccatggtgcttgttaatgctttctgaagctttaccagctgaaagttgggactctggagagcggaggagagagaggcagaagaaccctggcctgagaaggtttggtccagcctggtttagcctggatgttgctgtgcacggtggacccagacacatcgcactgtggattatttcattttgtaacaaatgaacgatatgtagcagaaaggcacgtccactcacaagggacgctttgggagaatgtcagttcatgtatgttcagaagaaattctgtcatagaaagtgccagaaagtgtttaacttgtcaaaaaacaaaaacccagcaacagaaaaatggagtttggaaaacaggacttaaaatgacattcagtatataaaatatgtacataatattggatgactaactatcaaatagatggatttgtatcaataccaaatagcttctgttttgttttgctgaaggctaaattcacagcgctatgcaattcttaattttcattaagttgttatttcagttttaaatgtaccttcagaataagcttccccaccccagtttttgttgcttgaaaatattgttgtcccggatttttgttaatattcatttttgttatccttttttaaaagtaaatgtacaggatgccagtaaaaaaaaaaaatggcttcagaattaaaactatgaaatattttacagtttttcttgtacagagtacttggctgttagcccaaggttaaaaagttcataacagattttttttggactgttttgttgggcagtgcctgataagcttcaaagctgctttattcaataaaaaaaagaaatgaaaaagatatatgaatatgacaaagtattgctgagtccaacaatgttgttttaagactcttaaaatacggtacctggcaatgtttatttcataaagaattgtgaacttcttgaatctagggagggggaatgtagtgaagggatgtatcaagtggggtggtgggagggggaggcaaggttatatgcactttctcatgatttacagagaagtgaataactgcaaagtgaagttgcttcttctacttcagtcttctctcactttgatttgctagttgttatcaattaatgacaattacaaacctactgtatctctaatacagtgtgactggtcaggtatttcagttcttaggaaggaagtgccaagtttgtttttgggttcctggaacagcgctcacctttgtttagaacactggtttaaagggataatcatctctgtcacattagactatccatcatgaccagcaaatactcattttaggaaaaaaaaaagcatgatctgaaaaatacttttggtggtatgttggttaccctcctagctttccatttggtttagaacataaagcaaatagacacagtcatactgtcactgctctggactgtgtggagctcgctaaagtcatggtcattgcaggaatccaagtggcagtccttctcattcattctaatcattgtatgtgcttcactacgggggggagaaggaaacgttagcatcatgtttcccatttagggcaggagtgagaggtctctcttcctgatttagatatgcaaaagctggtatgttcagtaggaactgtacatgtgttgggaggcataaagactaattagcaaccataatatggtcactaccctaatagactaaatgaaatcttgcaatttcaaattactctttctccatattagatttacccacagctatatttctgtttaagtactagggtgagggttttctgttactttgttttttaatgttgttccttttgaaagaatcagtcttgcagctgagtgaaaaatctgtggaatgtattatttgtcctctttacatgaaactactcatacttaagcaaaagtcagtcttatagcaagactgttagccctcaaacttgactctactgatctgaccatttccctctcatcgccagacaactgacgatttccctggttttagtctgcgtctctgctttaaagttattgtgatatccttctagatcatacacaagtctaacagttaattagttaacagtttttaaactaggtttgtgggtatttttttggtagcacatgtatgctattacatacaaatttttatttctaaaatataagatctgagattgaatattttcattaaaagctacagttttgtgaatctttgtgcttcaacattctttgcaagatgatacggtatttaggcatttgccttatttttgcatctcacaaacataagtgcaatagatcttttcattgaacagcaaagtaggattcatcattccatatgacttgagttacaccagacctgttctgcccaatgcctttttgattacagtgtagcttgcccaccgcatttgtcgttttagatactttgctagccggccactttggatttcatcagacagtcctaacaatattgtctgaacggctgaatatgaatagatacagcagaggcactcctgatatatgatttttatccatgcgtcagtttttcccacccagtgtagcatcctaaagataaagccagaagctaagctgcagtgaggctgtgattgggcgtagaagtgggagcattgggacctcacattacacacacgagagatcataaccatgtgaaaaggcaaaaagcatgtgtttgcaacatctgataacttcatggcctttgataaatgtatatatgtatatgtgcatggactgtgtttccagtacacctttcagccaaaacagatccacagtagttgttgagttcaagtacataaagtacataacaagcgaacgtctagtacaattcttacttatgtgtatgggatttttccctttgaggttgctttgttttgtcttacaaaggtgaaaattgtttgtaagtgaagtgagaagttcatatttctttggcttttttgtgtttttaaaagttactccttttagggagctggtctgatgacttgcttagcttggaaatccttgttttcagtgtgtcgagtcaaaatgtgtttatgtgagctgtcactgtggggaaccaattgctttgtcatatagctggttatgaactagtaacatgtttgggaagtcctactgatgttcctttggaagaaaaaatctgctggttttaacaactgtgcttttgctatgtatggtatccaagttagttgaaacgcagacactgagatctgtttgagtttagggtcatttttagaaaggggcagtttaaagcacaatgtctcacatgggacaaagttccaaaatgccaaattcttattttttaaaaagctagttctataaaatactggtattatgggtggggaggaaatagaattgagtcaattggaaagactatccaacttaacatgaaacttgtcaccatgagatagcattagctgcccaggatgctgctatatatatatatatatatatatatgtgtgtgtgtgtgtgtgtgtgtgtgtatatatatatatatatatatatatatatatatatatatatgtgtgtgtatatatatatatatgtgtatatatatatgtatatacatatatgtatatatatgcacatatatatatgtatttaaaaaaatcaaaacaaaaaaaaactcatttatacctgtgtattttttaaagctacaatctgttcaatgtttttaaaaatctgtttatatgacattgttaaaataaagttggtcttttgacgagagggaggatgtcacggtcagttgtaactttgccttcacaaggcaactggggtggggggtgggggtagtgtgcctccttgacatttcgttcaagttatagattcaatggagctatgtcttgttttaagttgctttaatgcattgtattagatcttcaaacagaataaaggttgttttgaaactgaaaaaaaaaaaaaaaaaa

SEQ ID NO: 31556 - DNA, 3226 bp, Homo Sapiens
agagaacaggtcccagataccgagtccgcaactccaaacatcgcgattaataggaggcctctggtctctgcctgccctgggtgctcatggaaccagctgctgctctgcacttctccctgccagcctccctcctcctcctcctgctcctcctccttctcagcctgtgtgcactggtctcaggccttgggtctaagcccctcattgaaatcaaggcccaagaggatgggagcatctggctggagtgcatatctggagggtggtacccagagcccctcacagtgtggagggacccctacggtgaggttgtgcccgccctgaaggaggtttccatcgctgatgctgacggcctcttcatggtcaccacagctgtgatcatcagagacaagtatgtgaggaatgtgtcctgctctgtcaacaacaccctgctcggccaggagaaggaaactgtcatttttattccagaatcctttatgcccagcgcatctccctggatggtggccctagctgtcatcctgaccgcatctccctggatggtgtccatgactgtcatcctggctgttttcatcatcttcatggctgtcagcatctgttgcatcaagaaacttcaaagggaaaaaaagattctgtcaggggaaaagaaagttgaacaagaggaaaaagaaattgcacagcaacttcaagaagaattgcgatggagaagaacattcttacatgctgctgatgtggtcctggatccagacaccgctcatcccgagctcttcctgtcagaggaccggagaagtgtgaggcggggcccctacaggcagagagtgcctgacaacccagagagattcgacagtcagccttgtgtcctgggatgggagagcttcgcctcagggaaacattactgggaggtggaggtggaaaacgtgatggtgtggactgtgggggtctgcagacacagtgttgagaggaaaggggaggtcctgctgattcctcagaatggcttctggaccctggagatgtttggaaaccaataccgggccctgtcctcccctgagaggattctccctttgaaggagtccctttgccgggtgggcgtcttcctggactatgaagctggagatgtctccttctacaacatgagggacagatcgcacatctacacatgtccccgttcagcctttactgtgcctgtgaggcccttcttcaggttagggtctgatgacagccccatcttcatctgccctgcactcacaggagccagtggggtcatggtgcctgaagagggcctgaaacttcacagagtggggacccaccagagcctatagaatcaattccttggactcacagccatgcagataagccctggccatctcagcagccaccgcacaacccccctaatgaaagacacgccctcctcccctctggtcacgtaagagaacatcttccagctgcctttttcacacccactccagccctctgccccagttttctcctcctcactagtctgtggctttagtagttcctttgcttgtaattatgggatgggatccaggcatagggaactagttgtttcatagctcccagtcaaaaagaaagtgagagaagctgttgggcagcgaacctactgtttaaaatcaggataaccacattaagcccaatatgccagttggcaccagatgctgtggacttggaatgaggccaacagggttcaccaggatgagagaggagagaggaatccacaggaccaccagaagggagagggaaccagatatgcagatcagagatagaggaagtggaaccagagagctgggagggaccaaggttgtaaggatggctaagtcccaccataagagctaaagggtcctgggagatgatggctcatttccacccaaccccaggatttccacagcacacacccacaggcctggacctgggatgaagatgaatgaagaacatggactcatgtggatgtggtttggctcagatgtccctgcaataaacaaggggtcagtacttagtccctgagtgtggttgaggtttgaggtcctggtcgagcagggcagtactggaccaggtctacgtcagcattcaggttcaatggggacaccagtggcttcaaacttcctgatctaattatgtttttagacacttagaagttattgaggactttaaagagcttttgtttatttgggttaatatttatgacatttgacattgaaacaaaaatttaaaatgttatcttttaatttatgttaaaatagcattaataaatcagttataggttaatgtagataggatgttttgtgaaaaagcaatctattgtgtccaaataaaaaaacaaaaagtgtgacactggttaactttttccagatctcatgtctggcttaataagagatatttgtattatcatatctgcctttgtattaaacctattggtatatcataggtcatgttagctcaaaaaaactttactgcacactactgagagaatgagatgaaaaacgattaatgtttcattattattattgtgaaaatattattaacactggggactccttaagagtacatcagagttctctctaggaatcccaaaaccacattttgaaactagaatagtggatcctggaagttaatccatgtgctggttaattttagatgtcaacctgactggattaaggaatacctagacagctggtacaacattatttctgggtgtgtctgtgagtgtgtttccagaagagattggcaagtgagtcagtgggaaattctctccttctgttggctgggtgcccaatacaacaaaaaggcagaggaaaggcaaattcttctctcctctggagctgagacactcttcttcttctgcccttggacatcagaactcctggctctccggcctttgaacttcaggacttgtaccaggaggccctgggttctcaggcctttggctttggactgagagttacacaatcagcttccctggttctgaggctttcagacttaaactgagccatgctaccagcatcccagggtctccagcctacagatgagctgttgtgcgatttcttagcctccataatcacatgagccaatctccttaataaatgcctgctcatagatctgtatctacatctatatctgtatgtgcatctatatctatgcctatatctatatctatatcatattgattttgtctctctggagaaccctgactaataaaatgaggcatctaaaaaaaaaaaaa

SEQ ID NO: 31557 - DNA, 5199 bp, Homo Sapiens
atgttcttcaaaggaggaagctggctttggttatacatcagaacaagtattattctaggaagtgagctaaacagcccagcaccacatgggcaaaataattgttaccagcttaacagatttcaatgcagctttgaggaagcacagcattactgtcatgtgcagagaggattcctagctcatatttggaacaaggaagttcaagatctcatccgggactatctggaagaaggaaagaagtggtggattgggcaaaatgtaatgccattgaaaaagcatcaagacaacaaatacccagcagacgttgcagccaacgggcccccaaagcccctcagctgcacctacctgtccagaaacttcattcggatctcatccaaaggggacaagtgcttactgaaatactatttcatttgccagactggtgactttttggacggagatgcccattatgaaagaaatggaaataattcccatttgtaccagagacacaagaagacaaaaagaggagttgcaatagcaagagacaaaatgcccccaggacctggtcatcttccaaccacatgtcactatcctcttcctgctcatctttccaagaccctgtgtcatcccatcagccagtttccttcagtactatcaagtatcacatcacaggtaacatcagccgcatctgaacccagcagccagcctctccctgtgataacacagctcaccatgcccgtgtctgtcacgcatgctgggcaatctctggcagaaacaacttcaagcccaaaggaagaaggtcatccgaataccttcacctcttatctacaagtgtcattgcagaaggcatctggtcaggtcatagatgagatagcagggaacttcagcagagcagttcatggtttgcaagctcttaacaaactacaggaagcttgtgagttcctccagaaactaacagccttaaccccaagattttctaagccagctcaggttaatctcatcaattcccttatttacctgagtgaggagttactcaggatcccatttcagaacaacaacagtctgggcttcaaagttcctccaactgtctgcccctttcattccctcaacaatgtcaccaaagctggagaaggaagttggctggaatccaagcgtcatactgagccggtagaagacatcctggaaatgtccttggtggagtttgggaatatcggggaagcatttctagagcagaaccagtctcccgagtcttcagtgactttgacctctgccaatgctactctgctgctgagcagacaaaacatatcaactttaccgctgagctcttacactctgggtcacccagcccctgtgaggctaggctttccgtcggctttagctttgaaggagctcttgaataaacatccaggagttaatgtccaaataacaggactagctttcaatcccttcaaggatttggacaacagaaacattgttggaagcattggaagtgtgttactaagcgctaatcgtaaattgctccaagtccatgatttaatggaggacattgagatcatgctctggagaaatgttagcttggaaacccatcccaccagcctcaacatgagcacacatcagcttacaatcacagtgaacgtcacttccttggagaaatccttgatagtgagcatagatcctgacagtccccttttaatgacactctacctggggttccagtatcagcctaactgcactcacttccacctgaacatcacccttccaaaggataaggtgtggcaaaaagatgaggagtacacgtgggtgctgaatccagagcatctgcagcacgggattggcacctactatataacagctgtgctgagtgagaggcaggagggtgctcagcagacacccagcttggtctcggtcatcaccgccgtcactcagtgttactactgggagatccacaaccagacatggagcagcgccggatgccaagttgggccacagagcacaattctgaggacacagtgtctctgtaaccacctgaccttctttgccagcgacttctttgtcgtgcccaggaccgtgaatgttgaagacacgatcaaactgttccttcgcgtgaccaacaatcctgttggggtgtcactgctggccagccttttaggattttatgtgatcacagttgtgtgggctcggaaaaaggatcaagcagatatgcagaaggtgaaggtcactgtcctggctgataatgaccccagcgctcaatttcactaccttattcaggtctacaccggatatcgaagaagcgctgctacaacagctaaggttgtcatcaccctctatggatcagagggacggagtgagccccatcacctctgtgacccccagaagacagtctttgaacgagggggcctggatgtcttccttctcaccacttggacctctctagggaacctgcacagccttcggctctggcatgacaattctggcgtcagtccctcctggtatgtcagccaggtaattgtctgtgacatggcagttaagaggaagtggcatttcctgtgcaattgctggctggctgtggacctcggagactgtgagcttgaccgggtcttcatcccagtttcaaagagagagctcttttcctttagacatctgttttcctccatgattgtggaaaagttcacccaggattatctgtggctttcaattgcaactcggcatccctggaaccagtttacaagggtccaacggctgtcttgctgcatgacactgctactctgcaacatggtcatcaatgttatgttctggaagataaacagcaccactgccaagagagatgagcaaatgcgtccatttgctgtggcctggtctgaactgctggtcagcatccatactgctgtcatcctcttcccaatcaatcttgtcatagggcggctcttcccgttgattgagccacaggagactctgcccctctttcctcccatccaggcctcctgcctctcagatgcttctgttgagcctctctctgccacaatggtagttgaggaattaaaggaaactgtgagattcctgctcaggagaaatacatacctactctccaagtgtgagcagccgccatggagttcttgggacattactaagctggtgaaacttttatccagcctcgtatcatctcacttggagggtcaaggctgtcatcagcagggagagcgccactgggcacgtgttgttcctgaaaaccaccatcatttctgctgttacctgcatagagttctgcagaggctgaaatctcacttaggcacgctgggtctcacccagggtcaccagtcctgtgacttcctagatgcagccagccaacttcaaaaactccaggaactcttggaaacacatattcttcccacggagcaagagccatccagggaagtcaccagttttgccatcctgagctcagaagaaggaaaaaagcccatctcaaatggcctgtccaaatggttgacttcagtctgctggctcctcttaggtttcactagcctggcttcagccttttttacagcactttatagcttggaattgagcaaagaccaagccaccagctggatgatttcaattattttatcagtgcttcagaacatcttcatcagccagccagtaaaggtggtcttcttcacattcttatactcactgatgatgagcaggatgccacggcttaacaaagagaatgaacaacaaacaaagaggatcttggcactcttggcaaaatgttcttcgtcagtaccaggttcaagagataagaacaaccccgtctatgtagccccagctataaatagtccaactaagcacccagaaagaaccttgaaaaagaagaaactcttcaagctgactggagatattttggtacaaatcctcttccttaccctgttgatgactgcaatctactctgcaaagaactccaatagattttacctccaccaagctatctggaagacattttcgcaccagttctcggaaatcaaacttcttcaggatttctacccctgggccaatcatatccttcttcctagcctgtatggggattacagaggtaagaatgcagtcctggagcccagtcattgcaaatgtggggtacaattaattttccaaataccccgtaccaagacctatgagaaagtggacgaaggtcagctggcgttttgtgataacggccatacctgtgggcgtcccaagagcctattccctggacttcatctaaggaggttcagttacatctgttcacccaggcccatggtgctgattcccactgatgagcttcacgaaaggctgacaagcaagaatgagaatggattcagttacatcatgagaggtgctttcttcacctctttgagactggaaagcttcacttcccttcagatgtcaaagaagggctgtgtctggtctatcatctcacaagtcatctattatctactggtctgttactatgccttcatacagggttgtcagctgaaacagcagaagtggaggttcttcactgggaaaagaaacattctggacacaagtataatcctcattagcttcatcctcctggggcttgacatgaagagtatttctctacataagaaaaacatggcacgataccgcgatgaccaggacagattcatcagcttctatgaggcagtaaaagtgaactctgctgcgactcaccttgtgggcttcccggttctcctggcaactgttcagttatggaacctgctgcgtcatagccccaggctgcgggtcatcagcaggacactgagccgagcctgggacgaggtggtgggctttctgctgatcatcctaatcctgctgacaggctatgccattgcctttaacctgctgtttggatgcagcatctctgactaccggacatttttcagctcagcagtgactgttgttggtctcctgatgggaatttctcaccaagaggaggttttcgctttagacccagtcctgggcacctttctgatcctcaccagtgtcatcttgatggtacttgtggtaattaatcttttcgtttcggccattctcatggcctttggaaaagaaagaaagtcgcttaagaaagaagctgcactaatagatacactgctacagaagctctcaaatttgttaggaatcagttggccccaaaaaacctcatctgagcaagcagccacgacagcagtgggcagtgacactgaagttttagatgaactaccttaa

SEQ ID NO: 31558 - DNA, 2124 bp, Homo Sapiens
cgggcatgtcctgatctggcggccgctcctaccaccctgggcagccgagcagagtcgtccccagcgggtctccctccctgcctccctgactttgcaacaccgcgttccgggaggaccggcctcggcgagggaggaggcgggggagctgcgaacacccagacccaaaccctgacatgctctggggcggagaggaggaagccaggagctgagcgcgccgcgggggctgcttcgccctccggctccgagcgccgggctccgggcgccctgccctgcgcctgggcagcagccttgctggtcttgggggcgccccccgcttcccgccccgggggtccgcggccggcaggaccatgctgctgaaagagtaccggatctgcatgccgctcaccgtagacgagtacaaaattggacagctgtacatgatcagcaaacacagccatgaacagagtgaccggggagaaggggtggaggtcgtccagaatgagccctttgaggaccctcaccatggcaatgggcagttcaccgagaagcgggtgtatctcaacagcaaactgcctagttgggctagagctgttgtccccaaaatattttatgtgacagagaaggcttggaactattatccctacacaattacagaatacacatgttcctttctgccgaaattctccattcatatagaaaccaagtatgaggacaacaaaggaagcaatgacaccattttcgacaatgaagccaaagacgtggagagagaagtttgctttattgatattgcctgcgatgaaattccagagcgctactacaaagaatctgaggatcctaagcacttcaagtcagagaagacaggacggggacagttgagggaaggctggagagatagtcatcagcctatcatgtgctcctacaagctggtgactgtgaagtttgaggtctgggggcttcagaccagagtggaacaatttgtacacaaggtggtccgagacattctgctgattggacatagacaggcttttgcatgggttgatgagtggtatgatatgacaatggatgatgttcgggaatacgagaaaaacatgcatgaacaaaccaacataaaagtttgcaatcagcattcctcccctgtggatgacatagagagtcatgcccaaacaagtacatgacaatggatgaagtccgagaatttgaacgagccactcaggaagccaccaacaagaaaatcggcattttcccacctgcaatttctatctccagcatccccctgctgccttcttccgtccgcagtgcgccttctagtgctccatccacccctctctccacagacgcacccgaatttctgtccgttcccaaagatcggccccggaaaaagtctgccccagaaactctcacacttccagaccctgagaaaaaagccaccctgaatttacccggcatgcactcttcagataagccatgtcggcccaaatctgagtaactttatataaatatctcatggggttttatattttcatttgttgttgttgtttttttttaagaatcttctgatagagaaaaagactgctttgtcactcaaacatgttccttcgacctttcagtgtgcatgtgactcagtaacttcacatagaatatgattccctaagtatgctacacagcatcatattagatgtaagatgtaagacttgcaaaggacagaaggaatcttctgtaaccacatagctgtatgccagagaggaagccttgttattgggcatttgatgaggtttggcatggacttcaaggataaatgaatgaaaactttgcaccacttttgttacaaggtacggtagaaaatagtgaagtcagtttcctctcatcaaatctaaaattctccaaaatactctcaggcataacatacttagctgttaaattttgaactgctaattactaatacttgaataccaatagttactgagattcctattttgtggttagtctgactcaggatttggagcctaattaactctaaacttttgaaaattttaatcatcaagctatagaggctccaagtgcaattaataataactcatttataccttccacagaatttaataaagattctacttgtttctgtcttttaaaaaaaaaaaaaaaaaa

SEQ ID NO: 31559 - DNA, 2139 bp, Homo Sapiens
ggccttcgtccctactgcctgggcgcggggcgggaggcggtgaccagcagcaggaggagaaagaacatggcgggcgcatcagagctcgggaccggcccaggagcagcgggtggagatggagatgattcgctatacccgatcgcggttttaatcgacgagctccgcaatgaagacgtgcagctccgactcaacagtattaagaagttatcaacaattgccctagcacttggagtagaaaggacccgaagtgaattgttgccatttcttacagatacaatttatgatgaagatgaggtactattagctcttgctgagcagctgggaaatttcactggcctagtgggaggtcctgactttgcccactgtctgctgcctcctttggaaaatctggcaactgtggaagagactgttgttcgtgacaaggctgtggagtccctgagacagatctcccaggagcatactcctgttgctctggaagcttattttgtacctctggtgaaacgcttagcaagtggggattggttcacctctcgcacatctgcatgtggtttgttcagcgtttgctatcccagggcatcaaatgctgttaaagcagaaatcagacagcaattccgttccttgtgctcagatgacacaccaatggtacgacgtgctgctgcttccaaattgggtgaatttgcaaaagttttggaattagacagtgtgaaaagtgaaattgttccactgttcactagtctagcttcagatgaacaggattcagtgcgcctccttgctgtggaagcttgtgtcagtattgcccagttattgtctcaggatgaccttgagactttggtgatgcctacacttcgacaagcagcagaagataaatcttggcgcgttcgctatatggtggctgacagattttcagagctccagaaagccatgggtcctaaaatcaccctaaatgacctcatccccgcctttcagaacctacttaaagactgtgaagctgaagtccgggcagctgctgcccacaaagtaaaagaacttggtgagaacttgcccattgaagatagagagaccataattatgaatcaaattctgccttatataaaggaattagtatccgataccaatcaacatgtcaaatcggctctagcttctgtaattatgggattgtctactattttgggcaaagaaaataccattgaacatcttctacctcttttcttagctcagttaaaggatgagtgtcctgacgttcgtttgaatatcatctccaatttggattgtgtaaatgaagtgattggaatccgtcagctctctcagtctctccttcctgccatagtggagctggcagaagatgccaaatggagggtccgcctggccatcattgagtatatgccgctgctggcaggccagctgggtgtggaattctttgatgaaaagctgaattctttatgtatggcttggctcgtggaccatgtatacgccatccgagaagctgccaccaacaacctcatgaaactagttcagaagtttggtacagagtgggcccaaaatactattgttcccaaagtgttagtaatggcaaatgatcctaattacttgcatagaatgaccactttattctgcattaatgcactgtctgaggcctgtggtcaggaaataactactaagcaaatgctgcccatcgtattaaaaatggcaggagaccaagtagcaaatgttcgcttcaatgtggccaaatctctacaaaagattggaccaattctagataccaatgctttacagggagaagtgaagccagtactacagaagttaggtcaagatgaagacatggatgtcaaatactttgcacaggaagctataagtgtggtggcacaaaggctgaggaagctagaatttcctgtgaaggacagtggagaacccagtgtccctcgggctgacaagaaccacttcccaagacccacagtgcctggagaggacatggggaagggaccagtgtatcagttgcgtggagatactagagacacacttgcccagctgggaattgcagagctagtgcatttctcccaaagcacagactaataccccagatttaaaaaaagaacataaaaaataaagtaccacacatattgcacaaaaaaaaaaaaaaaa

SEQ ID NO: 31560 - DNA, 1562 bp, Homo Sapiens
tgaggtgggagagagaagcagagcgagagagaggaggctgctggaaggagaaagaagagggtgaggaggcgacagagggagaggaggaagaagaggtagaaggagagagaaaggggagagaaaggagagaggagggttggaggtgcatgaaggaggggagagggagcttcagcgtggagagaggaccgcggaaggagagagagacagcccagagtggaatgtggaagggaaacagtccagcggggagccagggggcagccatggaagggacaggtggggagctggggggacaggggaactggggtccggaggacgccccaggcctcttggccagggcctccctgatcatgctcccgtggccactacccctggcctcctcggccctcaccttgctcttcggggccctcacttccctgttcctctggtactgctaccgcctgggctcccaagacatgcaggccctaggggctgggagccgagctgggggtgttcgtggtgggcctgtgggatgctcggaggccggcgggccaagcccagggggtcctggggatcccggggaaggacctaggacggaaggcctagtgagccggcggcttcgggcctacgcaaggcgctactcctgggctgggatgggtagagtgaggcgggcagctcagggtggcccaggccctgggagagggccaggggtcctaggtattcagcgcccaggcctgcttttcctaccagacctgccttcagccccctttgtgccgcgggacgcccagcggcacgacgtggagctcctggagagcagcttccctgccattttgcgggacttcggggctgtgagctgggacttctcagggactacccctccgcctcggggctggtccccacctctggcccccgggtgctaccagctcctgctgtaccaagcaggccggtgccaacccagcaactgccgccggtgcccgggggcctatcgggcactgagggggcttcgaagctttatgagtgccaacaccttcggcaatgccggcttttccgttctcctgcctggggcccggctcgagggccgctgtgggcccaccaatgcccgggtcagatgccatctgggcctaaagatccctcctggctgtgagctggtggtcggcggtgagccccagtgctgggctgaggggcactgtctactggtggacgactcttttctacacacagtggctcacaatggctcccccgaagatgggcctcgagtggtcttcatcgtggacctctggcaccccaacgtggcaggggctgagcgccaggccctcgactttgtcttcgccccagacccttgaaggaaggtgctcccttcacacacccaggctggagagacactgcgctcagggacggcttgatggtagccaggacctcctctctactgcgggggtgggcgggggcggaggatgggaactggctagtgagcactgaaatataaattctgaatcctctcctaaaaaaaaaaaaaaaaaaaaaaaaaaaaaaaaaaaaaaaaaaaaaaaaaaaaaaaaaaaaaaaaaaaaaaaaaaaaaaaaaaaaaa

SEQ ID NO: 31561 - DNA, 2185 bp, Homo Sapiens
ctattttggctcggctcctgcccagcacctggcggcctttgtaggcctaaagcttcctcaagtcaagcgttccaggcccagatcatgctgcccaggggccttcacaggcccagctactgcctgacgatggcttccccaggcccaggtcttgccttcccccagcctcccgaggcccagcccttgcctcacagttgctttcccagtccacgttacagcctgttacccgacggccttgacagaccaaactcttccttcacactggacagtttaggacaagctcatacgtcttccagcctctccaggtcaagctcctgcctcacactggcctctataggcccaggtgctgaatcgcaatggtctgtttaggtccatctcatgcctttctcagactctccaagcgacgatctggcctgacacttgcttctgtgggccatgtgatcactcacactggcctctttaggatcaggggatgcctctccacaggccgagatcctgcctgttgtaggccccttcaggatgcgccgctgcctgacagtggaccctccaggcctagatgttacgtgatcatggcctctgcaggtcaagaatttaaattttcgcagcctctataggccaggctactgcctcctgataatggcttctgcaggcccaaatcgtcctgaaataagcctcgccaggaacagcgcatgtgtgttggatgcccgaacaaccatagcttctcccgcacagtggcccatgggggccgggctcttgcctcagcctggccacctcaggcccagttcttgcctgttggcggccgctccaggcccggctcctgcccctcggcctcctctccaggcccagaactggttcccgtcggcctctccaggcccagctctcccggccacctccacgggcccagctcctgcctcacgacaaccacgttcggcccagctcctgcccagctcctggcagccgttgtaggccccaggcttccctgcgttcaggcctcccggacccaccttcggcttcccggcggccctgagagacccggctcctgcctgccagcggcctctcccggcccagctgcggcctcacgtcggcctccccaggccacgtttccgtctgcctcacggcagccccggcaggcccggctcccgcctgccgggggcctcttgaggaggctcatctcgtgcccggccgcggcctccccaggccaggctcctgcctgccggcaggcgccacaagcccagctcctgcgtcccgaaggcctctctaggcccggctcgtgcctcgctgcggcctcttgaggcccagcttttcccttgtggtggcctctccaggcccagaacttcctcaagtcggcctcccccggtccagtggctgcctcccggcctcctctccgggcccagctctttgctcgcgtctgcgcccgtgggcccagctcccgtctccaaacagcctccttcgactcggctcctgcccagctcccggcggccttcgtaggcccgaagcctcctccagtccagctctccagggccgcgtcttgcctcgcctcgcctcccctcaccttgcctcacctcgcagcagcctttccaggcccagctcccgcctcccggcggccttcccctgccacgctcttgccggcctcccggcagcctccaccagcccggctcctgcctcacgctggcccctctgggcccagctcatgcctcgcggtggcctctccgggcccagctcccacccagcctgacggcgcctcccagccccaagctgccttcctcgatgtggcccaaagtggcccaaagcgtcccaaagtaggcctcgccaggcccacctcctgcccggcgtaggccctgaggggcgcggcccctgccccatactggcctcttttgggccctctcttacaccagcccctgtctcaggattgtctcttcacgcccatcttctgcctcatagtggtcactcaaggcctcgcttttgcctgatgattgcgttttctggttttgctcttgccttgtattcccttcttcgggatacagcttttacgtcttccatggtgaacctcatcaaggagactaaatcttccctggtctgtcatttttttcacttcacaccagagtgccttgggaaaaccccatctcttcttttaaccttgagagtggatttctgacgaattgataataaattttttctctgtggtttc

SEQ ID NO: 31562 - DNA, 3541 bp, Homo Sapiens
gcttagcccaggcgcgggctgagagtcagttcgccaggtgggcctggagccatgggctgggtgggcgggcggcgccgggattctgcgtcaccacctgggcggagccgttctgctgctgacgacatcaacccggcacctgccaacatggaaggtggcggcggcagcgtcgctgtagctggcctcggagctcgaggctctggagcggctgcagctacagtccgggaacttctgcaggacgggtgttatagtgactttttaaacgaagactttgatgtaaagacttatacttctcaatctattcatcaagctgtaattgctgaacaactagcaaaacttgcccaaggaatcagtcagttggacagagaactacacttacaggttgttgcaagacatgaagatttactggcacaagcaactgggattgagtcgttggaaggtgttcttcagatgatgcagacgagaattggggctttacagggagctgttgataggataaaagcaaaaattgttgaaccatacaataagatagttgcccggactgcacaactagcaagacttcaggttgcctgtgatttgcttcggaggattattcgtatcttgaatctcagtaagagactccaaggacaactgcaagggggaagtagagagataacaaaagctgctcagagtctcaatgaacttgattatctttctcaaggaatagatctttctggaatagaagtgatagaaaatgatctactttttattgcaagagcccgacttgaagtggaaaatcaagctaagcgcctactagagcagggtttggagactcagaatccaactcaagtcggaacagctcttcaggttttctataatcttggaactttgaaggatactattaccagtgttgtggatggatattgtgctactttagaagaaaatatcaacagtgcattagacataaaagttttgactcagccttcccagtcagctgtgagagggggacctggacgatctaccatgccaaccccaggaaatactgcagctttgcgtgcctcactctggaccaatatggagaaacttatggatcatatttatgctgtttgtggacaggtacaacatctacaaaaagtattggccaagaagagagatcctgtttctcacatttgtttcattgaagaaatagttaaggatggacaaccggaaattttctacacattttggaattcagttactcaggcactttcttctcaatttcatatggcaacaaactcttcgatgtttttgaagcaggcatttgaaggagaataccctaaattattacgtctttataatgacttatggaagcgtcttcaacaatacagtcagcatatccaagggaattttaatgcaagtggaactacagacctctatgttgacctacaacacatggaagatgatgcacaagatatattcataccaaaaaagccagattatgatccagaaaaggctttgaaagactcactacaaccctatgaggctgcttatctatcaaaatccttatctcgactcttcgatcctatcaacttggtttttcccccgggtggtcgtaatcctccttcctctgatgaacttgatggtattattaaaactatagcaagtgaactaaatgttgctgctgttgatacaaacctcacattagctgtgtcaaaaaatgtggcaaagaccatccagttatacagtgtaaaatcagagcagcttctctccacacaaggagatgcaagtcaggtgattgggcctcttactgaaggacagagaagaaatgtggcagtagtgaattcattgtataagttgcaccaatcagtaacaaaggctattcatgctcttatggaaaatgctgtgcaacccttactcacttctgtgggagatgctatagaggccataatcatcaccatgcatcaagaagacttttctgggtcattatccagctcaggaaaacctgatgttccttgttctctgtacatgaaggagctacaaggtttcattgccagagttatgagtgactattttaaacactttgaatgcttggattttgtctttgacaacactgaggctattgcccaaagagctgttgaactttttatccgccatgccagtctcataagacctcttggtgaaggtgggaaaatgcgacttgctgctgattttgcacagatggagttggctgtgggtccattctgtagacgagtatctgatttaggaaagtcctatcggatgctgagatcattcagacctctgctcttccaggcaagtgaacatgtagccagtagtcctgcattgggggatgtgattccgttcagcatcattattcagtttttgttcacgagagcacccgctgaactgaaatctcctttccagagggcagagtggtcccacacacgcttctctcagtggctggatgaccatccatctgaaaaggacaggctcctcctcatcaggggagccctggaagcttatgttcaatcagtgagaagtagagaaggcaaagaatttgcaccagtttatcccataatggttcagctgcttcaaaaggctatgtctgctcttcagtaatgacatgaaatctttgttcatctccactttgtgctaacccattcatagttggcagttaaacacatactccaaaagactgctactatctactattttaagaatgtaattgattgttcggtatttcctatcgacgtttatttacctctttagcacttatactttagcataaaaaatgttgagttatcaccacctttcaattccatggacctgatttttccagaaagatgttttcctctttcagatttttgtacaaggctaaaatgtctttcccatccataaccaagtcctcctatgggtacataaacccaaagtccccacttcttttaaagggatatgatcaagttataacatgtaccctgcttcccccaaccctgccttcttcactaaataagcatgtagctcagtggtttccaaatttggctgcacattcataccaatcaccaggggatttttttaaaatcctgatgcccaacttgcactccacattaattaacatgtctaggagtgggagcctgacagacaccactattaaaaaaaaaaaaaatccccaaaatgattccaatagacaacaaagttgaggaaccactggcacatcccaagctaagatacaaggttaaatggcctttttaagtatgtcatactggatctttaaataaagcaaggcttttgttacactttgtcatgttattaaaagcagacctttgggctgtttaaccgtgtaacaaaaatgccacgtgaaaaataaaaatttttattgtatagcaattctctataaatagtagataatctaagtccttattttctgatggctcttgttccactattaacattgtttttaatttttaaaatcctatcagcagcctcctaattagcagtgttaggaatttgccttatgttttccatctcatctcctgaacctgttattctgagaactcataaataaaattcagccaagattaatcaatcaatc

SEQ ID NO: 31563 - DNA, 2793 bp, Homo Sapiens
ggggcatgccgggagtggttgtgtacggtccgcagcggcaggtgaagtctagcagaggacgcggccaggcgattcggtgaagcgattcctgcaggcgttggttcccctctttgacctggatttgaatttgttgaaatgagcagtcgtaaatcaaagagtaacagcttaattcacacagagtgcctttcacaggtacaaagaattttacgtgaaagattttgtcgtcagagtccacatagtaacctatttggagtgcaagtacaatacaaacacttaagtgagctgctgaaaagaactgctctccatggagagagtaactctgtccttattatcggaccccgaggatcaggaaaaactatgttaataaatcatgctttgaaagaactcatggaaatagaagaagtgagtgaaaatgtattacaagttcacttaaatggactgctgcagatcaatgacaaaatcgccctaaaggaaatcacaaggcagttaaatctggaaaatgtagttggagataaagtttttggaagctttgctgaaaacctttcatttcttctggaagctttaaaaaaaggtgaccgaactagcagttgcccagtgatcttcatattagatgaatttgatctttttgctcatcataaaaaccaaacacttctctataatctttttgacatttctcagtctgcacagaccccaatagcagttattggtcttacatgtagattggatattttggaactcttagaaaaaagagtgaagtcaagattttctcaccggcagatacacttaatgaattcatttggttttccacagtatgttaaaatatttaaagaacagttatctctacctgcagagtttccagacaaggtttttgctgagaagtggaatgaaaatgttcagtatctctcagaagatagaagtgtgcaagaagtactacagaagcatttcaatatcagcaaaaacctgcggtcattacacatgctattgatgcttgctttaaatcgagtaacagcatcgcacccatttatgactgccgtagatctaatggaagcaagccaactgtgtagcatggactcgaaagcaaatattgtacatggtctatcagtcttggaaatctgtcttataatagcaatgaaacatttaaatgacatctatgaggaagagccatttaattttcaaatggtctataatgagtttcagaagtttgttcaaaggaaagcacattccgtttataattttgaaaaacctgttgtcatgaaggcttttgaacacttgcagcaattagaattaataaagcccatggaaagaacttcaggaaattcacagagagagtaccagctgatgaaactgcttttggataatactcaaattatgaatgctctgcagaaatatcccaactgtcctacagatgtgaggcagtgggcaacatcctcactaagctggttatgaatataaccagtgacttcaactttggcatttcattcatacttctgtagagaacggaaaactattgtccattaacatgatatgctaaacattctataaacattcttgtatttatgtgagacttgcccatctactgtcttggctgtgtcttgccttttaatcatgaacagttacatgatttataatttcactgattgagattactttgtaagtagctgttcagaagaataaaatatgactgttttagggactagaccatgtgcttttttaacacttatatatataatggtctatttgaagagctcacttcaacctaacagctagatgtctttacaaaccttaaaccaaaggagtaaaaaaaacaatggtaagcactgaagtataataagtaacctttggtacagcaggtttgctgcagtgtttttttctgtccacatgcaaattttggattctatcccagacccaggttttctagttcagaagactaaccagcttagtcagaagatggttccatggaagaaaaaggccaaggagtttgaagatttttcttctagacatctcaaaatgtggtactcataccatccacatcagaatcccttgtaggattttctaaaattacagattgttgagcctaccataggtcaaaaggactggaattttccttcttaacaagtatagtcatggcaccacgtaacattttggtcaatgacattgtataaagggtggtctcataagattataccatatttttactgtaccttttctatgtctaaatatacaaatgttttaccattgtgttacagttgcctacagtatgattacagtaacattctgtacagtgctatagctgaagagtaataggctaggctatctgtatagcctaagtgtgtaacaggctatatacatatcatcagggtctgtgtaagtatactctgtgatgttcatacagtgatgaaatcacccaaagacacatttctcagaacgtagccccatcatgaagtgacgtgactaccagagatttctggaaaagcactcccaaaagtaatgagatgtgtatggcaatgttaactgaacctgtttgtattaaaaagtaaatccctatgaggaatgtggaaatgtccgtcaaagcattgtcttttaagtaagttccaagatccatgaattaacagaggcatatatttaaaatgaaatttaatgagcacttagtgacttcatttgttcaagaatatttgatttcctattgtgtgcatgggaggtttacaaaagacagactgtccctatgcttgtgcagcttacaatctatttaactattagaggccctgtgagatgtaggcagttatttacagatga

SEQ ID NO: 31564 - DNA, 2392 bp, Homo Sapiens
tttttttcccggctgggctcgggctcagctcgactgggctcggcgggcggcggcggcggcgccggcggctggcggaggagggagggcgagggcgggcgcgggccggcgggcgggcggaagagggaggagaggcgcggggagccaggcctcggggcctcggagcaaccacccgagcagacggagtacacggagcagcggccccggccccgccaacgctgccgccggctactccctcttgatgccctcccctttgcccctcactcaggatgctccagaccttgtatgattacttctggtgggaacgtctgtggctgcctgtgaacttgacctgggccgatctagaagaccgagatggacgtgtctacgccaaagcctcagatctctatatcacgctgcccctggccttgctcttcctcatcgttcgatacttctttgagctgtacgtggctacaccactggctgccctcttgaacataaaggagaaaactcggctgcgggcacctcccaacgccaccttggaacatttctacctgaccagtggcaagcagcccaagcaggtggaagtagagcttttgtcccggcagagcgggctctctggccgccaggtagagcgttggttccgtcgccgccgcaaccaggaccggcccagtctcctcaagaagttccgagaagccagctggagattcacattttacctgattgccttcattgccggcatggccgtcattgtggataaaccctggttctatgacatgaagaaagtttgggagggatatcccatacagagcactatcccttcccagtattggtactacatgattgaactttccttctactggtccctgctcttcagcattgcctctgatgtcaagcgaaaggatttcaaggaacagatcatccaccatgtggccaccatcattctcatcagcttttcctggtttgccaattacatccgagctgggactctaatcatggctctgcatgactcttccgattacctgctggagtcagccaagatgtttaactacgcgggatggaagaacacctgcaacaacatcttcatcgtcttcgccattgtttttatcatcacccgactggtcatcctgcccttctggatcctgcattgcaccctggtgtacccactggagctctatcctgccttctttggctattacttcttcaattccatgatgggagttctacagctgctgcatatcttctgggcctacctcattttgcgcatggcccacaagttcataactggaaagctggtagaagatgaacgcagtgaccgggaagaaacagagagctcagagggggaggaggctgcagctgggggaggagcaaagagccggcccctagccaatggccaccccatcctcaataacaaccatcgtaagaatgactgaaccattattccagctgcctcccagattaatgcataaagccaaggaactaccccgctccctgcgctatagggtcactttaagctctggggaaaaaggagaaagtgagaggagagttctctgcatcctccctccttgcttgtcacccagttgcctttaaaccaaattctaaccagcctatccccaggtagggggacgttggttatattctgttagagggggacggtcgtattttcctccctacccgccaagtcatcctttctactgcttttgaggccctccctcagctctctgtgggtaggggttacaattcacattccttattctgagaatttggccccagctgtttgcctttgactccctgacctccagagccagggttgtgccttattgtcccatctgtgggcctcattctgccaaagctggaccaaggctaacctttctaagctccctaacttgggccagaaaccaaagctgagcttttaactttctccctctatgacacaaatgaattgagggtaggaggagggtgcacataacccttaccctacctctgccaaaaagtgggggctgtactggggactgctcggatgatctttcttagtgctacttctttcagctgtccctgtagcgacaggtctaagatctgactgcctcctcctttctctggcctcttcccccttccctcttctcttcagctaggctagctggtttggagtagaatggcaactaattctaatttttatttattaaatatttggggttttggttttaaagccagaattacggctagcacctagcatttcagcagagggaccattttagaccaaaatgtactgttaatgggtttttttttaaaattaaaagattaaataaaaaatattaaataaaacatggcaataagtgtcagactattaggaattgagaagggggatcaactaaataaacgaagagagtctttcttaaaaaaaaaaaaaaaaaaaaaa

SEQ ID NO: 31565 - DNA, 2782 bp, Homo Sapiens
ctatcccctctgggaggtgagtcagcgcggaacctctgcatctacggcgagctttcctggcctgggcgttggactcgcagttctgccttcccaggaccctgcccttccccagaaggagcaggagaaaatgaccaagtttcaggagatggtgacattcaaggatgtggctgtggtcttcaccagggaggagctggggttgctggaccttgcccagagaaagctgtaccaagatgtgatgctggagaacttcaggaacctgctgtcagtgggctatcaacccttcaaactagatgtgatattacagttgggaaaagaagacaagcttcggatgatggagacagaaatccaaggagatgggtgttcaggacacaagaatcaaaatgagatagatacccttcaagaagtaagattaagattcctttcatatgaagaccttatatgctggcaaatatgggaacaatttacaagtaaattaaccagtaatcaagacctaataataaatcttcaaggcaagaggtccaagttgctaaaacaaggtgattccccctgtcaggtgtggacaggagaatctagtcaggtctctgaagatgagaactatgtaataaagctacaaggggagagttcaaatagcataaaaaatcaagagcttccattgaggaccacctgggatttctggaggaaaatgtatctgagagaaccacagaattatcagagtaggtgtcagcaaattgatgtaaaaaataagctctgtaaatgtgatcattgtgttaggcaaagaattgctcatcaacatgatgatcatggagtacacaaaagagagaaagcttttagccacaataattgtggaaaagactgtgtgaaggaatcatcccagcatagcataatccaatcaggagagcaaacctctgatgaaaatggaaaaggcttaagtgttggctctaatcttgaacttcaccagcaactacacttaagagacaagcctcatgtaaatgttgagtacgggaagggcataggttacagctcagggcttcccaggcatcagtgtttccatataggagagaaatgctataggaatggtgacagtggtgagggcttcagtcagggctcacatctgcaacctcatcagagagtcagcacaggagagaacctctacagatgtcaggtatatgcccggagctccaaccagaactcctgtcttccctctcatgagcttactcacccaggagagaagttgtgtacatgtggcaggtgtgggaagggcttccatcatagcttagattttgacattcactgtgtagacagtgctggagagagagcctgtaaatgtgatgtatatgataaaggcttcagtcagacatcacaacttcaagcccatcagagaggtcactctagagacaagacatacaaatgggaagtaagtgacaggatatttaataggaattctggtcttcaccagagagttcacactggagagaaaccatataaatgtgaggtatgtgataagggcttcagtaaggcctcaaatcttcaagcccatcagagaatccacactggagagaaaccctacaaatgtgatgtgtgtgataagaacttcagccgtaattcccaccttcaggcccatcagagagtccatacaggagagaaaccctacaaatgtgacacatgtgggaaggacttcagtcagatctctcatcttcaggcccatcagagagttcacacaggagagaagccatacaaatgtgagacatgtgggaagggctttagtcagagttcgcatctccaagaccatcagcaagtccatactggagagaatccctacaaatgtgatgtgtgtgggaaaggcttcagttggagttcacatcttcaagcccatcagagagtccacacaggagagaaaccatacaaatgtgaagaatgtaggaaaggcttcatctggaactcatatcttcatgttcatcagaggatccacacgggagagaaaccctataaatgtggcatgtgtggtaagagcttcagtcagacttcacatcttcaagcccatcagagagtccatactggagagaaaccatacaaatgttttgtgtgtggtaagggctttagtaagagttcgttgtcttcagattcatcagagagtccatgatggtgatgaatctattaatcatgatgagtgtgataggggtgctcttcaagacttagacttcccattttcctcagaaaatccacacagcacagaatatttataaaatgtcatgttttaagaattcatgagctgagtttttatagttatctgaattccattgaagaaaacctatttttgtatgaatatgaccagtttcaagcagagcccaaaatgtcacagttgtcaagagaacacacaacagagaaaccctataaagaatgatacaatatgtttcaatcagaaccttcacatccaataagcaatatgcaggagtgaagccttcaaaatgataagtaaggtcagaatttagcaaaagtataatgagggacatgacaaaatctgtgtccactagaatctaagctccatgcaggaacattgtttactgctgcatgatcgtgaccttgaacaagtacctaagaaatagtggcttccctggaattgtttaacttgataggaaaaatctatcatatataggacatatatttgaatattttagtgagctcagccccaattcgtcattataattgtactgggaaaaggattcttgcaagaagccttaaaatgaattcaaggaaatgacatttaattaaaacacataaaacc

SEQ ID NO: 31566 - DNA, 4119 bp, Homo Sapiens; identical to SEQ ID NO: 24991

SEQ ID NO: 31567 - DNA, 4204 bp, Homo Sapiens
ggggttcggcgacgcggagggagggagagtctgggccgcgcgggagccgcagggcgccctagccttcgcagaaacgatggcggacgaagaaggaccacctgtagagctgcgccaaagaaaaaagccaaagtcttcagaaaataaggaatctgccaaagaagagaaaatcagtgacattccaattcctgaaagagctccaaaacatgtattatttcaacgctttgcaaagattttcattggctgtcttgcagcggttactagtggtatgatgtatgctctctacttatcagcataccatgaacggaaattctggttttccaacaggcaggagcttgaacgggaaatcacgtttcagggtgacagtgccatttattactcctattataaagatatgttaaaggcaccttcatttgaaagaggtgtttacgaactgacacacaataacaaaactgtatctctgaagactataaatgcagtgcagcaaatgtctctgtatccggaacttattgctagcattttatatcaagccactggtagcaatgagattattgagccagtgtatttctatattggcattgtttttggattgcaaggaatatatgttactgctttatttgttacaagttggcttatgagtggaacatggctagcaggaatgcttactgttgcgtggttcgttattaacagggtagatacaacaagaattgaatactccattcctttaagagaaaactgggcactaccatattttgcatgccaaattgctgcacttacaggctatttaaaaagcaacttaaatacttatggagagaggttttgctacttgttgatgagtgcttcaacttacacatttatgatgatgtgggagtatagccactatctcctgtttcttcaagcaatatctctattcctgctagataccttttcagtggagcaaagtgacaaggtttatgaagtttataaaatctacatattttccctctttctgggatatttactacagtttgagaatccagctttgttggtatctcctttattaagtttagtagcagccttaatgcttgctaagtgccttcagctgaatgtgaagaaaggaagttttgtagctaaaataataaaagtgattaatttttacttggtgtgtactctgacaataacattgaatattataatgaagatgtttgtcccacacaaagaaaatgggcacatgctgaaattccttgaagtaaaatttggactaaatatgaccaagaattttacaatgaattggctcctctgtcaagaatccctgcaggcaccatctcaagatttttttctgcgattgacacagtcttctttattacctttctacattctagtgttaattatttgttttctttctatgttgcaagttatttttaggaggattaatggtaagtccctgaaggaaactgttactcttgaagatggacgaattggagaaagaccagaaataatttatcatgtaattcacactattttattgggttctcttgcaatggttatagaaggcttgaagtacatctggattccttatgtgtgcatgttagcagcatttggtgtatgttctcccgaactttggatgacacttttcaagtggcttcgattaagaactgtacacccaatattgttggctcttattctgagcatggccgtgcctactataataggtctcagcttatggaaagagttttttcccagattaatgacagaattaatggaactacaggaattctatgacccagatacagtggaacttatgacctggataaaaaggcaagctccagttgcagctgtgtttgcagggagtccacagttaatgggtgcgattaaattatgcactggatggatggtgacaagtttgcctctttacaatgatgatgatcttctcaagagaaatgaaaatatctaccaaatctattcaaagcgatctgctgaggatatttataaaatactgacatcttacaaagctaattacctaattgtagaggatgctatctgcaatgaggtgggacccatgagaggctgtagggttaaagatttattagacattgcaaatggccacatggtttgtgaagaaggtgacaagctaacctactcaaaatatgggcgattttgtcatgaggtcaaaattaactattctccatatgtgaattatttcactagagtatactggaacagatcctactttgtatataaaatcaacactgtgatatccttccagtcttgaaaaataacagagccttcatttcaaagactacctgaagtaaaatgcagttttcttctacctactcggtgtcttttgcagatcagagtatggacatttgaaatattgctgcttctttcccccttctgctgttaactggatccagagttctgtgggaaatagaagatcaagcattactgtcctttgattaaatgtgatatctaccactctgcaatattccagacaggtgtcttccttaccgttacatggtctttaacacttttactgattgcaatattttccccataaaatcttcattctattataatattgatcttgaatttgaatatgtgcaaggtcagatacatttctcaaacataacatttaataaataatgtgatataattatttaatagaaagaataattccgaccttcaagcaagtttctgaaggtattttatgatgtataacaactgaagttttacaataaaaactaatttaaatgttagctgaagatatgtggcatttaaattaaaatggaaattatataaaggaaagtgatttttaaggatatacataaagatatatttagaattttcatgatactgttctcctcatctactgcttatgttaagtgagaactttcttagtaatacataatgcatgatgttactgcattttctaaatgactagtaagtgattagttttttcacttatgcctattaatttgataccaatttaatcatgataaaacaataaccgttaacatatattttgttaaatggacatttaaaagaatgttgttcaggttttttttttttaaatactgatatggggcatacaatctattcacatgttttctactgaagtactaagtaaaaaaattaaatcattatcagaataaaaatatgtgttctaaaattagcaacaatttctggggatacatgcagatgttgttaaacgtacctctgcatacagatatattataaaacacaagcaatgttatttatgaaactgtgatgcagtcttcaacatcaagaaaaaatgacaactataataaaatttacaacacagtttcacagtctaaatgctatgttcctttaagtattttcatatttttaatcatttattaagagaaaattgtgaaaagttaatttggccttatagagagattcaggatagatgtagcctatagatgtgtcattttaataagttgggatacgtgtttagtttttccttatattcctgttcagtgaacagattttcataattctcacttgttaaagtgctgcaaaaattgcattttcagtactctaaattactacattagaagagagcatttctccattgtctttattttctgttatatatgtgttgtaaaagtacactacattagaagggagcttttccgttgtctttattttctgttatacatgtgttgttaaagtacatgcattcttagactaactctcagatgctttgctcttttggagctgaagaattgtttgatggtgatgtcatatatctgatagattagtttcagtggttctcatttcacttttatacgtaatttcttaactatattaagatagttgcaggcagtgtacctcaggttgactctgtacatctgaatagtgagtcactagtattttgcttcaagccttctgaaaatataaccatagttacctaagcacacagtgaatagtcacatggtagtacttgtgattagagcatgtaaaacaatgtaattgaaaagtcagcttccatattttgtaggggaaatagaacaccctactttttatctagtgtgaaatatttaatcgaatttttgttgatttatattatgttacctgtgctgaattaggtttggtacttgtgttttgtttgacatattagtaagttgcttttgcttctttctgtcaacttattttttaaataaaattgatctggaaaaattaaaaaaaaaagaaaaaaaaaaaa

SEQ ID NO: 31568 - DNA, 4654 bp, Homo Sapiens
gaccattgtgtatgattcgttgttgactgcagcatcactagatccgagtgatggtggacctgtgcaacagcaccaagggcatctgcctcacaggaccttctggaccaccaggacctccgggagccggcgggttgccaggacacaacggattggatggacagcctggtcctcagggcccaaaaggagaaaaaggagcaaatggaaaaagaggaaaaatggggatacctggagctgcaggaaatccaggggaaaggggagaaaagggagaccatggtgaactgggcctgcagggaaatgagggcccaccagggcagaagggagaaaagggtgacaaaggagatgtgtccaacgacgtgctcctggcaggtgccaaaggtgaccaaggcccacccggtccacctgggcccccaggccctccaggtcctccagggccccctggaagcagaagagccaaaggccctcggcagccaagcatgttcaacggccagtgcccaggtgagacttgtgccataccaaatgatgataccttggttggaaaagctgatgagaaagccagtgaacaccattccccacaagcagaatccatgatcacttccattggaaacccagtgcaagtactgaaagtgacagagacatttgggacttggataagagagtctgctaacaagagtgatgaccggatttgggtgacagagcatttttcaggcatcatggttaaggaattcaaggatcagccctcacttctgaatggcagttacacgttcatccaccttccatactatttccatggctgtgggcacgttgcttacaacaactctctctactaccacaaagggggttctaataccctagtgagatttgaatttggccaggaaacatcccaaactctgaagcttgaaaatgccttgtattttgatcgaaaatacctttttgcaaattccaaaacttacttcaatctagctgtagatgaaaagggcctttggattatctatgcgtcaagtgtggacggctcgagcattcttgtagcacaactggatgagaggacattctcagtggtgcaacacgtcaataccacgtaccctaaatccaaggctggcaacgccttcattgcccgaggaatcctctatgtcacagacaccaaagatatgagggtcacatttgcctttgatttgttaggagggaaacagatcaatgcaaactttgatttaagaacttcccagtctgttcttgccatgttagcatacaacatgagagatcagcatttatattcatgggaagatggccatttaatgctttatcctgtgcagtttttgtcaactaccttaaatcagtgatgtgctgcattcggctcccttcagcaaatttcaggggttttctgggaccagttctcccccaacaggaaacttgtttttttaacgtcagccagatatttagaaaataacctcaaaagtgtttatatggtcagtgagccccgcttagtgaaatagcaacagattggaagttgaaatggctgagatttggtgatctccccacagctggctctgcaagttacctctttctccttgggccttagtttccccattggtaatctgaattggctaagatgattggggagattttctgtacctgtaggtaatttggtgattcttggtggctgctcttctcacaacttttatgtatctgcttctgtcgtttagcttttttagccacatgctgaccaaatttacctttgagttgataagtccagtggcttgagtagtgaatccctcagtgctgacttatatcttgttctttgaaaaaatgcattgactctttaagacatctaaagtatcacattatccataatttattgcttttctttgcatctgcacctgccaccacagaataaccattaccctcagctgctgattgggcagctctgagattagcaaaagccagggacagctacatgttcaggtttttttttttttttttttcaataggctattttttttcttttcttattttaaatagagagagagtcttgctatgtttcccaggctggtcttgaactcctggggctcaagtgatcctcctgccttggcctcccaaaatgctggattacaggcatgtgtgcctggcccaggtttcttaataaaacagaatcatgatcttccaggttccccccagtttctgatcatgttgatttgtagctgtggatcatgaacactgaatccccagatcactctgacttcttatgcttctcctgtggatccactatcaaagtactaaatgctgtgtaagtagacgttaatctggctggaaccatgggaagcactttgcagtgttcagaagagaggctccatttgtggctattatgtagaactgggccagagccagtccattgcctgtttttttaaataaggttttactgagcacagccacactcatttgtttatgcagtacggcctgacattgcttttgctctgcaacagcagagtcgagtcattgcaacaaagagcatatggccccacagtgcctaaaatattgaccagctacccctttatggaaaaagattgctgactcctgataaagaatataaagtgagcctgattcttgaaaaaatcagaaccagagcctgttttgttttgttctaaactaagaagccgcataggatgtgacttgcgttttgagtagaggggaaggctgataacggcgtaagatgaagtggccctccacaaaggctggttaggggacagttctttctctaacatagttttaaaggatgtgatctggtccccttggatgccaggagagaatccagttgaacttgctcctaaatgctcttaaatatgcatattttctgccaactcacttctttaaacatctttcagcccagcgctgcggccccgggaagggccactgcgaatagagaggaagctggaaaagttcctggggctctgcagccaggaaggggaaccagggcaaatcttatgtaaagatttttcagcaacttgtcccaatttgtgtgtattctgaaactttctctttgggaccaaattcattctcaatggccctgagttcaatatattattaacagcagtattttaaaacttagggttgaactgggcatggtggcacataactgcaatcccagctactttggaggcagggatgggaggatcacttgaggccaggatctcaggaccagcctagagagatcccatctctaaaaaataaaatataagaaaataaaacttaggggatatacagatttaaatattcaaatctccctgctcccctgaaagtccccaggcagctgttaatgacttgtttgttgtgttctcaatatgatggctatttgaaacttcacctacttttcattagattggttgtaccatgtcaccttagcttttaaaaatactcttttcagattcacgttctctaacaaagagtctcatgttcaagatcaatatgtctaataagcgctggtgtccttttaaagtatttaaatatatatgttgctgttgctgaatacaggagaccaggttaggaatatagtttcataataatagtacatacaatactaattgtatataaggtagcaaccaaaagaggttgttaattagcacatattccttttagaaaaatgtttcagaaacctcagtcttgatatctgagctatctgggctcccttacttgtgagtaagggatcatgctcaccactggagaagcttacaccgggactttttttcttttttcttttttttttgctatgacagagtaatgctaacgtaaggacaactgagtttgatcagtgtttaatcgcagtgggtaatcttatctgattgtctttaaaagtgaaaaggattaagattttattctttcttgtaaacattacttgattttttaaagaagttttgggctcactgctaaaatagagtatacaactgaatgtttttaagtcaagatactgttttaggagtttaccctctcatttataaccaaagttgctctaaaacactttccaaatatctgcacttctgatgtcagaatcaaaccagataattctctaattcttctttaatctaaagtagatagcttcccactggaaagtaaacaaaaccatccctcccaacctcaaagctaggccacactctatttcaaggcattttctttcagctgataaggtgtcctcctgaagccaagtaggtggttctggtctccaagtatcgttaagcacaggtgctatgacagaaaaagttctggggtggaagttttaagatgaggagttctgatcttaggcatcttaacagtcacaaggtgaaaagtcaaatgaaacagtacaattcttgatgagtgaggtgtcatcttccaaccacacagaggacgttttggctatgatcatctgatggcaagtgaaggagaaatgagtgatagggctttgcgttttcatccagatgctgtggccctgtgtttcacagcattaagagccataatttccaacctgcacagatcctgaacaacaaatgaataacgatgaatgtctttttggttgtaatttaacaagtcaaataaataatcattgctgagcacaatcaccaaaaaaaaaaaaaaaaaaaaaaaaaaaaaaaaaaaaaaaaaaaaaaaaaaaagaaaaaaaaaaaaaaaaaca

SEQ ID NO: 31569 - DNA, 3023 bp, Homo Sapiens
ttgcctccgaccttggcccgcggccgccggtgagcctagacccgcgcgtctccatctacagcacgcgccgcccggtgttggcgcgcacccacgtccagggccgcgtctacaacttcctcgagcgtcccaccggctggaaatgcttcgtttaccacttcgccgtattcaagaaattaagcatacggtcacgagagtgcaaagttctgtgaaacgctccagtggttacacgccccggggtttcagcttcgaccctggcttcctcatcgtcctggtctgcctcatcttcagcgtgctgtccaccatcgagcagtatgccgccctggccacggggactctcttctggatggagatcgtgctggtggtgttcttccggacggagtacgtggtccgcctctggtccgccggctgccgcagcaagtacgtgggcctctgggggcggctgcgctttgcccggaagcccatttccatcatcgacctcatcgtggtcgtggcctccatggtggtcctctgcgtgggctccaaggggcaggtgtttgccacgtcggccatcaggggcatccgcttcctgcagatcctgaggatgctacacgtcgaccgccagggaggcacctggaggctcctgggctccgtggtcttcatccaccgccaggagctgataaccaccctgtacatcggcttcctgggcctcatcttctcctcgtactttgtgtacctggctgagaaggacgcggtgaacgagtcaggccgcgtggagttcggcagctacgcagatgcgctgtggtggggggtggtcacagtcaccaccatcggctatggggacaaggtgccccagacgtgggtcgggaagaccatcgcctcctgcttctctgtctttgccatctccttctttgcgctcccagcggggattcttggctcggggtttgccctgaaggtgcagcagaagcagaggcagaagcacttcaaccggcagatcccggcggcagcctcactcattcagaccgcatggaggtgctatgctgccgagaaccccgactcctccacctggaagatctacatccggaaggccccccggagccacactctgctgtcacccagccccaaacccaagaagtctgtggtggtaaagaaaaaaaagttcaagctggacaaagacaatggggtgactcctggagagaagatgctcacagtcccccatatcacgtgcgaccccccagaagagcggcggctggaccacttctctgtcgacggctatgacagttctgtaaggaagagcccaacactgctggaagtgagcatgccccatttcatgagaaccaacagcttcgccgaggacctggacctggaaggggagactctgctgacacccatcacccacatctcacagctgcgggaacaccatcgggccaccattaaggtcattcgacgcatgcagtactttgtggccaagaagaaattccagcaagcgcggaagccttacgatgtgcgggacgtcattgagcagtactcgcagggccacctcaacctcatggtgcgcatcaaggagctgcagaggaggctggaccagtccattgggaagccctcactgttcatctccgtctcagaaaagagcaaggatcgcggcagcaacacgatcggcgcccgcctgaaccgagtagaagacaaggtgacgcagctggaccagaggctggcactcatcaccgacatgcttcaccagctgctctccttgcacggtggcagcacccccggcagcggcggcccccccagagagggcggggcccacatcacccagccctgcggcagtggcggctccgtcgaccctgagctcttcctgcccagcaacaccctgcccacctacgagcagctgaccgtgcccaggaggggccccgatgaggggtcctgaggaggggatggggctgggggatgggcctgagtgagaggggaggccaagagtggccccacctggccctctctgaaggaggccacctcctaaaaggcccagagagaagagccccactctcagaggccccaataccccatggaccatgctgtctggcacagcctgcacttgggggctcagcaaggccacctcttcctggccggtgtgggggccccgtctcaggtctgagttgttaccccaagcgccctggcccccacatggtgatgttgacatcactggcatggtggttgggacccagtggcagggcacagggcctggcccatgtatggccaggaagtagcacaggctgagtgcaggcccaccctgcttggcccagggggcttcctgaggggagacagagcaacccctggaccccagcctcaaatccaggaccctgccaggcacaggcagggcaggaccagcccacgctgactacagggccgccggcaataaaagcccaggagcccatttggagggcctgggcctggctccctcactctcaggaaatgctgacccatgggcaggagactgtggagactgctcctgagcccccagcttccagcaggagggacagtctcaccatttccccagggcacgtggttgagtggggggaacgcccacttccctgggttagactgccagctcttcctagctggagaggagccctgcctctccgcccctgagcccactgtgcgtggggctcccgcctccaacccctcgcccagtcccagcagccagccaaacacacagaaggggactgccacctccccttgccagctgctgagccgcagagaagtgacggttcctacacaggacaggggttccttctgggcattacatcgcatagaaatcaataatttgtggtgatttggatctgtgttttaatgagtttcacagtgtgattttgattattaattgtgcaagcttttcctaataaacgtggagaatcacaggctgggctgggcactgctctcaccttggttcctggggcatccatggggtctctcacagacaggacccctgcagttcccctggaagcagtgcccaggtggctgtggaataggaacgctaaaaaaaaaaaaaaaaa

SEQ ID NO: 31570 - DNA, 4731 bp, Homo Sapiens
ggagtgaggacggtgacagccacgcgcgcgcgtacgcgcccgatgcagcgcggccccgtgaccctagtcggccgctgagaggcgcgcggagtctgggccgctgccgtctaggggtcccgtcccgaggcgtccccggcatctccggcccgaatcccggagtgccgggtcgcgcctgcaccgaaggtcccggctcctgtgccctccctgcagccgtcagggcccgtcccccaactcccctttccgctcaggcagggtcctcgcggcccatgctggccgctggggacccgcgcagcccagaccgttcccgggccggccagccggccaccatggtggccctgaggcctgtgcagcaactccaggggggctaaagggctcagagtgcaggccgtggggcgcgagggtcccgggcctgagccccgcgccatggccggggccatcgcttcccgcatgagcttcagctctctcaagaggaagcaacccaagacgttcaccgtgaggatcgtcaccatggacgccgagatggagttcaattgcgagatgaagtggaaagggaaggacctctttgatttggtgtgccggactctggggctccgagaaacctggttctttggactgcagtacacaatcaaggacacagtggcctggctcaaaatggacaagaaggtactggatcatgatgtttcaaaggaagaaccagtcacctttcacttcttggccaaattttatcctgagaatgctgaagaggagctggttcaggagatcacacaacatttattcttcttacaggtaaagaagcagattttagatgaaaagatctactgccctcctgaggcttctgtgctcctggcttcttacgccgtccaggccaagctcaccttgcagagcgccaagtcccgagtggccttctttgaagagctctagcaggtgacccagccaccccaggacctgccacttctcctgctaccgggaccgcgggatggaccagatatcaagagagccatccatagggagctggctgggggtttccgtgggagctccagaactttccccagctgagtgaagagcccagcccctcttatgtgcaattgccttgaactacgaccctgtagagatttctctcatggcgttctagttctctgacctgagtctttgttttaagaagtatttgtcttcctttgtctaatgtgggattcctgactcccttcgtccaaggcaccggtgtgtgtgtgtcttgcactccagagctgacctccaccgcccagcctgggaagtcattgtagggagtgagacactgaagccctgagaagccagtgccatcatccccaccccgcccagggttccggaacattcattcccccaccggtgaggacctggcatgcagcgaagcagcccagcccggcggatcccaggccagcacgcctgccggcttctcatcgtcagggagcccgcccagagctcgtgacgagcaagtgctgggtccccgccaggcaccccgaggcggcgctctggctggcagctggtggggaataggcagggcagctgtggctggggagagactttaggcagaagctgtgatgcaggctgactgccagccgaggggctgggtagtgccgtgcgggagctgatggtacagggcactcgctgtccccctccggccaccctagaccagggtccgagaggcaggcaggagccactcatgtcttccccattgcccgacgcccatagacgctccttcctgtgtggggctggggtactccctggtcgtactgcagtcagcacccgtaacccggctatgaccagggatctgtaagccctgtggctccacaggtgctgcttctcactggcccagactctgagctccaccggcccagtctgcacggcccatctgcttcaccttccctcccagccacgtgccagtggccacagcccacttcccaacccactgttgtacccaggcctcactttgctgttgcccttgtccctcttcgggccctgaattttctgttccctgggggccagccagggccctttgtgcccctcccagcacaggcctgatgcaggtgtccactcacaggtggcgctcacctaggctgtcacaggacccacctccatgccaggcaacagagggccacagaaccacccccacggctcactccttggtctggggccaccttcttgccctttctttttttttttttttttttttttccgagatggagtctctctctgtcacccaggtgggagtgtggtggcacaatctcggctcactgcaacctccacctcctgagttcaagcaattctcctgcctcagcctcccaagtagctgggactacaggcatgcaccaccacacttggccaatgttctgtatttttaatagggacggggttttgccatgttagctaggctggtctcaaactcacacctgggattacaggcatgagccactgcacccagccccttcttgccctttcttttctccatggctgatgctgctgtggccagccagggcccttgagatccttccagtttggctgttatgcaaagcaggtgatttgtcttaatcagataaaagatagaggctatgggggcctcaagatttttggagagcagaggtggtctctggcaattccatctggttttgagaaacttagcagctcacagagcacagagatcctgccttcttcctactatcaggctgacctaatggggttgggctgctcggcaactgcttgggtcaccttgccccaaggaaaccagccctgggtgccacccagccacttagggtctacagggtgggactccagacctagagcgtaagtatggatgttgtggccctgtgtcttcctagtgtgacccagccaggagcggaagcttcaggcgtttgtaaagtgaggtctggctctgcctcctccgttttttttttttttctgtttctgtttctgttttttttttgagatggagtctcgctctgtcgcccaggctggagtgcagtgtcacgatctcagctcactgcaacctccgcctcccaggtacaagagattctcctgcctcagcctcccgagtagctgggactacaggcgtgtgccaccatgcctggctaatttttgtatttttagtagagatggggtttcgccatgttagccagactggtctcgaactcctgacctcaggtgatcctcccaccccggcttcccaaagttctgggattataggcgtgagccaccatgcccggtctcttctcagtcttgaagcccatccctggatttccaccaggagttactttcctcctgacctgtaaatttgttctttaacaatggctgcaggtgggagcatatggtggtttataaaaacgctgtcgggctttgtttccttctttagctgccgtgtctacttctgaagtctgggaagtgccaagccacgcggcctcaagggagctggctggtgtttgagctgtggcagaagcacctggggctccagggagcaggctgggaactgcaggaccttgctcagccaggagcacttccccctccttgaggcaggaatactgaggtgcctccccacagatggagaaggtggagaggaggatgggcctcaggagcatctcaagccccagtagcaggagaaagaaagaaagagatgcctggttttcacagactggttcctgtggctgggatgactgcatccttttttttttttttttgagacggagtttttgcctttgtcgcccaggctggagtgcaatggcgtgatctcggctcaccgcaacctccgcctcccggattcaagcaattctcctgcctcagcctcccgagtagctgggattacaggcacgcacctccacgtccggctaattttgtatttttagtggagacggggtttctccatgtcggtcaggctggtctcgaactcccgacctcaggtgatctgcccacctcggcctcccaaagtgctgggattacaggcatgagccaccgcgcttggccagactgcgtcctttttaagcgaacattttagggcctgggagtttgtcaagtaaggaagtctcaagcccaaagagcagcgtcctgaccatggtggtttcattacgagcccttctgctggctctcaggcagaagccccacagcaccgggaccattcatgaggtcactgcccagctcatgatgtccgtgaggctgtccttttggccagtagccgtgtgcagctgtgtggcacagatggcttcgttcatcctgatcaaggccccacctcagccacagcagtccccccaacctgtgttgtccaccctattattcatgtacctgccaggccctgctagatagcaccccgtggcattacataacacttcatgagtggctgtgtcttgtaattttggggacaggtttctctctttccctctcttttttttgtcaaaagcccagagactgacaaccagctgcagtgtctaagtgttcctcactgacagggtggggcctcaccacccctggagggagcagcgttggcagggagacagcctggcccagtgaccctgggcccaagccagcccctccagggctttcagggaagcgccatccattttcaaagatgtcaaacgtcacttcttcctgtagggcccgagtcctgcctcctatcagggccagatcatagaaggctattttctattctggggaacgattataacttaaatgattgttttaataaaaattctaagctggaaaaaaaaaaaaaaaaaa

SEQ ID NO: 31571 - DNA, 2324 bp, Homo Sapiens
acagacactgatctcagtttcccccgagagtgtgagtgtaggcctctacaggcagctgcctctggggagttggggagcctaggggttaactctagacccccctcaaccctctggaccaaagtctgtccaggaaaacaggatgccggagcccaggagtcgtcagcctagcagttgcctggcctccagatgcctcccagggtcaccttccagccctgtggatggcagtggaatcaggacactcccttgaacagtgaatacgattttgccctggtcaacattggacgattagaggctgtgagcggcttgtcccgagtccagctcctccgtccagggtccctgcataaatttatccctgaggagattctgattcatggccgagacttccggctgctcagagttggttttgaggctggaggcctagagcctcaggcttttcaggtgaccatggccattgtccaagccagagctcagagcaatcaagcccaacagtattcggggataaccctgagcaaggctggccagggttctggctccagaaaaccaccaattcctctcatggagacagcggaagactgggagactgagcggaagaagcaggcagccagaggctggagggtcagcacggtcaacgagaggttcgacgtagccaccagcctcccccgttacttctgggtccctaaccgaattctggacagtgaggtcaggagagcatttggccactttcatcagggccgtggaccgcgcttgtcctggcatcgccctgggggcagtgatcttctccgctgtggaggcttctatacagccagtgaccctaacaaggaggatatcagagcagtggagttgatgctccaggctgggcattcagatgttgtcctggtagacactatggatgagctgcccagccttgcagatgtccaacttgcccacctgaggctgagggccctctgcctgcctgattcatctgtagctgaggataaatggctttcagccctggaaggaacacgatggctggactatgtcagggcttgtcttcgaaaggccagtgacatttcagtattagtgacatccagggttcgttctgtaatacttcaagagcgcggtgatcgtgatctcaatggcctcctctcttcactcgtccagctgctttcagcccccgaagcccgaacactgtttggcttccaatcactagtacagcgagagtgggtggcagctggacatcccttcctgactcggcttgggggaactggggccagtgaagaggctccggtgtttctcctcttccttgattgtgtctggcagctcctccagcagtttccagctgattttgaattctctgagtttttccttcttgctcttcatgacagtgtcagggttcctgacacccttaccttcctgagaaataccccctgggagcgcggaaagcagagcggacagttaaactcctatacacaagtctacaccccaggatactcccagcctccagctgggaactcttttaacctgcagctgtctgtctgggactgggatttacgttatagcaatgcacagatactacaattccagaatcctggctatgacccagaacactgtccagattcctggctccctagaccacagccaagcttcatggttcctggaccccccagttctgtgtggctcttctctagaggagcattgacccccctgaatcagctctgtccttggcgggacagtccttccctgctggcagtctcttctcgttggctccctcgacctgctatctcctctgaaagcctggctgaccaggaatggggtctcccctcacattggggagcttgccctttacctccagggctgctgctgcctgggtatctgggaccccagatcaggctctggagacgctgctacctgaggggaaggcctgaggtccagatgggcctctcagctcccacaatctctggcctccaggatgagctatcccatcttcaggagttattacggaaatggacaccaagaatatctcctgaggatcactccaagaaaagagatccacataccattctcaatcccactgaaattgctggcattctcaaaggccaatcccatcccttctggataaccagatgttaaatcatgagatcagagatgctgttcatcagtcccaacaagatggcctagaaatcgcattctcacctcgccttgctgctgctttaattccaagttctatttcttcccttatagttttctatgggaatgaggcggatacaggaaacaccctatctcctctgtatttttgtagtggaatttctatttaaggggctcattaaagcatagtatttatacac

SEQ ID NO: 31572 - DNA, 4087 bp, Homo Sapiens
acatgcaaaaagtggggcctggagatggggctgtcttttttctccaaacacttgcccatccaggaaggccagccctgggcattgaagactccagctgacatcatctctaccgttgagttcaaccacacgggagagctgctggccacaggtgacaagggcggccgggtcgtcatcttccagcgggaaccagagagtaaaaatgcgccccacagccagggcgaatacgacgtgtacagcactttccagagccacgagccggagtttgactatctcaagagcctggagatagaggagaagatcaacaagatcaagtggctcccacagcagaacgccgcccactcactcctgtccaccaacgataaaactatcaaattatggaagattaccgaacgagataaaaggcccgaaggatacaacctgaaggatgaagaggggaaacttaaggacctgtccacggtgacgtcactgcaggtgccagtgctgaagcccatggatctgatggtggaggtgagccctcggaggatctttgccaatggccacacctaccacatcaactccatctccgtcaacagtgactgcgagacctacatgtcggcggatgacctgcgcatcaacctctggcacctggccatcaccgacaggagcttcaacatcgtggacatcaagccggccaacatggaggaccttacggaggtgatcacagcatctgagttccatccgcaccactgcaacctcttcgtctacagcagcagcaagggctccctgcggctctgcgacatgcgggcagctgccctgtgtgacaagcattccaagctctttgaagagcctgaggaccccagtaaccgctcattcttctcggaaatcatctcctccgtgtccgacgtgaagttcagccacagcggccgctacatgctcacccgggactaccttacagtcaaggtctgggacctgaacatggaggcaagacccatagagacctaccaggtccatgactaccttcggagcaagctctgttccctgtacgagaacgactgcattttcgacaagtttgaatgtgcctggaacgggagcgacagcgtcatcatgaccggggcctacaacaacttcttccgcatgttcgatcggaacaccaagcgggacgtgaccctggaggcctcgagggaaagcagcaagccccgggctgtgctcaagccacggcgcgtgtgcgtggggggcaagcgccggcgtgatgacatcagtgtggacagcttggacttcaccaagaagatcctgcacacggcctggcacccggctgagaacatcattgccatcgccgccaccaacaacctgtacatcttccaggacaaggtaaactctgacatgcactaggtatgtgcagttcccggcccctgccacccagcctcatgcaagtcatccccgacatgaccttcacgaccgcaatgcaaggaggggaagaaagtcacagcactgatgaggacagctgcagaggtggcagtgtgtggacacaggaagtttgggccccctccctgccccagctttcctaggccagaattgtgtttggcagtaattgtctgtttaaaaaaataaaaaggaaaggaagcgttcaccgccacaaatcataaaatggacatgactgtggagtcttacagttcagggttctttcattcacgtcccttcctgtctcggtctgcggtctttaccacatcaataggactttttatgcgtccgggttaatttttcactccagtgcgtcctgttgcagggaccggagctgatgggagctgcttctcccccatgcctcactggtcccagatcagggctccagggacagatgatgagtctcaaacgagccagccaggggttcttttggttataaatggggcaattcgccctgtctcagagctgatgacctcaccgttgttttttggatggtgaattcatgctgagaatttgcagatgcaagctcctctcctaggtcttctgaatgtcttgaaacatcccaggtcccaggtctggtgcggtttcccgagaggagcggagtggggtttgtcttctgtgtgcctgtgtcctcatctgattcacctgccatttgctgagcctctgctgtgtaccaggcgtggtgctcagccctagaggcagttgacttaccctctgcagccctccctgccgcctcacccttcagcattcactgggcaccttcccggagcggacactgactcccatgcacgattttttggaatcttcctcctgactgtgaggtgggtgttcattcatttcctccataaacaccaacttctcgaagcgtgccaggctctgggctggatgctggggataagcgggaacccttaggatcccctctgtccacgagaagaagctgaggctctgagcggatgcacaggtcacccatggcaggtgccgtgcagtggtgtcaggaacccgtccgggtcttcacacaaggttctctccagtccatctcgtgggcggctcatgttagagcgacattcaaatggaaggtttggaaaggaatgcctctgtcttgtgaagtaggacaagggtccaggagaactgagacgcaggatggaagacagagaagaccccccggagctcctcgctctgcttggtggcttcaggagtgtggccctccccaggactccacttcatcctgggcttgcaccctccttgagccaatgcactgaactgcctttgaaaggaaattgcatgttctgaccattttaggatacctttactttaaggaccacacagtcccagaggacacatccctcgggaactctgcccctctgacaatgagggccacagagaaggtggtgtttccatggtagatgctcctgttctggtgataccaaacctgcccacccctctgagtcgtctttgctcatggacttgcagcagagccacgtagtttggcattttgattcagaaagtggggagcagagacccagccaaatccaaactttttttttggttttgttttgttttgttttttacaagatataacataacccaggaaacagacccagctgaggttattctcagtggattacagtatacttttgtgtgtgtaaaagcacaaagtgcatgtgtactcacttctggccatataacatttacacagggaaatggatcattgatttttttttaatcaacgtgaatgaagaatgtttgtttatatatcactataaaatccagttgacctggacagtattatatgtacatatctattctaattaaatttaacaatcaaaggattggattacttttttcccccttgtaaagaggttcgagaatgtggtcaattgtatagatagcgtgttaaagccaaaacccagctctgagggccttacccattacttggatatttgctacgatccatctccctttgtgagtcaaatgttaagagaagaaacttgtatttgcagctagaggttactgtcacatcatagatttaacatttaccatcttcaaagtacaaatcttacatgtccttcaaaaggaggtcttaatacagttcctagttccttacttctgttttaaactttgggtaccaaaccaaaaagaagaaaaaagaaaggaaaagatcttctttgaagaaaagtatgtctctggatccctggaaaataatgatgtccaaagcaaattgtgaagatcaaatgtgtgttaagaaaaggtgtcgaggggagggacaaaaccagaaacggtggaaggaccagtgtaatagtcacagacttgcatcctggctctgcttacatttcctggtactctcgaatgtacgggcgttcacatagtcattgtgaagttgttggggtttttttggttttgtttttaatttagctcttctctgaggacgaagctgttggtggtggtggtggtgggggtggtggtgtgggatacatggtggtcaagttgtcagccctgatcagtttggactctgtaactcataggtgcattctttttttctttggtgtctcacaaattacccaattgttgaataaaactataaatatgttaataccagctttttccaataaaataacaaatgttacatcaaaaacgaaaaaaaaaaaaaaaa

SEQ ID NO: 31573 - DNA, 5627 bp, Homo Sapiens
ccccagcagccgccccagccgcagccgcagccgcccggctcgtctgccaccaccccgggcggcggcagcggcggctcgctcagcgccatgccgccgcccagccccgactcagagaacggcttctaccccgggctgccgtcgtccatgaacccggccttcttccctagcttctcgcccgtgtcgccgcacggctgcactgggctcagcgttccgacgagcggcggcggcggcggcggcttcggcggccccttctcggctaccgctgtgccccctccgccgccgcccgccatgaatatacctcaacagcagcccccgccgcccgcggcgccgcagcagccgcagagccggaggtcgcccgtcagcccgcagctccagcagcagcaccaggcggcggccgccgccttcctgcagcagaggaactcctataaccaccaccagcctcttctgaaacagtctccctggagcaaccatcagagcagtggctggggcactggaagtatgtcctggggagcaatgcatggcagagatcatcgtagaaccggaaacatgggaatcccaggaactatgaatcagatatctccattgaagaaaccgttttctggtaatgtcatagcaccaccgaaatttactcgctcaactccatcactgactccaaaatcttggattgaagataatgtgttcagaacagacaacaatagtaatacactcttacccttacaggtgagatctagtttgcagttgccagcttggggctcagattcactccaagatagttggtgcactgcagccggaacatccagaatagaccaggatcgaagtagaatgtatgacagtttgaatatgcactctttggaaaattcccttatcgatattatgagagcagagcatgatcctcttaagggtcgattgagctatccacatccaggaactgacaatctgttgatgttaaatggtcgttcttccctctttccaatagatgatggcttgcttgatgatggtcacagtgatcaagttggagttttaaattcacccacctgttattcagctcaccaaaatggagagcgaatagaacgcttctctcgaaaagtttttgttggtggtcttcctccagatattgatgaagatgaaataactgctagcttcagaagatttgggcctttggtagtagattggcctcataaagcagaaagcaagtcctattttccaccaaaaggctatgcatttcttctctttcaagaagagagctcagttcaggcactcattgatgcttgtattgaagaagatggaaaactctatctgtgtgtttctagccctactatcaaggacaaaccagttcaaatacgtccttggaatttaagtgatagtgattttgtaatggatggttctcagcctttggatccccgaaaaacaatttttgttggaggtgttcctaggccattaagggctgtggaacttgctatgatcatggaccggctgtatggtggagtttgttatgcaggaattgatacagatcctgagctaaaatacccaaaaggtgctgggcgagttgctttctccaatcagcagagctatattgctgccattagtgctcggtttgttcagcttcagcatggtgatattgataaacgtgtggaggtaaagccatatgtgctagatgaccagatgtgtgatgaatgccagggcgcacgctgtggtggaaaatttgctccctttttttgtgccaatgtcacttgcctgcagtattactgtgagttttgttgggcaaatatccactctcgtgctggacgtgagttccataagccattggtaaaggaaggtgctgatcgcccacgtcagatccacttccgctggaactaagaatagcaaactggcctctgtttaacaaggaaagaaagggtgcatgtggcttactgtgtctgaagatactgacatgcagaagaaataagtgcattcttctgcttttcaccccagctatcaatacatgcatctttatcagcagccaaaacactacaagcctcttgtttttcaccaaaaccctacatctcaggcttactaatttttgtgatattttcatgttcaaataaaatgtttttttgtattttctccaagttatttttatatgtaaagttaaaattagatatgagaatgttttgcgtaggggcaacacagtctgctgctatatagtgggggaagcgtgcacttatttctaaacatgggtttttaacttcaagatctgccccagtaatttaccaaaggtagcaaaataatagtgaagatggaatatgtctgctacaaatgcttatttttattgttgctattttcagtgtatacataaactaaaaattagggttgatttttttgctctccattttgacttgcaagaaataatacctcaagataatctgatttattagctatttttaaacatttttaatcacaagctgtattagctttgctgctatataggtgttatgtgtaaatgccacctattaatacgggactgaaaacgttagagacacactgcattgcagataaaatgcaggcagcacaatatggcctaaactgccatagttttagaatgtgaaaaaaatgcatgtttacttacctgtatacaccatatgcatgcactagaattattaactaacgaggtgaggtattgcaaatgttcaaaaaagctctcttgaatctaggtagcatgaacaaattataaaatttgtttaaaaaagcaaacttgcatgcattattgtgacttcaagtttaaaaaatcgtcttacatgtgtacaatatgcaaattagttttagattagagagtgcagccattttgtgatctggtcagtagtggaattcgattttatgcagactggatgtaatatttgtaatccctgtgcaattttgtgacgtgcggttctaattcatgtgcagtgatatagtatagataaaagaatgagtaaaagaaaatacaagaattctaaagaaagttggttttagcccctttgatagtccatggttaagacatcctttataaaccaaagatggccagcacactgctaaccagtcaccaaatgtaagacccataagaaacccatatttaaaaatctgaattttttagaagaatgcaaaactttagtaaaccctaagtaaagtcaaaatggagaaggggaaatatacagatggctagttgcataaaattaaattttacctttataagacaatggtgaaatctggcttgaacttgcttatgtgtttaacctataaatattggggtcttctgtctaaactggggtcactgttgcatggaacattgttcttaatagttgagaattgcttttttgaaaattttcatgaaggaattttggtaatgactttgcttgcaggttttttggggtgttttgagaaagtggcatggaaacatgcagtagttaatgagtttctcttggtactgaacactattagaatatcattagtgatattttttctctttagagcatttttaatgcaactagcccctatattttaatgtaagagttactctgcaatctaagcaaagcacccaacaatggtaaatgttttttaaaaatgcagaactaagatttttgactctaaagagagaaaattacaagggtgttgccttatagcaaacccttgggacaatccttcatgtgagcaaagtgttgatcttaatattggttgtctgtggtgtgcttttttgtactgtaaaaatatgtggttcatgtctaactctgctgttttattgtggttgtggttcaagtttttaatgtttaaagttgatgctgttttcagaagagctttttactaatttatttgtcagtgttccctatttgttacttaaccatgatcctccagattttttggagtattcttttctaaccttaaccctgccaaaccttgatccattttgacatttgttatgcactatttttatatctctgtgagagatttttccaacagtcagctattttatggcacactttttttgactgatgacatctcctttgctatacctcaatttttggaatttagagaagaaatcagtagttttgcaatgttaattatttagatatttaatttcgcagatttttaaactttattttcataatttctgcttaatgtttaaaattgaagagccttttcatgtattaaataatgaacacaaattatataattaaaataattggagatgttgaaaatcattttcccttcttaaacagaaataaatatttggaatgaaggggaatgtactagaacaccctttttgccacgggtaaaaataacagaaatgtatggtttgttttaccttcatttctgtacaagtaaagcttattagtctaatgttttgttcctttcccacctcacccctacctcttttgttttgttttgtttttgccctttatgtactacattcttattttctaacttttaaacactgtattggaggtttttttttaatttacagatcatatttattttactatttttgtagaaaattattaattttgattgtatttttgtattttaaaagcttcttcacttgtgttccctaaatattcatattgctgcccaaaagtatgactgtggaggaaaaaaaaatactttaaaaatccacactttttgttaagaaggaaacatttagcatttatatatttgtgtatggaaaacacttgatattttatccctgttgcatctggctgcacagagcctctcctcaaagatgctacaaaacttgaatataacacattttggaaggctgactaacctcgattctgtgttgtgatgtgcaatactgtttctaatgtttgtataaaaaaaaacagtgtaaacctttttaatgcaaatttatttttttcattgcatattttgcagattttatccacagtgtcattttttactgtcagaaaagataccccttttgtcattgcaactattttttaaatccagaaatctttgtactgatgtaaatgattgtagttattttggatagtgttttgctaacaaaaggagagacttttttcatgcatatttctattttgtttttttgggttttattttattttaatagtagtaaaatacttggaataatttttcatattcttgtcattaatattattttgtatttttatgtggaaatatataattttatgacactaattgctaaagtttattttatgttgaattatttttggagctgaaatctttgtaatattaaagcaactagtttctaattcccagtttctgtatagaatcgcacaagtggtttatggagtgtttggattgtaattataaatggttctttgatatgcaaattaatattttcagttgattttattttatattcctaatggggtgttaaagccgttttttatttttttctaaataaaaagagaacccatgcttttatggacactaggtaaacaccttcagcttaaatttttcgttaaatattttagtttattttattgttatcttccaggtgtctaaatctccagtctgtctgttgtactggtaatttaactctgtaatggaatagtttgctgccaactatttatattaagtaatttttaaatatttgtaatattgttgactgactaataaactattaagttattggc

SEQ ID NO: 31574 - DNA, 2363 bp, Homo Sapiens
ccccagcagccgccccagccgcagccgcagccgcccggctcgtctgccaccaccccgggcggcggcagcggcggctcgctcagcgccatgccgccgcccagccccgactcagagaacggcttctaccccgggctgccgtcgtccatgaacccggccttcttccctagcttctcgcccgtgtcgccgcacggctgcactgggctcagcgttccgacgagcggcggcggcggcggcggcttcggcggccccttctcggctaccgctgtgccccctccgccgccgcccgccatgaatatacctcaacagcagcccccgccgcccgcggcgccgcagcagccgcagagccggaggtcgcccgtcagcccgcagctccagcagcagcaccaggcggcggccgccgccttcctgcagcagaggaactcctataaccaccaccagcctcttctgaaacagtctccctggagcaaccatcagagcagtggctggggcactggaagtatgtcctggggagcaatgcatggcagagatcatcgtagaaccggaaacatgggaatcccaggaactatgaatcagatatctccattgaagaaaccgttttctggtaatgtcatagcaccaccgaaatttactcgctcaactccatcactgactccaaaatcttggattgaagataatgtgttcagaacagacaacaatagtaatacactcttacccttacaggtgagatctagtttgcagttgccagcttggggctcagattcactccaagatagttggtgcactgcagccggaacatccagaatagaccaggatcgaagtagaatgtatgacagtttgaatatgcactctttggaaaattcccttatcgatattatgagagcagagcatgatcctcttaagggtcgattgagctatccacatccaggaactgacaatctgttgatgttaaatggtcgttcttccctctttccaatagatgatggcttgcttgatgatggtcacagtgatcaagttggagttttaaattcacccacctgttattcagctcaccaaaatggagagcgaatagaacgcttctctcgaaaagtttttgttggtggtcttcctccagatattgatgaagatgaaataactgctagcttcagaagatttgggcctttggtagtagattggcctcataaagcagaaagcaagtcctattttccaccaaaaggctatgcatttcttctctttcaagaagagagctcagttcaggcactcattgatgcttgtattgaagaagatggaaaactctatctgtgtgtttctagccctactatcaaggacaaaccagttcaaatacgtccttggaatttaagtgatagtgattttgtaatggatggttctcagcctttggatccccgaaaaacaatttttgttggaggtgttcctaggccattaagggctgtggaacttgctatgatcatggaccggctgtatggtggagtttgttatgcaggaattgatacagatcctgagctaaaatacccaaaaggtgctgggcgagttgctttctccaatcagcagagctatattgctgccattagtgctcggtttgttcagcttcagcatggtgatattgataaacgtgtggaggtaaagccatatgtgctagatgaccagatgtgtgatgaatgccagggcgcacgctgtggtggaaaatttgctccctttttttgtgccaatgtcacttgcctgcagtattactgtgagttttgttgggcaaatatccactctcgtgctggacgtgagttccataagccattggtaaaggaaggtgctgatcgcccacgtcagatccacttccgctggaactaagaatagcaaactggcctctgtttaacaaggaaagaaagggtgcatgtggcttactgtgtctgaagatactgacatgcagaagaaataagtgcattcttctgcttttcaccccagctatcaatacatgcatctttatcagcagccaaaacactacaagcctcttgtttttcaccaaaaccctacatctcaggcttactaatttttgtgatattttcatgttcaaataaaatgtttttttgtattttctccaagttatttttatatgtaaagttaaaattagatatgagaatgttttgcgtaggggcaacacagtctgctgctatatagtgggggaagcgtgcacttatttctaaacatgggtttttaacttcaagatctgccccagtaatttaccaaaggtagcaaaataatagtgaagatggaatatgtctgctacaaatgcttatttttattgttgctattttcagtgtatacataaactaaaaattagggttgatttttttgct

SEQ ID NO: 31575 - DNA, 2392 bp, Homo Sapiens; identical to SEQ ID NO: 26524

SEQ ID NO: 31576 - DNA, 4545 bp, Homo Sapiens
ttccggcgccgtaactgctgccatcttctccgcgctatggctgcgttcggccgtcaggtccttgattggcaccgcctgatccccctcacctgggcctgtatggctaggcagactcctcatcttggagaacagagaaggacgacagcttctttgttgcgcaaactgactacagcctccaatggaggggtcattgaggagttatcttgtgttagatccaataactatgtgcaggaaccagagtgcaggaggaatcttgttcagtgcctccttgagaagcaggggactcctgtggtacaagggtccttggagctagagagggtcatgagttccctcctggacatgggtttcagcaatgcccatattaatgaattgctcagtgtacggcgaggtgccagtcttcaacagttgctggacatcatttcagaatttattctcttgggtctgaatccagagcctgtgtgtgtggtcttgaagaaaagtccccagttattgaaactgcctattatgcaaatgaggaagcgctccagttacctgcaaaagcttgggcttggagaagggaaattaaagagggtgctttactgttgccctgaaattttcaccatgcgccagcaggacattaacgacactgtcaggcttctcaaggagaagtgccttttcacggtacagcaagtcaccaagattttgcacagttgcccctctgttcttcgagaggacctgggtcaactggaatacaagtttcagtatgcatacttcaggatgggaattaagcatccagacattgtaaagagtgagtacttgcagtattcactaaccaagattaagcagagacacatttacctggagcgcctgggacggtaccaaacccctgataagaaggggcagacacagatccctaacccattgctcaaggacattctcagagtttcagaagctgagtttttggccaggacagcctgtacttctgttgaggagtttcaagtttttaagaagctcctggctcgggaggaggaggagtctgagagcagcacatctgatgacaaaagggcaagtctggatgaggatgaggatgacgatgatgaggaggacaatgatgaggatgacaatgatgaggatgacgatgatgaggacgacgacgaggcggaggacaatgatgaggatgaggacgacgacgaggaggaatagctgtgatggaaggactagagcgaaagggcccagagatatcaaggaagcttttcattctcttaaagcttttgggtcctttacttgaatcttctcaagttattttttattctaaaactggtctcttgatgaaaaaaattataagtcacctgagaggcagacagatcaaaccaaacaggaaacaggaaatgcatgtttgatctgttgtcacgtgtctgtggggagggccctgtcccatcctgaataagatacttatgttgagctattcacatcaaggggactcaatatatcaacaattggttttatttttttctcttttgaatatgttggtgataattccgtgacagttggaagatggggttcattcttccggttcaggaatcactatgtatttccttcttgtgataaaaataaaattacgagaaggcaatgtgaggttttagtacatcatagcactttattttatgaaaacatgtagcagattttccacaaaaatgcttatttttaatccaaaagtatattgcttcataatggtattcagtgcacagcagagtaaaagaagttaattcatgatgtactggttaattttgcatggcttcttaaggccagcaaaatgctggcagttttctttatctttgtgaagaacaggcccttcctgtttggggaagttggcttttatgtcagctcttggccagtggtcacttccaagcctggtgtctccggccctgtagtctgtagtgccagactgtgctggcctggagagtgctggggcaggtggaggccagggaatggtcccatacagttatctcccctgccctggttacagacagcttcgagaaccagaggagaagagcatagggtcatggagcagcagcctcgtcttacagcgtgactgcaaagaaaaagacttttgttttgcaaaagaaaagcagctcggtgactccgtccacatcgccacagttgagtcagatggcagtggcagtcctttgccagtggaaggagttcctgctaaggggaggtgcaggaggactaatttattattgtgcaactgccagtcctgcgcattccagctacgctaagcgccctgcccaggcacgtaacaaaacatagacctgttttgaagtggcttgttacccaagggtgcctcactcatctgcgccaccaggaagatgaactgtgagggctcctataaggggcaggaagagcaaagctgtcctaggccaaccagagattcatctttcatgcagtgacatgttgataaaaaatgatggtcagtatgaaactggtaacaggttgtagatggctttctatggtatatcccagtctcttgcaaacgattgtgaagaatgccagtgttgtttaagattcggcagtttgtgtggggaggtgggggcaggatggggtttggttgccaaaagagtttgggaaatgctggcttaaacaaaggcgagaggaagttcctttcacgtcaggatttatgaatgcctatgagcccagtgtcagtgacgactttctagcggcggtcttcaacactttctaaatattaagcgatcaaggcccctgccccacttttagttccaacagaatgccgttcacaagatctgggaggcactctctcagccctctcctggagcccccggaatttctcagcagcccaggccctcccgctgcccgtggcccctcctcccaggtgccaggtggtcttccagcctctccaagggcccacccccctgcctcttcctcccactgcagctgatctaggggtttcttggccacatttcccttgagagagagtgggatttgccctatccacagagagcctcatttccacctgaaggtgtatttgtcagtggctagaccaggttcatgtctgtttccccttggggacttctgaaccttcctgcccgggagtctgtaacacagcagcacaggaccgcgcttcctttagcagtgctgagtaagcaggcagcggcactctgagatcccggggctgggcagtcgccccccacttcccagcagctctgtggtagtggggcgggagcagcagggacgtaccttaagatttctccagtgtctgactcttactttgtttcctgaaataattagagaaaagtcgtttaatgaaaaagagactgtgtaccttgaattctacagctacctcagtccaggctgcctgctgagatcctgtctttagctcacatacattccacggtgggggacaccattagtccagacaccgctgtggagattagcattttagtttgtgtgcgcccgcctggcttgaggcagtagtttaggaatgacaaggctagaaacctggctggctgtgagtcagagagagagaggatggacgtgggagaaagcaagcaaaagctaccctagggaagagccggtgacgtgcacaggccgagcagcacggctggtgagctgcaggctgcggccttgcccggacacttggtaatgccaaacaagtacgtgtggctactcattggtctatgaggacgatgacaggcttcgactctgtggtttctaaagcatataatattctcacgtacttctttcagcaaacgccaaacagtagtaattcttgtaactaccttgaaccctttgtggaaagaacctgggtgtgagtgaataaaaagtaaagagcgacgcgctatatcggccattaaatactcggggctgtccgtaacaccctgtgcttcccaattgtagcaccatgttctgtgtgaatatgcataaccagagtgaccccccccagcacccagcatgcccggctgtgcccctctgggtatgctcacatgcacatatatggacatacagtttcgtagcagaacgtggctgcccaggggctgcctatctgggcgagtagaccgcctggctcagcccacaggcctgcagcatcccatagcaccccgcccttgccccatcaccctgtgggctacatgcaggacacggcatgggcctgctccccagaggcacctgtttggggtcttcttgaggcttgtgctttcacagctctctttgaagcagatgtcttggtgaactcggtagactcttttatacctgttgtcacaagaaagctttgtaaaaccagacagtgaagcaaaatgttgccaactgcttaacctaggctatgtgaacccacagtaaacctgaaggtgtttgagggaaaaactgctattttctgaatgaaacgtgacctcctattgatgtattaaaatgtctaacataaaggtcatgtgatttgtaataaatttattgtggtacagtaatatgcataaaataaacccattttaatgtgcattctgatgagcactgacaaaggatatggtactaaaaataaaatgtgaaatgtcaaagaaa

SEQ ID NO: 31577 - DNA, 3570 bp, Homo Sapiens
agtgtggctgtaccattttatattccgaccagcagtatatgagtaatatcacttctccacagccttgccagcatttgatgttgtttttacgtttcactttagtcatgctgatgggtgtgtagtgatacctcattgtggttttagttgacatttctctaccggctaatgatgtgaaaacatcttttcgtgtacttatttgctatgtgtgttatcttctttggtgaaatgtctgtcttttgccttctcatatagtttggatatttgtcgcctccaaatttcatgttgaaattgaatccctggtattagtagcagggcctggtgggaagtttggatcatggggaggatacctcataaatcatttttatagtggcaagttctcactatattattatcatgagaatataccatcccctcctttctttcttcttctcttaccatgtgatgcctgctcccattgccttctgccatgagtggaagcttcctgaggccctcactggaagcggatgctgataccatacttcttgtacagtctggagaactgccaaagaagccctcgaaaatactgaagtccctgttggctgtcttatggtctacaacaatgaagttgtagggaaggggagaaatgaagttaaccaaaccaaaaatgctactcgacatgcagaaatggtggccatcgatcaggtcctcgattggtgtcgtcaaagtggcaagagtccctctgaagtatttgaacacactgtgttgtatgtcactgtggagccgtgcattatgtgtgcagctgctctccgcctgatgaaaatcccgctggttgtatatggctgtcagaatgaacgatttggtggttgtggctctgttctaaatattgcctctgctgacctaccaaacactgggagaccatttcagtgtatccctggatatcgggctgaggaagcagtggaaatgttaaagaccttctacaaacaagaaaatccaaatgcaccaaaatcgaaagttcggaaaaaggaatgtcagaaatcttgaacatgttctgatgaaagaaccaagtgacccaaagtgacctggacaagattcatagactgaaagctgttgacatcgttgaatcatatgtttatatattgtttttaatctgcaggaaaatggtgtctctcatcatttgctctgttaagggaacaaattagcactttttagaagtctgacaattgtaaacagttattagcttttccagaagctgattcccattttaagatgggggaaaattaaggtttgaggttttagaaattagcaagtagtgcatacccttctagccacaagtgcccagtccaggcaagtgctgacttcttagagaatgtgtggccagacccagggacctggagtgtgtttggactgcagtttgccaccctgagaacaccttctccaggactggcatttcagaatcagattcttcattttttgcagctacgatgttcttccagggcactgggggctgtgacttctctctaaattgtatataagttgtgtatatagagaccataattatatggtccttagaaaagactttgcttttataaagcatttagaaaaaatgcatacctttaaaacaagtgcttgagttgtcacttaaaaattatagcatattgctataataaaaccttatttatgtcttatttgaagatgaatagtcttaaaagataaagacataaatgggacaattgttattgagcaaaaaaccaaattatcccaccctcatggagcttatattctagcaaggggagatggatatgatagattacacagtttattggaggacaataagagttatggcaaaaagcaaaaggaacacagggtaaaggggataggtgccatttggtggtgagaatgctgactgaaaaatagaatgatcaatttaatctgaaacaaatggttatttcttttataatccatataataaatttaaaatctaaaatgtaaaattttgaacacaacactggaaagggtatccacagcaggaagtccccagttcacctccatgactacagggcagctttgcacagccctctgggcgcactgtgtgcctctgcccagaagggggcctcgccgttccaccagaagctcagctccaggccctggaggggctgctgctcctcagttgcatttcttcagtagattcatttccttgatgcaaagcatctgtatttgttggttctgtcatttgagcgacgtctctgacttgtttgttttgaattacattacaggctggaatgtaattgtggtgaaagtatttttatattgctgagagtagcagctaatcacagttacatgcttcagaggacttataattgcttggttttgtgtgtgtgtgtgtgtgtgtgtgtgtgtgtgtgtgtgtttaactgcatttgaaaagttttatggagaatatgcatgattttaaatctgtgataatgttacatgcaccttcaatttcatccactttaaaaattatcttctcattgaattttagtgcttctactagtttgttcctttttgcagttggtcgtaattcatttctggcttcttatgctttcctgcaagcagatttcattgcatttattgtgttcatatcattttcttggggattatttgtaggacaaccaacctggagttttgcctctctagagtaccacccagtaagtctggctgagcatcttatgtccagtaggttcttggtaaacatttgctaaatgaaattactgattgaaatttggggaaaagtgaataagaagactatctaggacaaaaagccaaagccgaaaatagtatatgagcattctagcccagagactgtcgctactaaaagaatgaaggaaataataaagtgatagacagggaaggatagaaaagacttaacaatatacatgtgttccgtctttgctgttttggagaatgatggataagtagtgtttcctgattctgaagcatagctgaacaatttaattgtggtttaccatctttttggttccctcttcagtaattaacctatcgaaaatctgtcctaaatgtttggactggggcacagttccctccatcgctttgggagaaaatcattaatatggcatactgcagattggagggcaggaccactgagggtgtcatagacattagctctatggaattctgctagcaatttccaagtgacagtgaggaattatggatatatgttgaggtcattcagcttcctgagtaccacattccccagctacttagacacgggttaaaatattaagatgtcctagttcaacagcttgaattccattgattgatactgatagtgcctgtccaagacaccagctgaaagacttgttttgtgtacaaaatagttctgaaagtggtgagatacaaaaaggttttagaatcactgccctgttgagagaaattagggggaaatgattacatttagaagctgctagagttatccagtgtttgctggtctttgcaacaaactgtggagaatgggtggtatgtaatgctttggtaggcttcaatcactgataaaagatcatgttaaaataaaaaaaaaaaaaaaaaaaaaaa

SEQ ID NO: 31578 - DNA, 1328 bp, Homo Sapiens
cgaggctgcgccgcgtggagtggcttggcttaacagcagggagggcagagcgatgctctttgacctcccagaagagtcacgtgggctgacccagagccggggcggaaaggctgcgttagtttcttccgggtcattgacagaagcgtcaattcctgggagtagttcgttggttttctttcccctcatccttttgcctgctcccggcgaggggtggctttgatttcggcgatgagctcccagaaaggcaacgtggctcgttccagacctcagaagcaccagaatacgtttagcttcaaaaatgacaagttcgataaaagtgtgcagaccaagaaaattaatgcaaaacttcatgatggagtatgtcagcgctgtaaagaagttcttgagtggcgtgtaaaatacagcaaatacaaaccattatcaaaacctaaaaagtgtgttaaatgtttacaaaagacagtgaaggattcttatcacataatgtgcaggccatgtgcctgtgaacttgaagtttgcgcaaaatgtggaaagaaagaagacattgttattccgttgaataaagaaacagaaaaaatagaacatactgaaaataatctaagttccaaccatagaagaagctgcagaagaaatgaagaaagtgatgatgatttagattttgatattgatttagaagacacaggaggagaccatcaaatgaattaatatcactgtattaaaagtctgccgggcacagtggctcacgcctgtaatcccaacactttgggaggccaaggagggtggatcacctgaggtcaggagttcgagaccagcctggccaacatggcggaaccccatctccactaaaagtacaaaaaattagctgggcgtggtggctcatgcctgtaatcccagctactcaggaggctgaggcaggaggattgcttgaaccctggaggcggagattgaagtgagctgagttcgtgccattacactccagcctgggtgacagagtgagactctgtctcaaaaaaaataaaataaaaagtcaatttagaatgtgaaattctgaccaccttttggctttgagtattttccaaaagatatttgaaatcctaatgaggaaatcagaaaaagctatggaaaaatagacaaatttcatacatgaacaatataaattgtgtatattacttaacatcaaactaaacaagattcagaattgatggttgtataagaactagctcatgtaaaaataaaataacattattacattgcctcaaaaattggtcctcggtaagtgccttttgataaatgatctcaaataaatgactcatagcaaaaaaaaaaaaaaa

SEQ ID NO: 31579 - DNA, 2866 bp, Homo Sapiens
ggaaaataagccaggagaggaaggagcggcgggcaggtggccccgggagcccagacggacggctgctgtcgatatggcgacagctgccctgtggccgcccctgcacccagatggcgcctggcctggccgcagcatcctggagtctgaggccagcacctgcgtctccctgaagcccctcagagcctgccctgcagtgctgctgccctcgtctaccagtggctcaagcctgtcatcccagcactgtgggaggccgaggcgggtggatcacctgaggacaggagttcaagaccagcctgggcaacatggctatatggaaagcacaggtgtttctgcttctggagaggccccaggaagcttccaaccgtggtggaaggcgaagcgggagcaggtgtctcacatggcgtgagcgggaacgagaaagacagagcagggaaacgtgcagaggaaatggttggagagcgaagtccaggcacaggggccatgagagccggaccccacgcagctgcagaccccgacccgaactgcatgcggctgaggacccccaagccaggcagaccccgacccagaccccacgcggccgcggacccccgacctcgacccaaactgcatgcggctgaggacccccaagccaggcagacgccaatccagaccccacgcggccgcggaccccaacccagacagaccccgacccacccgtgcagcccccagccccaaaagtcaaaccccagcgtccccccagggcggcccgggctccctcagatacagcagcttcctgaggtggcctcacccgcaactccagaccaatcagagaaggccaaatgggctccccaagcccagcaggtgggacccccgatctagagagccccttccccgccccaggccaacagccaccctcgggctccgcatcaggtctgccaaatgcaggggcgaggggccgaccccgccacgggaaccaaactcaggaaacagcccatccagcgtccatctccatccggacccgccgccgcggccgcaggttcacgcgccgttccgcggagatctctcaggcgcctctggcccggcagaaacccgcggttccgatgacagaggtcctggtgggaatcgcaccgcctgccgttcctgcctccgcggaggatgcgctgccctaaactgcccccggctcttcatcccccaacccccggcagcctccgaccctcccccggccggcgcagctcagcctttcgcagacgcgggggagctggaatccgaccacgcgcagccttctcaccgtggtgcacgcttcgggccccccacgcctttcccaggcttcatcacccatttctctccagcgctgaaggaaacctcccagatgcttctccactcacccaccgaagcaggtctcggttgcccccagccccgggccctcccgagaacactgcaagcccccactggtcccctcccggcaaccccacggcccatccccaaacctgcactcaccctgtggggcctccaccctttggaggaaggacgtgtcaaagcttggaggtgcgcggcctgtctaacctccgcccaaggcgcgcggcaggcgacaggtctcagcccggatcagcgtggtccaaaaggacttatcgttaaaagtgctggtcccagaacccaaggggaagacatgctggttctctgatgagctgggccgcctcctccaggaagcctcctccttggagctctgtagccatcgtgggcttgcaagagtcaaagggcctggcccacagcggcgcccggcactgagctggacagtgtcctgcccccaaaattcatgtccgcccagaacctcagaatgcaaccttccctggtagtagggctttgcagatgtaattaaggatctggggacgaggtcaccctggattgaggctgagtcccaagtcagtcactggtgttcctccatgaagagcagagcagaatagagacagatgcacagagcaggccctgtgaggacagaggcagggactggagcgtcggccgcagcaggggcgtggagcccccagagctggaagagggagggatcctccccagggcctccggaaggagtgtgctgcgtgctgcccacaccgtgattttggactcgtggcatccagaactgggagagaataaatttctgatgttgtaagcctgcactacagcagccccaggacgctgaaatagttcagccggtgcaggctcctccctccctccctctctcttgttgtgagatattttttagacggggtctcacctgtcgctggagtgcagtggtgtgatcatagctcactggagcctctaatgcctgggctcaagcgatcctcccacctcagcctcccgagtagctgggactacaggtgccatcagacctggctaatttttaaaaatctttttagagatgggggaggtctccctatgtggcccaggctggccttgaactcttgggctcaagtgatcctcttgccttggcctcccaaagtgttaggatggcaggcttgagccaccatgcctggcagctccatctgtgttgactcctgaagcccctcatcttggctaatccggacaggcttgctggggaccccatctccccttggagactttgggatgtggctggatgtccaagtggccggggtcctccacagcccccagcttcccagggcgggaggcaggctgtgtcctcggtgggcactgacagtgaggctgaaatgtttgcacttcacatttccacatttaggggcattttgttgttgactcattcaaagctcttttaagtcgcttaatttgctgctcagagggaaatgaaaagggagccattttccctgatttgtttgcctcatcaacttttcaatcaataaaaaagtgcattttgctc

SEQ ID NO: 31580 - DNA, 2294 bp, Homo Sapiens
gtagtcatggccgccttccgcgacatagaggaggtgagccaggggctgctcagcctgctgggcgccaaccgcgcggaggcgcagcagcgacggctgctggggcgccacgagcaggtggtggagcggctgctggaaacgcaagacggtgccgagaagcagctgcgagagatcctcaccatggagaaggaagtggcccagagccttctcaatgcgaaggagcaggtgcaccagggaggcgtggagctgcagcagctggaagctgggcttcaggaggctggggaggaggacacccgtctgaaggccagcctccttcagctcaccagagagctggaagagctcaaggagattgaggcggatctggagcgacaggagaaggaggtcgacgaggacacgacagtcacaatcccctcggccgtgtacgtggctcaactttaccaccaagttagtaaaattgagtgggattatgagtgtgagccagggatggtcaaaggcatccatcatggccccagtgtggcccagcccatccacctggacagcacccagctctccaggaaattcatcagcgactacctctggagtctggtggacaccgagtggtagccaggagcctcgtggctgcgtcttgcacccagcgggcatctgccgtggtcagatccatttcaaatgaaatgtggggacgtagatctttttttttttttttttttgagacagagtttcactcttgttgtccagtctggagtgcagtggcacaatctcggctcacagcaacctctgcctcctgggttcaagcgattctcctgcctcagcctccaaagtagctgggattacaggcatgagccaccacacccagctaattttttgtatttggtagagatggagtttcaccatggtggtcaggctggtcttgaactcctgacctcaggtgatccacccgcccgccttggcctcccaaagtgctgggattccaggcgtgagccatcgtgcccagctagacgtcttcctttttttttttttttttgagacggagtctcactctgtcgcccaggctggagtgcagtggtgcgatctcagctcactgcaagctccgcctcctcccgggttcacgccattctcctgcctcagcctcctgagtagctgggactacaggcacctgccaccatgcgcagctaattttttgtatttttagtagagacggggtttcaccatgttagacaggatggtctccatctcctgagtttgtgatctgcccgccttggcctcccaaagtgctgggattacaggcgtgagtcaccgcgcctggccttttttttttttttttttttactggatttctttttctcctgattttcggcctcagctcctagagtggcctcagctaggtaaccaacgggagtcgacttatctatgccaggcctgcagtttcacatctgtgacgggatgggacaaatgacaccgtggtattcgatgacagctcccaggtatttcaaggttggcccttactcattcagggggtatgtttgagtgccacggtgtgcccagactctgctaggcaccagagagacaagatacgagtgacatggttctcctcccactgctgacggaggaattaacacaaaagcagacaacactctagaactggagagaggtccagattgcgacaggagccacaccagagtgtgcaggcttcatggaggacagaagcgacttttgtgccgggacttaaaaagataaggaggccaggtgtggtggctcatgcctgcaatcccagcactgtagaaggcagaggccggcagatcacttgagcccaggagttggagaccagactggggaacatggcaagaccccatctctacaaaaaaattaaaaaatttggcctggtgtggtggctcatgcctgtgatcctagcactttgggagttaaaatacaacacttcccagctgcccttatagttaaggtctggccagtgaaatgtatgtggaaatgttacatgacacttctagaaggattcttaaaagacaaatacaccctttcttcccccttcctatttcctggaatgtgggtgtgatggctggagccctggcagccatactgccacgtgtacagacgagtgccgtcctttagggatgacaggagcctggttccctgatgatggcagagccagatatcagcacaaacttatttaaatgggagagagaaggggagaaccaatctcaacttctaccttgtgtaagctgctggttttgggggttttctatgacagataccaaaataaaccctaactgaacatgtactcc

SEQ ID NO: 31581 - DNA, 2812 bp, Homo Sapiens
agacgcgagcatgtgcagtttgcagcgcatccgtactatggggacacatggaagctgccagccccccagccaaggatcagctgagccctagggctgatgcttgcctacgttgctgataatggcactgaggcccagccaacaaaggttaacccaggacactcctggacagtgatcctgatgtctgttgtgagctgcacactcaagggtgtgataaccagccccagtcggcgccatggcgtctgccgagcccctgacggcgctgtcccgctggtacctgtatgccatccacggctacttctgcgaggtgatgttcacagcggcctgggagttcgtggtgaacttgaactggaagttccctggggtcacgagcgtgtgggccctcttcatctacggcacctccatcctcatcgtggagcgcatgtacctgcggctgcgcggccgctgcccgctgctcctgcgctgcctcatctacacgctctggacctacctgtgggagttcaccaccggcttcatcctgcgccagttcaacgcctgcccctgggactactcccagttcgactttgacttcatgggcctcatcaccctggagtacgccgtgccctggttctgcggggccctcatcatggagcagttcatcatccgcaacaccctccgcctccgcttcgacaaggacgctgagcccggggagcccagcggcgccctagccctggccaacggccatgtcaagactgactgagcaggaagcgggtggggggcctggggatctctcatggaactcatggacaaagagaccaagctggtgaggttgccccatccatgcagcaaaagccctgctccggccaagcctcagccctatagggcacacagagccccctaacgtccgcgggggccggtgttggggggccgtggtcaggtgttgggggatggggtgtggaggcagcagagggacattgggaagggtccatggatcgcggcccagttcaggggttggtaccaggaggcctgtggctgagcagcgatggactatgtagttgactttggaagcagcaggccctgtcctggccaagggacaatgagaatggggccgcaggtgggaggcaaggcctgacctccctccctccgatctggatttagttgagctttggctggttccattaggcaatattcagatggccaccattatttctgttttatgggagaggtctgttggcaaagagtcggccacccagatttaccacatttctctgcagaacactcttttgttcaatataagcagagaccttccaccgggggcaggatttgtgatacctgcagtgagccaaggaccaggctagttcctgtgatgctgaagatgttgaagggaagcccataacattacaacgttgaccaatcctccagaaaagaagctctaacagaggaccctggctgtctacggggttggtttccatctctccattcgtgagctccttgaaggcagagaacacttggcttttcttcctatacctccagtccctaatgcagggacatgagagatgcccatttgtgtttgatgaatgaatgagtgaataaatgaatgaatgagtgcctggagatcagagtacatgggatgagtgttcggagttctacagactcaggaagccccagctgacattccaagaagaaggagacacgaaggtgaggggatgccatgcagttagcgtcacatgaagaaaaacaaaatttaaggtatcatccttagaagacggagggatgacagtttcaaggaggatttgttcatcagatgctgggaaggaatttcaacagatgaggaaactgaagagcagagaggttaagtacccccctaccctgccccccaggggacacaacctgctggagtgcaatggcacgatctcggctcactgcaacctctgcctcccgggttcaagcgattctcctgcctcggcctcccgggtggctgagattacagatgcaaggtagagagtggaaggaatgaaggggtgggcgagggcatgaagaagcctccccagctctaatggccactgtctgaaagtgatgcagctcacttccacccacattcgccagatttcaatccatagcctcacttaactgtagggcaggctaggacatatcatctttccatgtgctgagaaaaaatagaaaagaccaagattggtgaaaaggagcaaactagtgacgagaaccttgccatagccatttttttgccactcacagaagccggtctgtaccaagcgagaagtggctataggagaagtggtcctgaggctcatctgccttctcctggtcaccctcccaatatatccctcctgtgctgagctagttttctattacttttcatcacctacatctaaaagagacctacctatctaacacagtctttgtcttactatcataatgctattaatgcaagctaaataataatctttcatcttctttttttctttatctttttcacttgaattgctttaaattcaaatcttcctgctatagtgtgaatgtttgtgttccccccaaatttatgtttaaactttaacctccaagctgatggtattaggaagtggggcttggggaggtgattaggtcatgagggtggaatatttgagaatgagattagtgcccttgtgaattaggcctgagagagatcccctcatctcaccatgtaaggacacagcagaaggtgctatctttgaaccaggaagtgagccctggccagacactgaacctgccgatacctcaatcttgtccttctcagtctccagaactgtgagaaataaatttctgttgtttataaacc

SEQ ID NO: 31582 - DNA, 2914 bp, Homo Sapiens
acagctgatccggttcttgcggcggtgcgtgctggcgccggagagttccgcgcgtgtcctcgggctgtccgcggggaagctggtccgggagtgggcgcccgcccgcctgcctcgcgccttgcgcccccggcaccgcttccagaagggaaagtcgccgccgctcgcggtagacccgggcagcgcttccattccgcggagctggaaataggaatccagccatccgtgggtcaggaggaatggagactgtaccttccacatagattcacaagctgccctgcagtggccttggcttcaggaaaggagcattcagacgcttccgtcagcctcccaggatggcagcccctgacctggcccacggaggtcatgtttctagggactcagtctgccttcatgaagaacagacacaggcagcagggatggtggctggctggctgataaattgttaccaggacgcggtgacctttgacgacgtggctgtggacttcacccaggaggaatggactttactggacccatctcagagagacctctacagagatgtgatgctggaaaactacgagaacctggcctcagtagaatggcgacttaaaaccaaagggccagcacttcggcaggatagatcttggttcagagcatcaaatgagacacagacggcaagaagccacaatggagggcagctctgtgaccgcacgcagtgtggagaagctttcagtgaacactcaggcctcagcacacacgtgagaactcaaaatacaggagacagttgtgtgtctaatcattatgaaagggacttttttattccatgccagaaaaccttgttcacaattggagagcagttttccgtgttgggtcagtgtggaaaagccttcagctctactccaaatgttgtttcccagcaagcatgcactcgggacagatctcttgactacagcagctgtggggaagtgtttcttaatcagtcataccttcaggcacgtgcgggaagtcacaacggagaagaaacatggaaatggaagccgtgtgggaaagctctaactcactccatgggctgcgccacacctgttgaaatgcatgccgtcaggaatccccacgtatgtagggaatgtgggaaggcctttaggtacactgcctaccttactggtcgcgtgcaagtccaccctggggagaagccctgtgaattggaagaatgtggaaaagcctcccctgtttcttccagcctaactcaacatgtaagaattcatgctgcagagaaaccctgtgaatgtaaagaatgcggaaaagccttcactggactctcaggtctttctaaacacgtccaaacagaccctggacagaagccctatgaatgtaaggactgtgggaaagcctgcggtgggttttatctactgaatgagcatggaaaaactcacacgagggagaagccctttgcatgtgtggtttgcggaaaatattttagaaattcctcatgccttaataatcatgttcgaattcacactggaataaaacccatacatgcagctactgtgggaaggccttcactgtgcgctgtggccttactagacacgtacgaacacacacgggcgagaagccatacacgtgtaaggactgcgggaaagccttctgtacatcctcgggccttactgagcatgtaaggactcacactggagagaaaccatatgaatgtaaagattgtgggaaatccttcactgtttcttcaagcctgactgagcacgcaagaatccataccggagagaaaccctacgaatgtaagcagtgtggcaaagccttcacagggcgctcaggcctcactaaacacatgcggacacacaccggggagaagccctatgaatgtaaggactgtgggaaagcctacaatagggtttatctactgaatgagcatgtgaaaactcacacagaggagaagccctttacatgtacggtatgcaggaaatccttcagaaattcctcgtgcctgaataagcacattcatattcacactggaataaaaccttatgaatgtaaggactgtgggaaaacattcactgtttcttcgagcctaactgagcacatacgaactcacactggagagaaaccttatgaatgtaaagtatgcggaaaggccttcaccacatcctcacaccttatcgtgcacataagaacccacaccggtgagaaaccctacatatgtaaggagtgtgggaaagcctttgcttcctcctcacaccttatcgaacacagaaggactcatacaggagagaaaccttacatatgtaacgagtgtgggaaagccttccgtgcctcctctcacctgcataaacatggaagaattcacactgggcagaaaccctataaatgtaaggaatgtgggaaagcatacaataggttttatctactaaaagaacatttaaaaacttacactgaagagcaggtttttgtatgtaaggactgtggaaaatcttttaagaattcctcatgccttaaccatcacactcaaattcacactgatgagaaacctttctaatgtaaagaatgtggggaagctgtcagctacactcattcacgttgaagacatgaaagacctctcgttctccagatgtccatgacttgaggaatgtggctaggcaatcagcatctcatcacaacccggcaggcaggaactcaccctggagccctatgcagcagacacagagaaagccctcagtgttctctaaggtcttgctgaatatggatggtatccagtagagagaactctattgatgtgtgatatgcagcagcattgttgctgttctgctcagtactttgatgatcccttgtgatctcacaatgaagaaaaaccttaggagggtgagaattgttgggaagtcattttttacattacatctttcctcaccctttagtaaacgtggtgattgac

SEQ ID NO: 31583 - DNA, 1122 bp, Homo Sapiens
ggcctggctcggtccctgcgcaccgggtgcgggcggcggagagggcgcggctggtgagccctgggagggcccaggagccagacctcggttttgcgggctggggagcagggctcgggggcagcggccaggcccctccgcccctaacacccgcgcctcctgcagacccgagggtcgccgctggtagggtcgctcagccctgccgtccttcaccaccacaccttcacctgcgcccagctccctgcgcgcctggacagcgcctgctgcccgcctcccgatggccctgccccagatgtgtgacgggagccacttggcctccaccctccgctattgcatgacagtcagcggcacagtggttctggtggccgggacgctctgcttcgcttggtggagcgaaggggatgcaaccgcccagcctggccagctggccccacccacggagtatccggtgcctgagggccccagccccctgctcaggtccgtcagcttcgtctgctgcggtgcaggtggcctgctgctgctcattggcctgctgtggtccgtcaaggccagcatcccagggccacctcgatgggacccctatcacctctccagagacctgtactacctcactgtggagtcctcagagaaggagagctgcaggacccccaaagtggttgacatccccacttacgaggaagccgtgagcttcccagtggccgaggggcccccaacaccacctgcataccctacggaggaagccctggagccaagtggatcgagggatgccctgctcagcacccagcccgcctggcctccacccagctatgagagcatcagccttgctcttgatgccgtttctgcagagacgacaccgagtgccacacgctcctgctcaggcctggttcagactgcacggggaggaagttaaaggctcctagcaggtcctgaatccagagacaaaaatgctgtgccttctccagagtcttatgcagtgcctgggacacagtaggcactcagcaaacgttcgttgttgaaggctgttctatttatctattgctgtataacaaaccaccccagaatttagtggcttaaaataaatcccattttattatgtctcaaaaaaaaaaaaaaaaaaaaaaaaaa

SEQ ID NO: 31584 - DNA, 1915 bp, Homo Sapiens
gcttcatcctggcgccagtctcaggccaagagctgcaggctggcatggctggggggatgtcagcggagtgccctgagcctgggccaggaggtctgcagggccagtccccagggccaggcaggcagtgtccccctcccatcacgcccacctcctggagcctgcccccgtggagggcctacgtggctgccgccgtcctctgctacatcaacctcctgaattacatgaactggttcatcattgcaggagtgctgctggatatacaggaggttttccagatcagtgacaaccatgctggtttgcttcagactgtcttcgttagctgcctgctgctgtctgcacctgtgtttggctacctgggcgaccgacatagccgcaaggctaccatgagcttcggtatcttgctgtggtcaggagctggcctctctagctccttcatctccccccggtattcttggctcttcttcctgtcccggggcatcgtgggcactggctcggccagctactccaccatcgcgcccaccgtcctgggcgacctcttcgtgagggaccagcgcacccgcgtgctggctgtcttctacatctttatccccgttggaagtggtctgggctacgtgctggggtcggctgtgacgatgctgactgggaactggcgctgggccctccgagtcatgccctgcctggaggccgtggccttgatcctgcttatcctgctggttccagacccaccccggggagctgccgagacacagggggagggggccgtgggaggcttcaggagcagctggtgtgaggacgtcagatacctggggaaaaactggagtttcgtgtggtcgaccctcggagtgaccgccatggcctttgtgactggagccctggggttctgggcccccaagtttctgctcgaggcacgcgtggttcacaggctgcagcctccctgcttccaggagccgtgcagcaaccccgacagcctgatttttggggcactgaccatcatgaccggcgtcattggggtcatcttgggggcagaagctgcgaggaggtacaagaaagtcattccaggagctgagcccctcatctgcgcctccagcctgcttgccacagccccctgcctctacctggctctcgtcctggccccgaccaccctgctggcctcctatgtgttcctgggccttggggagctgcttctgtcctgcaactgggcagtggttgccgacatcctgctgtctgtggtggtgcccagatgccgggggacggcagaggcacttcagatcacggtgggccacatcctgggaggcgctggcagcccctatctcacaggacttatctctagtgtcctgcgggccaggcgccctgactcctatctgcagcgcttccgcagcctgcagcagagcttcctgtgctgcgcctttgtcatcgccctggggggcggctgcttcctgctgactgcgctgtacctggagagagacgagacccgggcctggcagcctgtcacagggaccccagacagcaatgatgtggacagcaatgacctggagagacaaggcctgctttcgggcgctggcgcctctacagaggagccctgaggtccctgcctgcactcgtcctgcctgcaagcctcccgttggtccccacagcagcagtgcctcggttcctctttggctgtcctcggggactccggctgaggcacatctgccacttttgaattcccggctggagagctggcaggaccctgtggctgggctgggaatggagctgtcagcactctgcgtgggaggcctgggcctgtgcctgcatcccgctcaaggctgccccagcctggggtccccagcctggctgctgctgggccctgaataaagagaggccagtacaaagcccatggattttgggcctgtaaaaaaaaaaaaaaaaaaaaaaa

SEQ ID NO: 31585 - DNA, 3193 bp, Homo Sapiens
aggggaattcggggcacaagtcgggccggagcatccgggcggccgcttgagatcggcgctttgagaactgagcgcatgtggagttcggaggaaaagggctcagattgaagatggaaaatccccaagacattttctcaagtaatggtggctgtctaagtgatatagttatagaaaaatacctggttgaatccaaggagtctgtgtctcatgttcagcttgcttgcagcatgcaggactgtgctttccctttggatggaactgaactttgtatatggaacactaaggatccttctcatcagcttctaatcctacgaggacaccatcagccaattactgctatggcttttggaaataaagtgaacccacttctaatctgctcagcatcactggattatgttataatgtggaacctggatgaatgtagagagaaagtacttcaagggctggtccctcgagggactgtcatgggctcgcttttgggaaaggtgctgtgtttacagttgagcctggatgatcatgttgttgccgtgtgtgctggaaacaaaatattcatgctggatattgagcagcgattttctgtgacatacatagaacgtcctgatgttaataaccgccacaaagtcccaccaccgaccttcctgcacacattctctcagactcaggctgttcgggccgagctgcagggccacctgggcccggtgactgcggtggagttctgtccctggcgagcaggcaccctcatctcggcgtctgaggacagaggctttaaggtctgggaccattgtacaggatcattaatatacagttcatctgtgttatcagcatatcctcttctcagtttattcattgatgcagaaagcaggcagctggtcaccgggtgtgctgacggccagctttggatcttcagtttgatggatggacaccattatcgtcgtgtggcacgggttgacctaaggaagaagacagagactttctccacaagaagggttaagtctgggctgtgcagccagccagaagaaagccagcttccctctacaagtgctctgggaaaaggagagcaggttgaagtaacatttcctgtactgagacttgcaccctgtgatctctcactcatcccaaattctgcatgtggatgtctttcttctgagaacacccgatgtgtgtggatcggaagctcagtgggcttattcgtatttaacctggcaaacctggaagtggaagctgctttgtattacaaggatttccagagcctcagcatcctgctggccggatcgtgtgccctgaggaaccgcactgcggatcaaaaggtgctgtgcttgctggcctccctctttggcgggaagattgccgtgttggagatcaacccggccgcgctagtcagggctcagcagtgccccagcatggggcagagcctctcggtgccagccagctcctgtgtcctaccgacctctccactgtatctgggaattgccaaggagaagagtaccaaggctgctagtgaacagcgacgtgctgcacggaacgtcatgaaggaccaacgcctggttttccatagtaaagttaggtcatctggttatgcgtcagcaccacatgtaactatgttttcaccaaagaccaacatcaagagtgaggggaaaggatcttcaaggagcaggagcagctgcgcacgggaggcataccccgtggagtgcgctgtgcccaccaagcccggcccccaggtcgctgccgcccccacctgcacacgtgtatgctgcatccagtactcaggagatgggcagtggctggcctgtgggttggccaaccatctgttactcgtttttgatgccagcctgactgggacacctgctgtgttttcaggtcacgacggggcagtgaatgccgtgtgctggagccaggaccggaggtggctgctctctgcggcccgggacgggaccctgcgaatgtggtcggctcgtggggcagagctcgcactgcttctgggcaaagacatgttttctaaacctatacagtctgcacagttctattatatagatgcctttatattgttatcttctggccctgaatttcagctactgaggtatcacattgacacttgcaaagatgagattaagagatataaacagaagagcaagtccaagctgatttgcaggctctccacgacgggtgcagtagacatgaccagtttatcggcagtcaacgacttttattcccacatcgtactcgcagctggccggaacaggaccgtggaagtgtttgacctcaacgccggctgcagtgcagcggtgatagcggaagcccactcacggcctgtccatcaaatctgccaaaataaaggttcatcatttacaacccaacagcctcaggcttataaccttttcctgaccacggccattggcgatgggatgagactgtgggacctgagaaccctgaggtgtgagcgccactttgaagggcatccaacccgcggctatccatgtggaatcgctttcagtccttgtggacgattcgcggcttgtggggccgaggacagacacgcttacgtgtatgaaatgggctcaagcacgttttctcaccggctggctgggcacacagacactgtcactggagtggccttcaacccatcagcgccccaggtacagtcttgctctgtcgcccacgctggagtgcagtggcacgatctcggttcactgcaacctccgccttccaggttcaagcaattcttctgcctcagcctcccgagtagctgggattacagcttgccacagctaccttggatggtaaactccagctctttctagctgagtaaccactgacctgtgagctgggtccaggaatgctgtgaggaacaacttaaaagtaagaagtagtggttcatccatcagggggccagaagcagcaactgtttttcatattttgagacttgcctcagatttcccccgtttgcaagctcctcccctctgtgtgtgccatgtcagagttttatgtctttctgctcctcaaaagggatccccttcattgggaaaatggaaatggcgtccagtacttctgcacagaatttggtaaagttaaaacaaaatatctttcaataaaacataatatagtatttgtttgataattagagttggaagaaaaaagagagaatttcttttgggcagtgaaaataaagcagttaacagtcaaaaaaaaaaaaaaa

SEQ ID NO: 31586 - DNA, 7539 bp, Homo Sapiens; identical to SEQ ID NO: 22621

SEQ ID NO: 31587 - DNA, 2750 bp, Homo Sapiens
gcagacttgaatagaactaaaaggaagaggaagggcaaatttgttggctgcgtgagctgggatattcatctttctcctgatcttggacatcaggactcctgattctcaagcctttgggtttggactggaggcaccagctttcctgggcctccagcttgcggatggcatatcatggaacttctcagcctccaaattcataactctaatacaccagtacaatggaaagattcctaaattcaaaagccagaaggctgggttcctgttcccaccctgccttttaccttctgtgtgttcctgatgaagacacttcatgctccactatttacttacctctgaaacgaagggctgacccagatcagttgttctctgacctgcttggagggactcagaggctgtggagcaacagatttgggaatgaggaatcgttccctggaagagtcagagagctcgtagacacattctgctggattgcacgagctcctcccctgggaaatccactaagactagaggaaagaattgcttggaggattcagaggctgaagagtggacagacggctttaattgagaaaaagaagcagaaaattgaggaagatgtgaggcatcaatgccagcagacgacatgtgacaggtgctagccacatggatcacactaaatttctgtcatttatatagataaaaaagaatttccaaagagctcctccataattcagcattaaccagctttaaatcatcacctttctttaccttttcaaagcacttttatctagctagctttcactttcagagtggccaattcaggtgaggattctcaatcctgttctgcagctgaggaactcatgctcaaaagggctaagagtttattctcctacatccaaacaccttgcttttccaaatcttgtgctcactttacctacacattttgatttttccaggctgatgacaagttagacatgcagactcctcaggctcattcataatctgtatagacattacaggtcatgcaaatttaagaaaaggctaaaaggtgcccgtttgcacccaacatgttggataatgccccggtaaagtggaaaatcagtttccacagcctcgctctgtaggtttccttggaattgtaaaagcataggactctgcctcatatttatttctatacggcaatgaggatataacggagcagaccgaaaagagaaaggaattttaaaagccatggaaagctgccctaaatgtggttggatatagagaggagagtgctgaaggcaaacagctgtgccctctttgcctttttgctgaggaaggggatttaagccaaaagaacacacgtaaacgtggatttcttaaagttctcactgtaattatgtagccttgggagatgaggaattgtaaagtagatgctggcttaaacaaatgataaatccttgaggtgatgggcaccccattttccctgatgtgattattacacatagcattcctgtatcaaaatatcccatgtaacccataaatatatatacctaccagtatatttctgtggctaatctgaaagccacctgcacccttgtgaagacacccacagagacttctgcctcccctcctaccctctggcctcaagagctccctgggctctcctgttgcaggagggagagggagagcttctttaggttcctggtaaggatctctgaagacaattccttaggcttggataattcccagacatttgctaaaaagcagcatcctccaaagctttaatttggatcacaggaaaatgatgctcccgcctcagattcaaacacagttttatctcacactgcaagctccctggcatgggcaaagtcctcgatgcctttcctggtggtttccaacattaaggacatacttgttcctcctcctagctctctccctcagccaagtccttccttacaatgaattgtcctgcagaactccctcttaagcttggcttctgggacagaaaacctactttctgaaagggtatggggactgtcagagcatgaactggactcaagctcccaattacagagcagacacaaggctctgcctgcaccaggccatccctggatttctgcagctccaggactctcttccagcatctagatgcagctactctcattccagctttgtgtcctgtttgatgcaaaatctttattccttcctgtttcaatccctgttgcatattctgtgtgacaaagcaagaagctggaaatcgagttctgagctttatacccagctctgccacaaatgtgccatgaccttgaataagtcacatgacttatctggacctggattctctcatctgtaaaagaggaagctgagctatactacttttaaaatgtctccagctttaattttattagaatatcagctgcttcctcctctggtttctcatggcaggttgtgcattcttctctggagacaccaaatttcattggagtatctctccttacaagtgtatttccccactagattggcccctcaagaacaaggattgtattttagttacctctgttatctctgtacctggggaggagtgagaaaaggagagcaggaaagggaatggtatagtaccaacatttgttgagcttctattatgaggaattgtctatgctacacattgtacgtaaagtatgtatgattcacagtataaacattataatctggaatcaacctaaatgttcattagcagatgaatggataaagaaaatgtggtatatagacgcaacacaatactatacagccat

SEQ ID NO: 31588 - DNA, 2118 bp, Homo Sapiens
gattcttgggttccgcgcgtagtttcggaaggagacatcgaagcagggcgaggcgcagagggcgttgcggactcatgccccagtcggcagtgcggggtcccaagccctgcagtgctacagctttgagcacacctactttggcccctttgacctcagggccatgaagctgcccagcatctcctgtcctcatgagtgctttgaggctatcctgtctctggacaccgggtatcgcgcgccggtgaccctggtgcggaagggctgctggaccgggcctcctgcgggccagacgcaatcgaacccggacgcgctgccgccagactactcggtggtgcgcggctgcacaactgacaaatgcaacgcccacctcatgactcatgacgccctccccaacctgagccaagcacccgacccgccgacgctcagcggcgccgagtgctacgcctgtatcggggtccaccaggatgactgcgctatcggcaggtcccgacgagtccagtgtcaccaggaccagaccgcctgcttccagggcagtggcagaatgacagttggcaatttctcagtccctgtgtacatcagaacctgccaccggccctcctgcaccaccgagggcaccaccagcccctggacagccatcgacctccagggctcctgctgtgaggggtacctctgcaacaggaaatccatgacccagcccttcaccagtgcttcagccaccacccctccccgagcactacaggtcctggccctgctcctcccagtcctcctgctggtggggctctcagcatagaccgcccctccaggatgctggggacagggctcacacacctcattcttgctgcttcagcccctatcacatagctcactggaaaatgatgttaaagtaagaattgcactcctgtccctctggccttccatctctcctgcccttgtgccccacaacctggccaacagtactggaagaaactggacacagtcaccagcatcccaggggagggcaaaacagccatgtcgtgccctgatgaagagcaattctgatcacagctgttactcactgagcaccagccaggcaccaggcaccccataacacggcttcctgtgctctccttccagagcctgtcgcagctctaggggggagctatacaatgatgtctttattagtgtcatcatgagaagcccaataagcagtatgccctaacagttagtaggccaggctctggagctaagctgcatgggttcacatcccagctccaccattcagcctgcagagaccatgagcgagttacttaagccaggctctggagctaagctgcatgggttcaaatcccagctccagcattcagcctacagagaccatgggtgagttacttaagccaggctctggagctaagctgcatgggttcaaatcccagctccaccattcagcctgcagagactgtgggtgagttacttgagctctctgtgccaatattttctcacctataaggtggaggtgaaaataaactctataacatgacaagaactacttcacagtagttgcagtgaggattcaacgagatgaacatttagtacttgggacacagcagtggcccagtataaatgggctacttgtcataagccctaagtcacaggtcaacaaactgagaggtaaaagcacttggttgagcttgtgtatctagtgagtatggattcagggaccagattcccagccccacgaactgctaagcaaccccacctcctaaacacatgagtgccgattaacttcacagaaaaacacacaaggcaaagttcagcgaggtgaaattctccaagctataaagatcagggaagacttcctggaggaattcacccttgagcaaaatcctaaaggatcaatagtagctggcaaaaagaagcaggaggaagcacattttaggtagaggagacagcctggacaaaggtctgagggaggaaggaacacaaggagtgcaggacactttcataactgcatgaacttcatagagatgggatcctttagcatgttctctgtgcacatgcttgaccatgttctttcacatgctttttgccacttgatctttccagcaactcagtgagagaagcaaaaaagtaagttgcatcctg

SEQ ID NO: 31589 - DNA, 1825 bp, Homo Sapiens
gaatggcgctggcccgcggcgctgcgctggcagggagcaggcgggaggcccgaggaagggagcctgctgcccgcccacccgcctgcacaggctgtgtaagggggctgggcacgcatatcccgccaacaactgcagctcccaccagcctgccaggccaggctcctggacactcccttcccgccttcctcctcccacctccctcctccctccacagtcctccagcttcggatccacagacggaatcaggagcagaatccagttcaggcgcccatctcccagcaatcaagtcttgctccctggcctgccctccggcaccctggagccccgcttcccacacagccttgctcctcccggcctggcttgctgcctgcaggcctctcagggtccttcaccgtctctccagtctcggatccggacccgtggatctcagcctcagaccctcctctggccccggccttgccctcgggcacggcccctttcctcttcagccctggggtcctgctccccgagccagaatattgtcctccttggaggtccccaaagaaggagtctcccaagatctcccaacgttggagggagtccaagcccagggggaacttgacataccaccagtacatgcccccagagccgagacagggatccagggcagacccccaagccgaggggtccgccctgggtcctcctgggccatctctgtgggaagggacagactcgcagcagccacatcctaggatgaagccctctcccctcactccctgcccaccaggagtccctagcccctcgccacccccacacaagttggaacttcagacccttaaactggaggagctgacggtctcagagctccggcagcagctgcgcctgcggggcctcccagtgtcggggaccaagtctatgctcctggagcgcatgcgcggcggcgcgccgccccgcgagcggccgaagccgcggcgcgaggacagtcccgcgggtgctccctggccgcgcctcaagcccaaggccctggcagccgcccggcgtcagggctcggtcaagcccagcgcagcatctcacaggccacctcttccacgcgccgcggataccccggggacggctccggctccaactcccactccggctcctgctgcagctccagccctgaccccttcctcagggccgggctcagcggctctgactctggaggaggagctgcaggaagcgatccggagggcgcagttgcttcctaaccggggcatcgatgacatcctggaggatcaggtggagcctgatgaccccctgccccctattcccctggacttccctggctccttcgacgtgctgtccccctccccggactctgaaggcctctcatctgttttctcctcttcactcccgtctcccacgaactcctcctccccttctcccagggaccccacggactccctggactggctggaggccctgagcgggggtcctcctctgggttctggtcccccaccccccagcattttttccgctgacttatctgactccagcagcagccggctgtgggacctgctggaggatccatggtgatggattttaggatttacagagacagagaactgatgggggtggagagaagctccttgtgggaggagagggaactaccagcagagcccctcctaccgcagacacaggatcggagacaacctccaaccccacctgcctcctgaagtgctgctgacatgcaactgccttaactttgcctacctggcctccttatgatccccctccggcgtggtatggttggggggcttcttttgctgctggccacggcaaacaagctgcttgctgcttccttcag

SEQ ID NO: 31590 - DNA, 2442 bp, Homo Sapiens
agcctcgcctagctctctgaaagaaagcctgcaacagaagggagagaagcggccccaagtgcagctgaaagcactccttgggagtcagccaagaccctccatccaagcagggctggatccttgcacttggccatgataaggagatgcttccaggtggcagcaagacttggccaccacagaggccttcttgaggccccccgtatcctgcccagactcaaccctgcctcagcatttggatcctccacagactccatgttctcaagattcttgccagagaagacagacttgaaggattatgctcttcccaatgccagctggtgttcggacatgctgagcctgtaccaagaatttctggagaagactaagtctagcggctggatcaagctgccctccttcaagtccaacagagaccacatccggggactcaagctcccatctggactggcagtttcctcagacaaaggtgactgtcgcatcttcaccaggtgcatccaagtggaaggacaaggctttgagtatgtcatctttttccagccaacccagaagaagtcggtctgtcttttccaaccaggctcctacctggaggggcccccagggtttgctcacggcgggtccctggcagccatgatggacgagaccttttctaaaactgccttcctggctggagaggggctgttcacactaagtctcaacatcaggttcaaaaacttgatccccgtggactctctggttgtaatggacgtagaagtggacaagattgaggaccagaagctttacatgtcctgcatcgcccacagcagagaccagcagacagtttatgccaagtcctcaggtgttttccttcagctgcagttggaagaagagtctccccagtaacagtcactgtgcctgcaggagagccactgcctcccctgcctgcctcctgcctcctgcctcccctgcctgcctcctgcctcctgcctcccctgcctgcctcctgcctcctgcctcccctgcctgcctgggacccatcaaagagcagggaggggtcctcaagcagcaattggtgaggcgagggaaaggacccttttctctgagtaaataaagtctcacagtcccattctcggcccagggcctttctgtggttggaaatcaaaatccttccagggcatctcacatacccaccttcccattcagcaccgactgaaaagatttactgagtacccgccaggtgtcaggcactgtgtgaggcaccaggcacccagaagtgaaggacagggccccggtctcaagatgcacaatgcgggagccaggtgccaagtcagagtgccctatcacgctcctcccacacccaccctggcttccatcatgagtgcagtgtcatctcagcgggaggaagggctaattttactctacaaaagcaatcagaaaacatcttctagaagaagctcttcctgaactgtctcaaaagttaagtggtgttcattaggcaggcaggggagaggaggatatcccaggcagaagggaagtaagaagtaagacaaaggtgcagaggtgtgaaagtgtacagggactttggagaagagcaaggtgttgaggagggcaggcgtttagggaaagagaaggtgggcaggagcaaaccacaggaaggcttcataatccctgctggagagctggaactttgtcttgcaggcaacagggagcctccaaagggcttgggctggggagtgacagagctttgttatttagaaagatgactcagtggcagtaaggcgtcagcaagactgaaggcaggagtactagttaggagatccccacaggctttacactagagacagtaagggcctgcaggggtcagagctgcgaagctgagagatatgagaaaatgttacaaatacaggaagtgcaggactgtgccactagttatacaatgtggatctgtgaagacgagctccaagtttctggcttatgagtttccaggtggttatcactggaaatacagaaagaggtgggggtaaacaatgagctcagttttacatgcatcgagcttgaagtgcccatggaacttgtaccatgtggcaagtgccagcaggaacgtggatattgtgatatggagcttggagagataagctactgactcaaatcgtgagccaatataaaatgtgacatgaggccggacacggtggctcatgcctgtaatcccagcactttgggaggccgatgcgggctgatcacttgagcgattcgagagtcgagaggctggtcgggagttcgagaccagcctgaccaacatggagaaaccctatctctactaaaaacacaaaaaattagccgggtgtggtggcgcatgcctgtaatcccagcatttggatcctccacttgaacccgagaggcggaggttgcagtgagccgagatcacaccattgcactccagcctgggcaacaagagcaaaactccgtccc

SEQ ID NO: 31591 - DNA, 1959 bp, Homo Sapiens
aaaagccaagcgtcgtcgtcacccaaggtcaaggggtggaagttacacctggtgcagccctcggctctgatgcaaaagcagcttttgcccctggctgcgggacagcgctgtgactactcgcaacgggagagctgctgccagtcgccacaccgtgcggaaagcgccggcgaccggagcactgacaatggtctgcataggggagcggagagaagcttctgttgcgccctagatccgctgcctcggcgcccgcccgcagggaggagggggcgcgacaggtcgtctagcgcgtgccccggagcccgcgcccgggtctggccgcctggggcctgtgcttccttcagagactcacacaagaggtttatcatgagaaggaccgcactatttcatttcactcctacaagttttcatttacgttacacattgagaaagttatgagaagcaactgtcactctctggaggtggagactgccgtgattcacaaagacaagaggatggatcatgaagccgcccagctggagaagcagcatgtgcacaatgtgtacgagagcacagccccttacttcagcgacctgcagagcaaagcctggcctcgtgtccgccagttcctgcaagagcagaagccaggcagcctcatcgctgacataggtaaccaggcggcctcatcgctgacataggtaaccaggcagcctcatcgctgacataggtaaccaggcagcctcatcgctgacataggtaaccaggcagcctcattgctgtcataggtaacccagcactgggccgtgtagcatgaaataccttccattgagcctttgcttttcacattgatttttcatttttgttctaataggaatcctgaaattgcacccttggcatgccagtacctagaatattcattttacagcagaaactcgagacagtcaagtcagcagcaagtaaaaaactttctcaaacttttattttatttttattcttttgagatggagtttcactcttgtcaaccagattggagtgcagtggtgcaatctcggcttgctgcggactccgcctcccgggttcaactgattctcctgcctcagactcccaaatggctgtgattacaggcacccgccaccacgcccagctaatttttgtatttttagtagagacggggttttgccatgttggccagactggtctcgaactcctgacctcaggtgatccatctgtctcggcttcccaaagtgctgggattgcaggcttgagccaccgtgcctggcctcaaactttacctttagacagtggctcttcagggcctttgtgtacatcctccaccaaaacggacctgacattgattgactaaatcaggatggaaatgatggcttgtgaaactaaccgttgtaaatttaaagatattcacatttgccaaatgtgttctcctctggtggctcactttgagtggctcacatgccttctatagaattgtgggaatatggaagaggtccagtaatatcttatgaatctcatgggtcctttcctttaattattctataggtgtttcattataggagcgcatctttaattagacagtattttaataataacttatttgtctggaggacgttggttcagtatcttcgtaaaccaagaactggtaaaccacagcttagtagatctaggactaagacttaaaatgtggttggaatctcactcaaggcctacccacctaaaactgcgtcctagcaattgcatgctgactgcacctatgagtcgtaagtctgtagttgcaacgtgtgtctagtttgatattctttctaaatactggtaagagaaacagacataccagaacttgtggcttgctgaagatggtatgagtaatgtggaatctggggaaggggtgcatgtcacatggaaattgggagtctttgaaaaatatctctatcctgtaaattaaaaaataataaatctagtttcggagtgtgc

SEQ ID NO: 31592 - DNA, 3024 bp, Homo Sapiens
agtgggtgggggaagctggtaggcacgggcggctccgcagtgaccggactcgggggagcagataatcaccagaatgggagtgaatgacttgtggcaaattttggagcctgttaagcaacacatccccttgcgtaatcttggtgggaaaaccattgcagttgatctgagtctctgggtgtgtgaggcacagacagtcaaaaaaatgatgggcagcgtcatgaagccccacctcaggaacttattttttcgtatctcatatttaacacaaatggatgtaaaactggtatttgttatggaaggggaaccaccaaagctgaaagctgatgtcataagcaagaggaatcagactcggtatgggtcttctggaaaatcgtggtctcagaaaacagggagatcacattttaaatcagtcttaagagagtgcctccatatgctcgaatgcttaggaatcccctgggttcaggctgctggggaagctgaagccatgtgtgcttatctcaatgctggtggtcatgtcgatggctgcctcaccaatgatggagatactttcctttatggggcccagactgtttacaggaatttcactatgaatacaaaggacccacatgttgactgttacacaatgtcatctatcaagagtaaactaggtttggatagagatgctctggttggattagcaatacttcttggctgtgattatctcccaaagggagtccctggagttggaaaagagcaagcattaaaacttatacagattttgaaagggcaaagtttacttcagaggtttaatcggtggaatgaaacatcttgtaactctagtccacaactgctagtcactaaaaaactggctcattgttccgtatgttcccatccaggttcacctaaggatcatgaacgtaatggatgcagattatgtaaaagtgataaatattgtgagccacatgactatgaatactgctgtccttgtgagtggcaccgtacagaacatgataggcaactcaatgaagtagagaacaatattaagaagaaagcttgctgttgtgagggattcccattccatgaggttattcaagaattccttttaaacaaggataaattggtgaaggttatcaggtaccaaagacctgatttgttattgtttcagagatttactcttgaaaaaatggagtggcccaatcactatgcatgtgagaaattgctggtacttttgacccattatgacatgatagaaagaaagcttggtagcagaaactctaatcaactacagccaattcgaattgttaagactcgaatcagaaatggagttcattgttttgaaatagaatgggaaaagcctgaacattatgctatggaagataaacaacatggagaatttgctttattaacaattgaggaagaatcattgtttgaagcagcatatcctgagatcgttgctgtttaccaaaaacaaaagttagaaattaaagggaagaaacaaaaacgtattaagcctaaagaaaacaatttgccagaaccagatgaagtaatgagctttcagtcacacatgactttaaaacccacatgtgaaatctttcataagcagaattccaagttaaattcggggatttcccctgatcctacattaccacaggaatctatttctgcctcattgaatagcttgcttttacctaaaaatactccatgtttgaatgcacaagaacagttcatgtcttctctaagacctttggctatacagcaaattaaagctgtcagtaagtctctaatttcagaatctagtcaacccaatacctcatctcataatatatccgtgattgctgatctacacttgagcactattgactgggaaggtacttcttttagtaattctccagctattcaaaggaatactttttctcatgatttaaaatcagaagttgaatcagagctatcagccatccctgatggctttgaaaatatcccagaacaactgtcctgtgaatcagaaaggtacactgcaaacataaagaaagtgttggatgaggattctgatgggattagtcctgaggagcatctactttctggcattactgatttatgtcttcaggatttgcctttaaaggaacgaatatttataaaattatcatatcctcaggataatctacaaccagatgtcaacctgaaaactttgtccatacttagtgtaaaagaatcttgtattgctaacagtggttctgattgtacatcacatctttcaaaggatcttccaggaattcccttgcaaaatgaatccagagactctaaaattctaaaaggagaccagctgcttcaagaagactataaagtcaatacttctgtcccttattctgtcagtaacacagtggtaaagacctgcaatgttagaccaccaaatactgctttagatcatagtagaaaagttgatatgcaaaccactcggaaaattttaatgaagaagagtgtttgccttgacagacattcctctgatgaacaaagtgccccagtgtttgggaaagctaagtacacaactcaaagaatgaagcacagttctcaaaagcataattcatcccatttcaaagaaagtggccataacaagttgagtagccctaagatacatattaaagaaactgaacagtgtgtcagatcttatgaaacagctgaaaatgaagaaagctgtttcccagattcaacaaaaagttctctgagttctctacaatgtcataagaaagaaaacaactctggtacttgtttggatagccctcttcctttatgccagagattaaaactaagattccaaagcacttgaaatttaaaacacttaggtataacttaactattttagtactatcagcaatagcagagacagagggaaggtatctagttcatgtgtggtaaaaattttaatgttctctgtgtcatgaaacacttgccattttaatcaaagttgtaatttttaaaaagtcacctaaaactctggttttaaaagatcctctgtattgaaaacttctgataatgtatgtcattatgtcc

SEQ ID NO: 31593 - DNA, 1584 bp, Homo Sapiens
cgaggaggggagcgggaagcgcagtgccagcgccacagcccttcaatcattttggttgctatccagcttctccacatcaagtccaacttcagaaaccccaagcctgtagagaaaagttgacctgtgctgactctggtgatggtgactgtctctcactaatttctttgaagtcttcaaggataagcagagttgatccatctgagaaagggatcatgaactagacagaatgaacagccttagaggcacagactcttgaacgggacggtggtggtatgactagtgcagagtgtttagagatcactcagtttttaaagactggcctttatcgtgtctcagtgcagccgaggcagagcctttgaaggatgcgatgttgtcattcttactaatctagtccagccgctgaggtgactttcaacggcagaccgtctcctgagcgccccaggtagaatttcaaaagtctccgggaccattatggcagtcaagtggacgggtgggcattcttctcctgtcctctgcctgaatgcaagtaaagaagggctgctggcttctggagcagagggcggagatctcacggcttggggtgaagatggaactccattaggacacacgcggttccaaggggctgatgatgttaccagtgtcttattttctccctcctgtcccaccaagctctatgcctcacatggagaaaccattagtgtactggatgtcaggtccctcaaagattccttggaccattttcatgtgaatgaagaagaaatcaattgtctttcattgaatcaaacggaaaacctgctggcttctgctgacgactctggggcaatcaaaatcctagacttggaaaacaagaaagttatcagatccttgaagagacattccaatatctgctcctcagtggcttttcggcctcagaggcctcagagcctggtgtcatgtggactggatatgcaggtgatgctgtggagtcttcaaaaagcccgaccactctggattacaaatttacaggaggatgaaacagaagaaatggaaggcccacagtcacctggtcagctcttaaaccctgccctagcccattctatctctgtggcttcgtgtggtaatatttttagttgtggtgcagaagatggtaaggttcgaatctttcgggtgatgggagttaagtgtgaacaggaactgggatttaagggccacacttcaggggtatcccaggtctgctttctcccagaatcctatttgctgcttactggagggaatgatgggaagatcacgttgtgggatgcaaacagtgaagttgagaaaaaacagaagagtcccacaaaacgtacccacaggaagaaacctaaaagaggaacttgcaccaagcagggtggaaatactaacgcttcagtaacagatgaggaagaacatggcaacattttaccaaagctaaatattgaacatggagaaaaagtgaactggctcttgggtacaaaaataaagggacaccaaaatatattagtagctgatcaaactagttgtatatctgtataccccttaaatgaattttaaatccaataaaaacatttgaagaaaaaaaaaaaaaaa

SEQ ID NO: 31594 - DNA, 1837 bp, Homo Sapiens
agcccagagaaaaacaacagaggtttgcggcagaagtggccaatgtcgggcccagagtccatgctcaaggctggaagcccatcctggatgtgctgcactcggcagtcctagtgtaattctgcagggcccggcccctgccagggtctgagctctccagcctgtggcatctactcccctccaagcccaccccagtgtctcaattggagagacaggccctcatggtccccactctggcccagccccctctgcacacagctggccgagctctgggcctctccatgctgtggccctggtgatggcagagccttgggatgtctctgtccatgtggtcacaggacatgtgtgtggcagcagggccatggtggggtgggatgctgttccaaggcccagaaccattctgtaagaaaccagcacagcgctgcaagaaagggggtcctaggggacacaggccacacaggtgtgctttgaaaaatggcaattaaggtcaaagagcaggaagtccacaggacgggccaaggccaaggctcccgctggccatggggaagccacctccagggcagtcccagggactgaattggaagttgtcccaagtcacttcaggtccaactgggacagcagaggtaacccccctgcaccctcatggggcagcttctttgggtcctaaatgtggactcagaggtggaaacggtctgtgtccccaggtcctgcagacattcgctttgtctgggagaagaatgggcgagctctggagacctgtgtccctgtgcagacccatgcactgcccgatggcagggcccatgcactcagctggctgcaggacgccatcagggaaagcgctgagtatcgctgctctgtcctctcctcagcagggaacaagacttcgaaggtgcaggttgctgtgatgagacctgaagtgacccaccaggagaggtggaccagagagctctctgcctggagggctgtggctggggagcacgaccggatgatgcagagctggaggaaggcgtgggaaagctgtagcaaggacaccctgtagccaccaggaaggagtccctgacaccgacctcaaccccaacaagaccctgctgccactgaccacagccacccccggagaaggcctggtcccccacaactgtgaactgtcttgcccaagcctgctctgaacacagccattgggccaccacctgatgggcagaggcgggacagtggagaagcctggaacccaagtgggcctgtgacaggaactaagacttaaaaaattaggtgcttacctgggacagtaagttctgtctggcacaagcaggtaaccaggatggctaacaggctttgatagctgctcgtgaactaaaacagcagggtgtgtgcaggttcctcctctacggtcaggcagcaggctctgaaggctgatcctacaccgtcccagtgactccccttgacagagtgcccccaccccctaatagccaacagggttagcatggccagcacagatcgctgcttttattgatgcaaatcaagcctgctgcttctcctccctgcagacttagccaaggaactccaagatgcatgactgggacaagaaaaggtgagactccacatggaaatgccttgccctaaaccttgaatgactgtgagatgcgatctgggagtgcatctgtcaagtctttgtgttttcttcactaacctcagaatactgggctctattttatcaagcgctgcagtttatgcctctgtcccgtcaatgctcagcttctgcaacaggacaccaaacttgatgcagaaagccaaataggtcaattatgcaaatctcctggtgccatattaaatttcttgacaatgg

SEQ ID NO: 31595 - DNA, 7445 bp, Homo Sapiens
gggcctggttgtggaggccccttttgcaaaacctcagtctgaatttagtagacagaagtcactaggaatgccttgacaggatcctgccttagctaaggctccctccagctgcagagggtgtttttgttagactcacacactgcgtgaaactgctcagaatagagccatgatctcaaccacgaaatgggaacttagattttggagaaactaacggggacggacttctttcctagcctgagtgttgagcagtgtcatgccttggcgtttcagctcctcgttgtctaggtggtgaaatgacagaactcattcgcttctttgattggtgattttgaaataatctttcatcaagttccatctcctttaccctcatatggaatatatctctctgtctgttgttaaactacgatgacatgtctgtagctatcagaaagagaagctgggaagaacatgtgacccactggatgggacagccttttaattctgatgatcgtaacacagcatgtcatcatggactagtagctgacagcttgcaggcaagtatggaaaaagatgcaactctaaatgtggaccgcaaagagaagtgtgtttcactacctgactgctgtcatggatcagagctgagagattttcctgggaggccaatgggtcatctttcaaaggatgtggacgaaaatgacagccatgaaggtgaagatcagtttctttctctggaagccagcacagaaacactagtgcatgtttctgatgaggataacaatgctgatttatgccttacagatgataaacaggttttaaatacccaagggcagaaaacatcaggccaacatatgatccaaggagcaggctccttagaaaaggcactgcccatcatacaaagtaaccaagtttcttctaactcctggggaatagctggtgaaactgaattagcactggtaaaagaaagtggggagagaaaagttactgactctataagtaaaagcctggagctttgcaatgaaataagcttaagtgaaataaaagatgcacccaaagtaaatgcagtggatactttgaacgtgaaagatattgcacctgagaaacaattgcttaactctgctgtaattgctcagcaacgaaggaaacctgacccccctaaagatgaaaatgaaagaagcacctgcaatgtagtacaagatgagttcttggatactccttgcacaaacagaggactgccattattaaaaacagattttggaagctgccttctgcagcctccttcctgccccaatggaatgtcagctgaaaatggcctggagaagagtggtttttcacaacatcaaaacaaaagtccaccaaaggtcaaggcagaagatggcatgcagtgtttacaattaaaggagaccctggccacccaggaacccacagataaccaagtcagacttcgtaagagaaaggaaataagagaagatcgagatagggcgcggctggactccatggtgctgctgattatgaaactggaccagcttgatcaggacatagaaaatgccctcagcaccagctcctctccatcaggcacaccaacaaacctgcggcggcacgttcctgatctggaatcaggatctgaaagtggagcagataccatttcagtaaatcagacacgagtaaatttgtcttctgacactgagtccacggacctcccatcttccactccagtagccaattctggaaccaaacccaagactacggctattcaaggtatttcagagaaggaaaaggctgaaattgaagccaaggaagcttgtgattggctacgggcaactggtttcccccagtatgcacagctttatgaagatttcctgttccccatcgatatttccttggtcaagagagagcatgattttttggacagagatgccattgaggctctatgcaggcgtctaaatactttaaacaaatgtgcggtgatgaagctagaaattagtcctcatcggaaacgaagtgacgattcagacgaggatgagccttgtgccatcagtggcaaatggactttccaaagggacagcaagaggtggtcccggcttgaagagtttgatgtcttttctccaaaacaagacctggtccctgggtccccagacgactcccacccgaaggacggccccagccccggaggcacgctgatggacctcagcgagcgccaggaggtgtcttccgtccgcagcctcagcagcactggcagcctccccagccacgcgccccccagcgaggatgctgccaccccccggactaactccgtcatcagcgtttgctcctccagcaacttggcaggcaatgacgactctttcggcagcctgccctctcccaaggaactgtccagcttcagcttcagcatgaaaggccacgaaaaaactgccaagtccaagacgcgcagtctgctgaaacggatggagagcctgaagctcaagagctcccatcacagcaagcacaaagcgccctcaaagctggggttgatcatcagcgggcccatcttgcaagaggggatggatgaggagaagctgaagcagctcaactgcgtggagatctccgccctcaatggcaaccgcatcaacgtccccatggtacgaaagaggagcgtttccaactccacgcagaccagcagcagcagcagccagtcggagaccagcagcgcggtcagcacgcccagccctgttacgaggacccggagcctcagtgcgtgcaacaagcgggtgggcatgtacttagagggcttcgatcctttcaatcagtcaacatttaacaacgtggtggagcagaactttaagaaccgcgagagctacccagaggacacggtgttctacatccctgaagatcacaagcctggcactttccccaaagctctcaccaatggcagtttctccccctcggggaataacggctctgtgaactggaggacgggaagcttccacggccctggccacatcagcctcaggagggaaaacagtagcgacagccccaaggaactgaagagacgcaattcttccagctccatgagcagccgcctgagcatctacgacaacgtgccgggctccatcctctactccagttcaggggacctggcggatctggagaacgaggacatcttccccgagctggacgacatcctctaccacgtgaaggggatgcagcggatagtcaatcagtggtcggagaagttttctgatgagggagattcggactcagccctggactcggtctctccctgcccgtcctctccaaaacagatacacctggatgtggacaacgaccgaaccacacccagcgacctggacagcacaggcaactccctgaatgaaccggaagagccctccgagatcccggaaagaagggattctggggttggggcttccctaaccaggtccaacaggcaccgactgagatggcacagtttccagagctcacatcggccaagcctcaactctgtatcactacagattaactgccagtctgtggcccagatgaacctgctgcagaaatactcactcctaaagctaacggccctgctggagaaatacacaccttctaacaagcatggttttagctgggccgtgcccaagttcatgaagaggatcaaggttccagactacaaggaccggagtgtgtttggggtcccactgacggtcaacgtgcagcgcacaggacaaccgttgcctcagagcatccagcaggccatgcgatacctccggaaccattgtttggatcaggttgggctcttcagaaaatcgggggtcaagtcccggattcaggctctgcgccagatgaatgaaggtgccatagactgtgtcaactacgaaggacagtctgcttatgacgtggcagacatgctgaagcagtattttcgagatcttcctgagccactaatgacgaacaaactctcggaaacctttctacagatctaccaatatgtgcccaaggaccagcgcctgcaggccatcaaggctgccatcatgctgctgcctgacgagaaccgggaggttctgcagaccctgctttatttcctgagcgatgtcacagcagccgtaaaagaaaaccagatgaccccaaccaacctggccgtgtgcttagcgccttccctcttccatctcaacaccctgaagagagagaattcctctcccagggtaatgcaaagaaaacaaagtttgggcaaaccagatcagaaagatttgaatgaaaacctagctgccactcaagggctggcccatatgatcgccgagtgcaagaagcttttccaggttcccgaggaaatgagccgatgtcgtaattcctataccgaacaagagctgaagcccctcactctggaagcactcgggcacctgggtaatgatgactcagctgactaccaacacttcctccaggactgtgtggatggcctgtttaaagaagtcaaagagaagtttaaaggctgggtcagctactccacttcggagcaggctgagctgtcctataagaaggtgagcgaaggaccccctctgaggctttggaggtcagtcattgaagtccctgctgtgccagaggaaatcttaaagcgcctacttaaagaacagcacctctgggatgtagacctgttggattcaaaagtgatcgaaattctggacagccaaactgaaatttaccagtatgtccaaaacagtatggcacctcatcctgctcgagactacgttgttttaagaacctggaggactaatttacccaaaggagcctgtgcccttttactaacctctgtggatcacgatcgcgcacctgtggtgggtgtgagggttaatgtgctcttgtccaggtatttgattgaaccctgtgggccaggaaaatccaaactcacctacatgtgcagagttgacttaaggggccacatgccagaatggtacacaaaatcttttggacatttgtgtgcagctgaagttgtaaagatccgggattccttcagtaaccagaacactgaaaccaaagacaccaaatctaggtgatcactgaagcaacgcaaccgcttccaccaccatggtgtttgtttctagaacttttgccagtccttgaagaatgggttctgtgtctaatcctgaaacaaagaaaactacaagctggagtgtaggaattgactatagcaatttgatacatttttaaagctgcttcctgtttgttgagggtctgtattcatagaccttgactggaatatgtaagactgtgcaaaaaaaaaaaaaaaatttatgtgtattcttattcagattgcttctgagaagcaaaactctttaaatacattatggaagataatgaagatacttcattctcttgtgatatcagtgtatgcgtacctgtgtcgctttatttgcagtgtgttgagggactggtgtatccactggaatagttggtactcttggatgtgttttctcaccaagatgagcaaagaaaggtttgcacagaggagtgtgaatgtgtgtttgttgctggctgaatggcaatagatgtctaaggtggattcagtgtctggcacactgagacacctccaagaaggagattgatgcatcaggttcagtttaacctggaatatctgactacccctgaatccacccagaaagggggcccaacacccttgtccatttatgggtattttttttcgaagttattaagcatattccttttccacgaacctcttctgtactttgattgtaataggttggctcttacacccattccaaatgcagtttatttttagacccgattgcaaatagtgatgtagttttaaccagtatggattagttcagggatgaactgctccctctagccttactggctctgatccacagggttttgttttgttttgttttgttttttgtttaagtcgagatataaaaactgaacacgataacacttactcttaaatcaagcatcaacactttttccctgttagaattctttgcatttttgtgtttgtaacagaaacgccttaagacactatgtttgggaatataggaaactatgtgtgtcccaaggaaatccctgtaaatttaactcacctacaaaaggctttttccccgcctttggttgttaacggcattcctgaaagccacatgtgtttattcattgggcttgttcttatcagcaaataggttttctggttttatgactttttgtcttattttatttttcctacatttctttttttttttttttcctttagaatgccctggaaatatatttaagtggtaatgaaaaatagtaatcatagtaaaacgcaacaagaagaaaaccaacccaaaccagtgaagttttttagaacctttagaagggtggtctttattcaggttttactgtaatggtaaggattgactcaagagacagtattagtaaatttattgtgtatggatcaaaagtgaataatgtatgaatgagagctgtaagaaggatttttattttgttataatttagttaccattttcagtgttatttcaaaggttctttgaagaattttggggcagggcatcagattagagttttaaaatttgagtattttggatatcagtgttcctcatgaagatatacatggatattcaattttgatggcttccagatttgtaagattgtatgttgtatataccattctattaagaaacatgtccactgtgctttcaaacatagataaagcatgataaagattattatttaagatatacttgtatttatacctcagatattcttttgggttttgtacctcaaggcttttttcttcttattgtaaatacactttacgtgaatacagtctaagtgaagaaaataaataaaaggaagaggtttataacttgctctatatctgtacagattataatcaataagtgcactattattaaatgtttaaagtaagggaaaagtctgggctgccttccttaatattgcatctcactcccacccttaaaaccacagattgcaaagcatagcattttagcatcaactacaatcaaaagagcgatttgctgaaggaaaaatcggactgcaaatcattccaaggccaaactgcaactgagccacccactcccaaacaggaaaccctggtgaaggttcaggaagcacggagattctctccaacaaaggtccagttaggaaacgacgctgagaggatgacgacaacgtgcaacagcagaaagatgcttgcaagcagagtcagggtcaccagtgaatgccacaaaagttctctttcccactgtttaatttgacaagagaagaatttgaaggatatgaacattttcaagaactctgctgaggtcacttagagcgccatcacaacttatttgtgtgactaattgcctagattgtaagctctttgagggcagggcttgtctcttacacatctttataatcccctgcagcggctttcagtattttgtacttgtaggcacctaataaatttattatttgctatactg

SEQ ID NO: 31596 - DNA, 5935 bp, Homo Sapiens
cttttcccatcgtgtagtcaagagtctgtgccagacttgaaggctttactttgttagccatgtgtttatgaacccccagcgctttccctagatcttttggctgataatctcaaacatggaggatgcttctgaatcttcacgaggggttgctccattaattaataatgtagttctcccaggctctccgctgtctcttcctgtatcagtgacaggctgtaaaagtcatcgagtagccaataaaaaggtagaagcgaggagtgaaaagctcctcccaacagctcttcctccttcagagccgaaagtagatcagaaacttcccaggagctccgagaggcggggaagtggcggtgggacgcaattccccgcgcggagtcgggcagtggcagcgggagaagcggcagccaggggcgcggcggggccggagagaggcggtcccctgggaggacggggtctcccctcgttgcctttgtagtggagaaggtggacaagtggcagtcggcgtgatcgcagggaagcggggccggcgcgggcggccgagggtccaggcgagcccgcgggcggacgggagatgccgctgctacaccgaaagccgtttgtgagacagaagccgcccgcggacctgcggcccgacgaggaagttttctactgtaaagtcaccaacgagatcttccgccactacgatgacttttttgaacgaaccattctgtgcaacagccttgtgtggagttgtgctgtgacgggtagacctggactgacgtatcaggaagcacttgagtcagaaaaaaaagcaagacagaatcttcagagttttccagaaccactaattattccagttttatacttgaccagccttacccatcgttcgcgcttacatgaaatttgtgatgatatctttgcatatgtcaaggatcgatattttgtcgaagaaactgtggaagtcattaggaacaatggtgcaaggttgcagtgtaggattttggaagtcctccctccatcacatcaaaatggttttgctaatggacatgttaacagtgtggatggagaaactattatcatcagtgatagtgatgattcagaaacacaaagctgttcttttcaaaatgggaagaaaaaagatgcaattgatcccttactattcaagtataaagtgcaacccactaaaaaagaattacatgagtctgctattgttaaagcaacacaaatcagccggagaaaacacctattttctcgtgataaactaaagctttttctgaagcaacactgtgaaccacaagatggagtcattaaaataaaggcatcatctctttcaacgtataaaatagcagaacaagatttttcttatttcttccctgatgatccacccacatttatcttcagtcctgctaacagacgaagagggagacctcccaaacgaatacatattagtcaagaggacaatgttgctaataaacagactcttgcaagttataggagcaaagctactaaagaaagagataaacttttgaaacaagaagaaatgaagtcactggcttttgaaaaggctaaattaaaaagagaaaaagcagatgccctagaagcgaagaaaaaagaaaaagaagataaagagaaaaagagggaagaattgaaaaaaattgttgaagaagagagactaaagaaaaaagaagaaaaagagaggcttaaagtagaaagagaaaaggaaagagagaagttacgtgaagaaaagcgaaagtatgtggaatacttaaaacagtggagtaaacctagagaagatatggaatgtgatgaccttaaggaacttccagaaccaacaccagtgaaaactagactacctcctgaaatctttggtgatgctctgatggttttggagttccttaatgcatttggggaactttttgatcttcaagatgagtttcctgatggagtaaccctagaagtattagaggaagctcttgtaggaaatgacagtgaaggcccactgtgtgaattgctttttttcttcctgactgcaatcttccaggcaatagctgaagaagaagaggaagtagccaaagagcaactaactgatgctgacaccaaaggctgcagtttgaaaagtttggatcttgatagctgcactctttcagaaatcctcagactgcacatcttagcttcaggtgctgatgtaacatcagcaaatgcaaagtatagatatcaaaaacgaggaggatttgatgctacagatgatgcttgtatggagcttcgtttgagcaatcccagtctagtgaagaaactgtcaagcacctcagtgtatgatttgacaccaggagaaaaaatgaagatactccatgctctctgtggaaagctactgaccctagtttcaactagggattttattgaagattatgttgatatattacgacaggcaaagcaggagttccgggaattaaaagcagaacaacatcgaaaagagagggaagaagcagctgccagaattcgtaaaaggaaggaagaaaaacttaaggagcaagaacaaaaaatgaaagagaaacaagaaaaactgaaagaagatgagcaaagaaattcaacggcagatatatctattggggaggaagaaagggaagattttgatactagcattgagagcaaagacacagagcaaaaggaattagatcaagatatggtcactgaagatgaagatgacccaggatcacataaaagaggcagaagggggaaaagaggacaaaatggatttaaagaatttacaaggcaagaacagatcaactgtgtaacaagagagcctcttactgctgatgaggaagaagcattaaaacaggaacaccaacgaaaagagaaagagctcttagaaaaaatccaaagtgccatagcctgtaccaatatctttcccttgggtcgcgaccgcatgtatagacgatactggattttcccttctattcctggactctttattgaagaggattattctggtcttactgaagacatgctgttgcctagaccttcatcatttcagaataatgtacagtctcaagatcctcaggtatccactaaaactggagagcctttgatgtctgaatctacctccaacattgaccaaggtccacgtgaccattctgtgcagctgccaaaaccagtgcataagccaaatcggtggtgcttttacagttcttgtgaacagctagaccagcttattgaagctcttaattctagaggacatagagaaagtgccttaaaagaaactttgttacaagagaaaagcagaatatgtgcacagctagcccgtttttctgaagagaaatttcatttttcagacaaacctcagcctgatagcaaaccaacatatagtcggggaagatcttccaatgcatatgatccatctcagatgtgtgcagaaaagcaacttgaactaaggctgagagattttcttttagatattgaagatagaatctaccaaggaacattaggagccatcaaggttacagatcgacatatctggagatcagcattagaaagtggacggtatgagctgttaagtgaggaaaacaaggaaaatgggataattaaaactgtgaatgaagacgtagaagagatggaaattgatgaacaaacaaaggtcatagtaaaagacagacttttggggataaaaacagaaactccaagtactgtatcaacaaatgcaagtacaccacaatcagtgagcagtgtggttcattatctggcaatggcactctttcaaatagagcagggcattgagcggcgttttctgaaagctccacttgatgccagtgacagtgggcgttcttataaaacagttctggaccgttggagagagtctctcctttcttctgctagtctatcccaagtttttcttcacctatccaccttggatcgtagcgtgatatggtctaaatctatactgaatgcgcgttgcaagatatgtcgaaagaaaggcgatgctgaaaacatggttctttgtgatggctgtgataggggtcatcatacctactgtgttcgaccaaagctcaagactgtgcctgaaggagactggttttgtccagaatgtcgaccaaagcaacgttctagaagactctcctctagacagagaccatccttggaaagtgatgaagatgtggaagacagtatgggaggtgaggatgatgaagttgatggcgatgaagaagaaggtcaaagtgaggaggaagagtatgaggtagaacaagatgaagatgactctcaagaagaggaagaagtcagcctacccaaacgaggaagaccacaagttagattgccagttaaaacaagagggaaacttagctcttctttctcaagtcgtggccaacaacaagaacctggaagatacccttcaaggagtcagcagagcacacccaaaacaactgtttcttctaaaactggtagaagcctaagaaagataaactctgctcctcctacagaaacaaaatctttaagaattgccagtcgttctactcgccacagtcatggcccactgcaagcagatgtatttgtggaattgcttagtcctcgtagaaaacgcagaggcaggaaaagtgctaataatacaccagaaaatagtcccaacttccctaacttcagagtcattgccacaaagtcaagtgaacagtcaagatctgtaaatattgcttcaaaactttctctccaagagagtgaatccaaaagaagatgcagaaaaagacaatctccagagccatcgcctgtgacactgggtcgaaggagttctggccgacagggaggagttcatgaattgtctgcttttgaacaacttgttgtagaattggtacgacatgatgacagctggccttttttgaaacttgtttctaaaatccaggtcccagactactatgacatcatcaaaaagcccattgccttaaatataattcgtgaaaaagtgaataagtgtgaatataaattagcatctgagtttattgatgacattgagttaatgttttcgaactgctttgaatacaaccctcgtaacacaagtgaagcaaaagctggaactaggcttcaagcattttttcatattcaggctcaaaagcttggactccacgtcacacccagtaatgtggaccaagttagcacaccaccggctgcgaaaaagtcacgaatctgactttgtccttctaaaggatatatttgaagaaaaacaaattgttcatgaaaatggaacattaaatcatgctgtataaagcaataacaattgattgaccacatgaaagtgtggcctgcactatattctcaattttaatattaagcactcaggagaatgtaggaaagatatcctttgctacagttttgttcagtatctaataagtttgatagatgtattggatacagtactggtttacagaggtttttgtacatttttgagatcattcatgtgtccagagatcttggaaaatattttttcacccacgatttattttgttattgatgatttttttttaaagtggtggtattaagggagagttatctacatggatgagtcttccgctatagcacagtttagaaaaggtgtttatgtcttaattaattgtttgagtacattctttcaacactacacatgaatgaatccaatcttataaccttgaagtgctgtaccagtgctggctgcaggtattaagtccaagtttattaactagatatttatttagtattgagagtaatttgtgaatttgttttgtatttataaaatttatacctgaaaaatgttccttaatgttttaaaccttttactgtgtttttattcctctaacttccttaatgatcaatcaaaaaaagtaacaccctccctttttcctgacagttctttcagctttacagaactgtattataagtttctatgtataactttttaactgtacaaataaaataacattttttcaaataaaaaaaaaaaaaaaaa

SEQ ID NO: 31597 - DNA, 1428 bp, Homo Sapiens
ggaagccattgcctgtttaatagttgctgttgctgcacttccgcttctctcccagcgagagagagacacgagtggccaggcccagccgcagccgcagcagcagccgccgcggcggcacggaggagccagacacaaagagaggggctgtttgcggggtggggtggggggttcgctatgtcggatgacgattcgagggccagcaccagctcctcctcatcttcgtcttccaaccagcaaaccgagaaagaaacaaacacccccaagaagaaggagagtaaagtcagcatgagcaaaaactccaaactcctctccaccagcgccaagagtgctggtcccaaaggcgataacatctatgaatggagatcaaccattctagggcctccaggatccgtgtatgagggtggtgtattctttctcgatatcacttttacaccagaatatcccttcaagcctccaaaggttacatttcggacaagaatctatcattgtaatattaacagtcaaggtgttatttgcttggacatattgaaagataattggagtccagcactaaccatttctaaagtcctcctttctatctgctcacttcttacagactgtaatcctgccgaccccttggtgggaagtattgccactcagtatatgaccaacagagcagaacatgacagaatggccagacagtggaccaagagatacgctacataaattggggtttcacaattcttacattatttgtctgtcacagaagagagctgcttatgattttgaaggggtcagggagggtgggagttggtaaagagtagggtatttctataacagatattattcagtcttatttcctaagattttgttgtaacttaaggtatcttgctacagtagacagaattggtaatagcaacttttaaaattgtcattagttctgcaatattagctgaaatgtagtacagaaaagaatgtacatttagacatttgggttcagttgcttgtagtctgtaaatttaaaacagcttaatttggtacaggttacacatatggccatttatgtaaagtccctctaagactacatactttttgtttaaaacaaaattggaatttgttttcccttcttggaagggaacattgatatttaacagagtttttagagattgtcatctcatatatataaaatggacacgtggctataaaacaccatataagagatgagtagtgcgttttattttatatgccaatctactttgtttaaaaaaggtctgaatcaggacttgtgaaaacctgtagtgaaataccttaagctgttaactaactgtaaggcgtggaataggagttgctcagtggattggttctatgttgtggactacttaagtctgcatttgttactgtgctaataaacaatattaaaaaccacctaataaacaaaaaaaaaaaaaa

SEQ ID NO: 31598 - DNA, 5692 bp, Homo Sapiens
gtttccggccgccgtcgctgtccagggaggctgaggcgagaggtagctgtccgggtggggagcccgcactaccttcttcctcttcctcctcctcctccgggtgaggggagcgaaggttgggggtccccgagcccatggaccaggaggaggcggaggccgccgagagccggggccccgctatgtggccctgagccccgtgtactggttctgcctgtctggagggccatggagaagaggctgggagtcaagccaaatcctgcttcctggattttatcaggatattattggcagacatctgcgaagtggttgagaagcctgtacctgttttatacttgcttttgcttcagcgttctgtggttgtcaacagatgccagtgagagcaggtgccagcaggggaagacacaatttggagttggcctgagatctgggggagaaaatcacctctggcttcttgaaggaaccccctctctccagtcatgttgggctgcctgctgccaggactctgcctgccatgtcttttggtggctagaagggatgtgcattcaggcagactgcagcaggccccagagctgccgggcttttaggacacactcctccaattccatgctggtgtttttaaaaaaattccaaactgcagatgatttgggctttctacctgaagatgatgtaccacatcttctggggctaggttggaactgggcatcttggaggcagagcccacccagagctgcactcagacctgctgtatcttccagtgaccagcagagcttaatcaggaagcttcagaagagaggtagtcccagtgacgtagttacacctatagtgacacagcattctaaagtgaatgactccaacgaattaggtggtctgactaccagtggctctgcagaggtccacaaggcgattacaatttccagtcccctaaccacagacctgactgcagagctgtctggtgggccaaagaatgtatcagtgcaacctgaaatatcagagggtcttgctactacgcccagcactcaacaagtaaaaagttctgagaaaacccagattgctgtcccccagccagtggctccctcctacagttatgctacccctaccccccaggcctctttccagagcacctcagcaccatacccagttataaaggaactggtggtatctgctggagagagtgtccagataaccctgcctaagaatgaagttcaattaaatgcatatgttctccaagaaccacctaaaggagaaacctacacctacgactggcagctgattactcatcctagagactacagtggagaaatggaagggaaacattcccagatcctcaaactatcgaagctcactccaggcctgtatgaattcaaagtgattgtagagggtcaaaatgcccatggggaaggctatgtgaacgtgacagtcaagccagagccccgtaagaatcggccccccattgctattgtgtcacctcagttccaggagatctctttgccaaccacttctacagtcattgatggcagtcaaagcactgatgatgataaaatcgttcagtaccattgggaagaacttaaggggcctctaagagaagagaagatttctgaagatacagccatattaaaactaagtaaactcgtccctgggaactacactttcagcttgactgtagtagactctgatggagctaccaactctactactgcaaacctgacagtgaacaaagctgtggattacccccctgtggccaacgcaggccccaaccaagtgatcaccctgccccaaaactccatcaccctctttgggaaccagagcactgatgatcatggcatcaccagctatgagtggtcactcagcccaagcagcaaagggaaagtggtggagatgcagggtgttagaacaccaaccttacagctctctgcgatgcaagaaggagactacacttaccagctcacagtgactgacacaataggacagcaggccactgctcaagtgactgttattgtgcaacctgaaaacaataagcctcctcaggcagatgcaggcccagataaagagctgacccttcctgtggatagcacaaccctggatggcagcaagagctcagatgatcagaaaattatctcatatctctgggaaaaaacacagggacctgatggggtgcagctcgagaatgctaacagcagtgttgctactgtgactgggctgcaagtggggacctatgtgttcaccttgactgtcaaagatgagaggaacctgcaaagccagagctctgtgaatgtcattgtcaaagaagaaataaacaaaccacctatagccaagataactgggaatgtggtgattaccctacccacgagcacagcagagctggatggctctaagtcctcagatgacaagggaatagtcagctacctctggactcgagatgaggggagcccagcagcaggggaggtgttaaatcactctgaccatcaccctatcctttttctttcaaacctggttgagggaacctacacttttcacctgaaagtgaccgatgcaaagggtgagagtgacacagaccggaccactgtggaggtgaaacctgatcccaggaaaaacaacctggtggagatcatcttggatatcaacgtcagtcagctaactgagaggctgaaggggatgttcatccgccagattggggtcctcctgggggtgctggattccgacatcattgtgcaaaagattcagccgtacacggagcagagcaccaaaatggtattttttgttcaaaacgagcctccccaccagatcttcaaaggccatgaggtggcagcgatgctcaagagtgagctgcggaagcaaaaggcagactttttgatattcagagccttggaagtcaacactgtcacatgtcagctgaactgttccgaccatggccactgtgactcgttcaccaaacgctgtatctgtgaccctttttggatggagaatttcatcaaggtgcagctgagggatggagacagcaactgtgagtggagcgtgttatatgttatcattgctacctttgtcattgttgttgccttgggaatcctgtcttggactgtgatctgttgttgtaagaggcaaaaaggaaaacccaagaggaaaagcaagtacaagatcctggatgccacggatcaggaaagcctggagctgaagccaacctcccgagcaggtaggggccctgggtgccagagcttctaggtctgtgcactctctctgtggaaggctgctgtcactagcccctcctgagtgtgtcactaacagcccactgtgcttgcaaagcattttgttcccttttgcctgatgaagactgagggtcagatttgccctgagctgcactggacaaaatgcctccaggacccacttcgcgtgctacttccgcttggcgggggtgctgggcctgttgttttcctttgcctgggcattctcctcatgtttcccacctggagttccgcttttccaactgccccaggtagtcagggtcagggaccttggacttgtctcttactgctgaccagtctgtgctttatgggcagagatgagacccaggcccgtgtctgccagctgaccacctttcagccagccttgttctcctgtcttcctatctttatcatttggcaagtcctcagcttctgtcagtgtcttagggcagataggagggcatttccttgcacaaacagtaagatgactttgagtgatggcactgggagatcagggcaggtagtaggccttccttcctccgctgggctgggtcacctggcgagggtttcactcatcatggatgccatgggacaggtatcattggtttatgagagctagactctataaagcgattcctaaacactctgcaagtagaactatttttatataaagcatttattaaacacttttcatgcttaaagctttgtgttagggagaggctatgggggtatagggagtcatcagacacaggctgtgctctcagtctagtgagggagaaaagacacacagtagcagaagagaacaggctcacagcagtctggactctgcaccaagcagctcgatccaccaacactgtcaaggtggagactggaggtggtggggcttgaaatgagcccaggaaaccagagcagtgagggcgggcggggcatttcacccaggaatattgagaatgagggcctggaggtgaaatgtgcaaaacccacccctcacactgcagccaaggtttttatcatgttactctgatcatgtttttcaccccctgacattcttcaatgacttactatttctagcacaaaaagctagaacttttggtctggtagatgtggcctttgtgagcttacatcagtttgcttttctggaatctttctctttgctgatctccctcttttctaaacaagttcttctggttcatccagtaatctctttcttttttaaaaatgtggcgacaaggtcttgctctgtcacccaggctggagtgcagtggtatagtcatagctcactgcaacctccagctcctgagctcaagtggtcctcctgcttcagcctcccaaagcagctgggactacaggcatgcaccaccatacccagccctagaaagctctttcttatccctcccttaacctcctcaagttgtgctcacctttctctcacatgcctgggtcggcatttctctcgctgtctcatgattagttatgtttgcctgtctccccacccatcagtgaaatccctgagggcaggggctgtctcattcatctgtggatatggagcgggaccactatgtgccaggccctgtgccagacactgcttatattgtggtgaatcaaacggacagacttcactcttgtgtagcttatgtcagacagacattaagcaaactcacaaatacataaaatatgctcataaaaggcctttatgaagaaaaacacttaagctgagacctggataagtgggagctagccagataaagctgcaggaaatagcattccaggcaaaggaacaaaactggtgcagacccagctgctagaaggagcagagagcatttgaggaggtagaagaaggtgacatgatggacaggttcaccttcccacagagtaaggggtgagtgacccaaggctcaatggatgagcagggtccctgctgaggacttctcttgagtacaatggggagccactgatagctttttaaggggatgaatggtgggatttggtttacatttattattatttgagacagagtctcactcttatcacccaggcaggagtgcagtggtgcgatcaaggcccactgcagtcttgacctcctgggctcaggtgatccttccacctcagcttcctaagtagctgggaccacaggcatgcgccaccatccccaggtttttttgttgttgttgttgttgttttgtatttttggtagagacggggtttcatcatgttgcctaggctgttcttgaactcctgggcttaagtgatctgcctgccttggtctcctaaagtgctgggattataggtgtgagccatggcacccggtcttggtttatattttaaaaagacaactgtgtagctgggcgtggtggtgggtgcctgtaatcccagctactcgagaggccaaggcaggagaattgctagaacctgggggtgtgaaggtttcagtgaactgagatcactccaacctgggcaataaagccagactctgtctc

SEQ ID NO: 31599 - DNA, 1955 bp, Homo Sapiens
tggaacactttatgttgaactgtggtagaggaaacaagacagttctgtctgcagaagcccattatggctgtaactggagatgacacagctgccactggtgacatgccaacttaccagatccgagctcctactgctgctttgccacagggagtggtgatggctgcatcgcccggaagtttgcacagtccccagcagctggcagaagaagcaacacgcaaacgagagctgaggctaatgaaaaacagggaagctgcccgggagtgtcgcaggaagaagaaagaatatgtcaaatgtcttgaaaatcgtgtggctgtgcttgaaaaccaaaacaagactctcattgaggaactcaaggccctcaaagatctttattgccataaagtagagtaactgtctttgacttggaccttgtttactctaatcaaggcaggagatgcagcagtcctacttattgccatgtggacttgtgggaaggacacgtgtgacccttaagaatccagtttggattagtgtttgaaattgaattgggaatgttgttccaggatgtggaatgcagccgtgatcacacttaccgagcttactttgatctgtttgtcaatagcatgcaaaaaatgctttgtttgccctttgcttctgctttttttcagggaagctgccaaagaatgtcgacgtcgaaagaaagaatatgtaaaatgtctggagagccgagttgcagtgctggaagtccagaacaagaagcttatagaggaacttgaaaccttgaaagacatttgttctcccaaaacagattactagaaatatttaactatgaactgaaggcagcatgtatagttgcttttgaaggaatacaatatatagctggcaagaatggtggcttcttttctttgtatcattcatcttcttctttaatcacttaacattcctaaaatgcttcactgtacgtagttaagtcgtagctataacttcaaattttttaaaagagacaaactgtaaaaaatgtgtgtattcttaaaatgcaatatttgtaaggcttgttccaatgccacatacttgcagctcccattctatgtgtcatcaatagtgtcctatgcaataaaattatttgcaggtctttaaatcattttaggaaaggatgatcaaaaataatgcatccagcagtacaataaaagtaaaccacaaaaaaatacctcaggaaagaatagaaagaaagtctatctaatgacatgcctatatgagaagaatagcctagatatgaatatatggcatttgcagatttttatattagttgctttgttaaaaaaaaaaagattgtattgctgtccttgaatgccatagtcaaagagagtttttaatagaaccatgttggttgcactttgtagtgtttggtgctcatttaaatatctgaacatttactacagtttttaactctactgtgtaatataaaagatcttgcagaagttcttagtgttggtttaatattacctaatgaaagtgatgacatattttttatatctggaatgagcctgttgggatcgcattgcataccttcggggtacaagtcagtttctacactgggtgctgatccttgcacgcgccctttctaccatctcacggtggggatggccgcagggctgtgcacccagaagaagatggctgttagcgtttcggccttcataatggcctgagactttctttctgtaggtggtctggagctgtccggctggtggccccctattttgccatttagcgaacaaccacaggaattttaaaaacaaaaacatcccaagattttttcatttcaaaatgcttcaaagtccacattagatcagatactccgctgtcggcacattcagctgaggttcattacaatcgagactgcaatgtgatctatgtttcatcttgtttttataataaaaagcttcagggaacaagcccaaagccctcaccacaaaaaa

SEQ ID NO: 31600 - DNA, 6823 bp, Homo Sapiens
cagatggccggggctcaacccggagtgcacgccttgcaactcaagcccgtgtgcgtgtccgacagcctcaagaagggcaccaaattcgtcaagtgggatgatgactcaactattgttactccaattattttgaggactgaccctcagggatttttcttttactggacagatcaaaacaaggagacagagctactggatctcagccttgtcaaagatgccagatgtgggagacacgccaaagctcccaaggaccccaaattacgtgaacttttggatgtggggaacatcgggcgcctggagcagcgcatgatcacagtggtgtatgggcctgacctcgtgaacatctcccatttgaatctcgtggctttccaagaagaagtggccaaggaatggacaaatgaggttttcagtttggcaacaaacctgctggcccaaaacatgtccagggatgcatttctggaaaaagcctatactaaacttaagctgcaagtcactccagaagggcgtattcctctcaaaaacatatatcgcttgttttcagcagatcggaagcgagttgaaactgctttagaggcttgtagtcttccatcttcaaggaatgattcaatacctcaagaagatttcactccagaagtgtacagagttttcctcaacaacctttgccctcgacctgaaattgataacatcttttcagaatttggtgcaaaaagcaaaccatatcttaccgttgatcagatgatggattttatcaaccttaagcagcgagatcctcggcttaatgaaatactttatccacctctaaaacaagagcaagtccaagtattgattgagaagtatgaacccaacaacagcctcgccagaaaaggacaaatatcagtggatgggttcatgcgctatctgagtggagaagaaaacggagtcgtttcacctgagaaactggatttgaatgaagacatgtctcagcccctttctcactatttcattaattcctcgcacaacacctacctcacagctggccaactggctggaaactcctctgttgagatgtatcgccaagtgctcctgtctggttgtcgctgtgtggagctggactgctggaagggacggactgcagaagaggaacctgtcatcacccatggcttcaccatgacaactgaaatatctttcaaggaagtgatagaagcaattgcggagtgtgcatttaagacttcaccttttccaattctcctttcgtttgagaaccatgtggattccccaaagcagcaagccaagatggcggagtactgccgactgatctttggggatgcccttctcatggagcccctggaaaaatatccactggaatctggagttcctcttccaagccctatggatttaatgtataaaattttggtgaaaaataagaagaaatcacacaagtcatcagaaggaagcggcaaaaagaagctctcagaacaagcctccaacacctacagtgactcctccagcatgttcgagccctcatccccaggagccggagaagctgatacggaaagtgacgacgacgatgatgatgatgactgtaaaaaatcttcaatggatgaggggactgctggaagtgaggctatggccacagaagaaatgtctaatctggtgaactatattcagccagtcaagtttgagtcatttgaaatttcaaaaaaaagaaataaaagttttgaaatgtcttccttcgtggaaaccaaaggacttgaacaactcaccaagtctccagtggaatttgtagaatataacaaaatgcagcttagcaggatatatccaaaaggaacacgtgtggattcatccaactatatgcctcagctcttctggaatgcaggttgtcagatggtggcacttaatttccagacaatggacctggctatgcaaataaatatggggatgtatgaatacaacgggaagagtggctacagattgaagccagagttcatgaggaggcctgacaagcattttgatccatttactgaaggcatcgtagatgggatagtggcaaacactttgtctgttaagattatttcaggtcagtttctttctgataagaaagttgggacttacgtggaagtagatatgtttggtttgcctgtggatacaaggaggaaggcatttaagaccaaaacatcccaaggaaatgctgtgaatcctgtctgggaagaagaacctattgtgttcaaaaaggtggttcttcctactctggcctgtttgagaatagcagtttatgaagaaggaggtaaattcattggccaccgtatcttgccagtgcaagccattcggccaggctatcactatatctgtctaaggaatgaaaggaaccagcctctgacgctgcctgctgtctttgtctacatagaagtgaaagactatgtgccagacacatatgcagatgtcatcgaagctttatcaaacccaatccgatatgtgaacctgatggaacagagagctaagcaattggctgctttgacactggaagatgaagaagaagtaaagaaagaggctgatcctggagaaacaccatcagaggctccaagtgaagcgagaacgactccagcagaaaatggggtgaatcacactacaaccctgacacccaagccaccctcccaggctctccacagccagccagctccaggttctgtaaaggcacctgccaaaacagaagatcttattcagagtgtcttaacagaagtggaagcacagaccatcgaagaactaaagcaacagaaatcgtttgtgaaacttcaaaagaaacactacaaagaaatgaaagacctggttaagagacaccacaagaaaaccactgaccttatcaaagaacacactaccaagtataatgaaattcagaatgactacttgagaaggagagccgctttggaaaagtccgccaaaaaggacagtaagaaaaaatcggaacccagcagccctgatcatggttcatcaacgattgagcaagacctcgctgctctggatgctgaaatgacccaaaagttaatagacttgaaggacaaacaacagcagcagctgcttaatcttcggcaagaacagtattatagtgaaaaataccagaagcgagaacatattaaactgcttattcaaaagttgacggatgtcgcagaagagtgtcagaacaatcagttaaagaagctcaaagaaatctgtgagaaagaaaagaaagaattaaagaagaaaatggataaaaagaggcaggagaagataacagaagctaaatccaaagacaaaagtcagatggaagaggagaagacagagatgatccggtcatatatccaggaagtggtgcagtatatcaagaggctagaagaagcgcaaagtaaacggcaagaaaaactcgtagagaaacacaaggaaatacgtcagcagatcctggatgaaaagcccaagggggaaggttcctcctcattcttgtcggaaacttgccatgaggatccctctgtttcccccaactttactccccccaaccctcaagctctcaagtggtgaccaccgtccttccggccagctgcaggtggagctggagcaagaataccaagacaaattcaaaagactgcccctcgagattttggaattcgtgcaggaagccatgaaaggaaagatcagtgaagacagcaatcacggttctgcccctctctccctgtcctcagaccctggaaaagtgaaccacaagactccctccagtgaggagctgggaggagacatcccaggaaaagaatttgatactcctctgtgaatgctcctgccaggccttcagaaattgcatggccactccagcgtcatcggactctctcttattacaaagatcactgcccaggaccatcttcccgagaagcatcccttagcctaaaatccacaccaaagggagagttccagaggaatccatgaagaattcccatgcccaggctccatgtgtcatgtggaaacctccacaggtctgctagtgaagaatgcatgtatgtgagatttttgttttctttccaatagcaaattcaaagcaagcaacttgcaggctccatggaacttttaatgaaggacagtgtcttctttgaagaaaatcaagctcgtgtttttattcgaagctctggtgtaaaatatttcaaagtcatagaaatagtttgagaaatgcatagcattatttaacactattgaacagccgactttgagcattgtttcttctaactgcccctcaactaccattatcttcaagtcaacatgcatattacattttcatcctttgctttgcaagcactggtggcttgcagtttgctaatttatttatcatagagtcatcaatgtatttgttgctgacatggttttattagatactgtagtgattcaaataagttttctatttgaaaaaaaaaatcacttgattgtatccttgcccagtgaagccatcctaagacttagcaatatggattgtacatttggctgcatgagcaagtcggccgcacacttccagacagtgtgctgtttgaattgactatttgcactcaaagtctgggtattcattggttattggcctgaaatgatcaaataactacaaatgatctgttgaataaaaatagttgagctgatatatgttaagcagatattcaatcagaatgaacaggttccggtggttattttgccgtttgacattttttatggttcatttatttttaatatagagaggaagattgaatatttatctagagaatacaaagacccacatgtaaatgataggtattatctccatgtatatatgtacccacttagtcatgtaagtgcatatacacatacacacacatgagtgtagacatgtgtttattaattgacaatgacccaaatctcttccacaagacttaaaaccaaattcagggacaaatggatagagaagaaaagggtcaaacatcgagattacatggatgttaaattatatggagacgctaagaaataattgatggagccattgatgcaaaccgaagtagatttagaacttatatgaatttgatttatattttgcaagatcaaaaattagatgttaagtatcagattttaagcttgttttaatggtcaaaaaattaggacagaaataatatggacatttattagtatcttccataatttttaagtctgacacatttctattttattctaacataaaaaaacttccattatatatttactaagtatatttaattcacttaactctgtctttataagttcctattttagatggaataagagaaacaaattatatcaaggtaaaactgatcaaaagcataattgaaagttctgaaaaaagaaaaataataatatgtagaaaaatgtaacttagagagtaacacatgaacattgaagttaaaacccagaagccagatgctcacagttttattttactttaaaataaacctgtctgactgtagctttgtgaaatatcttaaaacgcaaaaaccaattgtgtcctgaaaattgtttcaagaatttaatatttttatgaaaattattttatttaactttaagcaataactagagattacaattaaattttaatcaaaatgaaggcttagttcaaacataaggaaacagtgtttgattaaaaaaaacacatctagtaagacgtaaggggaaaatcacatcctctttggagatgattatattttgatctgaagggtttggggtgttcattagacacttaataaaacttaacttccaatgaaaaagaaatcttttgtaaatcattctacttttgcactttgaaagaaaggcgttaatcataaagaagcaagaatggtcaaaatcgaatgctgcatttttataaacaaaattacagactgtctgaaattgaagaagaatgaactaataatagcattcataaccaaacacaatgatgattattgcagaacattgtatcacattttagtccagagatagaataaagttgaataaccttgacttacacaaaactgttttggtagttggatttcattatcttagtgaatttagtcattttacaatatgtttgtatttggccatttactgtaatcacatttttatatctgtacaatgacactttttgcagttgtggggtagtgtgtaacactgtccatcttgcatcattgaaactactacaatgatactatcatttaataatattaatattacttgaaatagactaagataaagaaaaggggtctgtatgatgtgcagttttgtgcctttatgtatttgccttgttctttgtcgaatgtgtgaaattccgtactgtggtttttcctataatagaaagtagagctgtgtattaaattagactgtgtctctctgatacctttacactactgagaatagcatggttttggccatgtaaaccaattttcaaagttctaatgacatagccatgtgtttttggttttttatatttcattttaaaatttgagtatcaccatacattaattaatactcctgtagtagataagctgtcattaagtaattcccaaaaaaagggccatttgcttgcattactttgaatttaatgttgcgcttgtgcactgtgttaatattgtttgtgatggattggacgttgtgactcttgccttttaagaagaaaaaaaagataggacaaagtatttgaagctcttaaaatgtacatattttggttcttctatctcaaattatttaaaatgcataattcacatttttgtaataattctatgcaattttgtggcatgatgtttcttccacttgtaattttatgtgctttcatcacaaatccaaaggaaagaataaaaatttcttaacacaa

SEQ ID NO: 31601 - DNA, 2426 bp, Homo Sapiens
gggtggtggcggtggctgcggcgacggcggtcgcgtcggcgtcagggtcggggtcggtaaggggtgcggcaatgctgcaactgcgggactcggtggactcggccggtacgagccccacggcggtgctggcggccggcgaggaggtgggggcaggcggcggcccgggcggggggcggccgggggcggggacgccgctgcgccagacactctggcctctcagcatccacgaccccacgcgccgcgcccgcgtcaaggagtacttcgtgttccggcccggcagcatcgagcaggcagtggaggagatccgcgtggtggtgcggcccgtggaggacggcgagatccagggagtgtggctgcttaccgaggtggatcactggaacaatgagaaggagcggctggtgctggtcacggagcagtccctgcttatctgtaaatacgacttcatcagtctccagtgccagcaggtggtgcggatagcgctcaacgcagtagacaccatttcctacggagaattccagtttccccctaaatcgctcaacaagcgagaaggttttgggattcgaattcagtgggacaagcaaagtcgtccttccttcataaacagatggaatccctggtctaccaacgtgccctatgccactttcacagaacacccgatggctggcgcagatgagaagacagcatctctgtgtcagttggaaagcttcaaggctctgttaatccaagctgtcaaaaaagcccaaaaagaaagccctttgccaggacaggcgaatggcgtgctgatcctggagcgccccctgctcatcgagacctacgtgggactcatgtccttcattaacaacgaggcgaaactgggctactccatgaccaggggcaaaataggcttttagccgctgcgttctgggagctcctccccctccccagaaggccaagggatgtgggggctgggggactgggaggcctggcagtcttcatgctgccctgctgctgctggaaggatggggatctttcacctttagggatctcagcacaattagaatcgtaaagtgaattctatctatttaattggatattggactctgctcatataagctacagacaaaagccaaaagactctcgctgtccctgtgctgctggtatttcattctctgtaacttcagttctggtgttttccttgagtatctacttggcttctcgtggtttttcccaccccagctgccccagcacgcgggacccatagcacaccccttagcgcttgcctaggttgctgaaaacagggaggcacctggtatctcgagtgcctgcagttgcaagtatgtttacacctggtgtccaattttgtattttaaaatgtaatccatttttacttcagctcatccaaaagcagccagcagaccggttgactgagaccggtctgtggctgtgggccccttggtgacccgctgctcttttggaaatgggtgacctgaagtgacactttttccacaattaacccaagttgtgttaatacttcaggtctgtttcccagacccagaaagctttacagaaaatcattgtaagacaatttattaatttgagaaagtcaccttgacagttctttgcacacaagttttacacctctctggattcgaagtttgtattgtattcatagttaaagggaatcgggtactttgcttgttgaataatgcactttaaaacaaggaaccgtatcaggccagcatggtggctcatgcctgtaatcccagcattttgggaggctcaggcagacaaatcgctctagctcagaagttgcagagcagcctgggcaacatggtgaaacccgtctctaccaaacagacaaaaagcagccaggcgtggtggcacatctgtggtcccagctacttgagaggctgagccaggaggatcgcttgagcccaggaggcggaggttgcagtgagctgagatggcaccacttattgcactccagcccgggcgacagagcgagactccatctaccagatccttatgacgcagctgatgcctgccttggttcctaccactctggtgtagacagaggactttgtccaagtctcacactaaacatgcccgggcttcgatgtgcctggaggatttccccacagggacccacgcacctccctgtatctgcgcagcttgctcgtgtggctggaagcgctgtcgataagcttcacgcactggcttgccagttcttcagctctaggacttgtagctttaagcaaacggtgtggcatgggttgagtgtggccacctgcaggatgtgcagggctgcctcagaagctggctggggactctagcctctgtgttcataaagacattaagaagtggatggatgttgttccttttttgaagttgtcattaaagtaggtgcaacaaccaaaaaaaaaaaaaaaaaaaaaaaaaaaaaaaaa

SEQ ID NO: 31602 - DNA, 4782 bp, Homo Sapiens
cgctcccgctgcaacagtcccgggcatcgcagctgccagtcaaggctaggaggcggtcggggactccgcctcctcccgacccgtaggtctgggagcgcaagtcctgttgcagtcttgcaaagtgtaaagctgtcagccgcagagcacggaggaaagacggagagaatggaagagctcctgtccggtgtgccagcagcccggactggcggtgagcgcgagggaggctactgagaagcccggcgacggaggaacgcaggtctgctgccagggattgaggagactgaagaatgctgaagacaggctgatgggctcagctggtaggctccactatctcgccatgactgctgaaaatcccactcctggagacctggctccggcccccctcatcacttgcaaactctgcctgtgtgagcagtctctggacaagatgaccacactccaggaatgccagtgcatcttttgcacagcttgcctgaaacagtacatgcagctggcaatccgagaaggatgtgggtctcccatcacttgccctgacatggtgtgcctaaaccacgggaccctgcaggaagctgagattgcctgtttggtacctgtggaccagtttcaactttatcagaggttaaaatttgaaagagaagttcatctggacccctaccgaacatggtgtcctgttgcagactgtcagacagtgtgccctgttgcctcgagtgacccaggacagcctgtgctggtggaatgcccttcttgccacctgaaattctgctcgtgttgcaaggatgcttggcatgcagaggtctcctgtagagacagtcagcctattgtcctgccaacagagcaccgagccctctttgggacagatgcagaagcccccattaagcagtgcccagtttgccgggtttatatcgaacgcaatgaaggctgcgctcagatgatgtgcaaaaactgcaagcatacattttgctggtactgcctccagaacttggataatgacattttcctcagacattatgacaaagggccatgcaggaataaacttggccactcaagagcatcagtgatgtggaaccgaacacaggtggtggggattctcgtaggcttgggcatcattgccttggttacttcacccttgttactcctggcctccccatgtataatctgttgtgtctgcaagtcctgtcggggcaagaagaaaaagcacgacccatccacaacctaaagatctctgtgttcatacgccccagatatgtgagttacatgagatggcacagtgataaagccccatttagtgaccttgcctccttctccttgccaactttgaaagtgcctccgtgtccagactttgaacttgcctgccagccttcagcatcaggaaaggccaagtcctgggtgtgagtgttcctgtgtaacaagaactgggctcaacggtccagctgtttctatggagctttggggttccttgagatgaatgaacatatcattttatcatccaaaggatctcactggactgttcaacttccagccaaattcaaggagcttgcgggaacatttgatataacaaatgtgttgtcattgttggcaacatacaagataaccaagaagctggagtctgttctgtgttgatttgactgccatgagaaacacaggggaaacctgatgaggagaaggataagactgcgtaaggagaaatcctcataggagctataaagcaggctgctgatctcagcagttgatatggtggttgtgcctctgctggctactgggtgtgctgtccccatgttcccgctgtgatttggcagaaacacaataggcttctccttgtgtgatctcagcttcaagcaggtgaaactgctgtgcagagggagttgccccttcccagtaaaagagttgcagcctgttaaacaatgtggtctaatttagtgtctctcccttggcaaatgtaagttttctaagttggccaacttgtctcttacagccagtggctgtggtctacagaattgtttcatataaaatacgggtagagtggtagagtttcaaaactttcgtcatagatatctgggacctttctcaggatctgtgttcacacagccaatagatttggaatcaggcctaagagtacacatggagggtaaatattaaagtgcgtattatgtacatctagaatccatgtgacttgcagcctacctgtaatttctatccattgagcatgcatggatatacccaatagtacacacaaaataaatgtttacttaagagccattctatccttttgtgactgaaatggtttattgtaaatctgcctaaagattttttgcatattatatatgtgaattttggttgtaagttcataacttacccaagggtatagactcataactcttttaaaacagtgcttagtacaatatcctgccatctctgtaaaaacgctaattgataaccgagtcatttacatgttttcgaacacagaatagctcttttctcagcatcattattgctctttcagcatctgttaggacagtctgaatactttctgtttcaaggcactgataaaaccgcaacaaaaacatgtaagaaataaaatagaaatgctttatatattttagtttaaatttatgtatcacctcattgtgacttattttttccattataccattagtcagatttgaataacgaggttttgaaaggataaaaccttttctccaatgacaggattatataattgctattggcaatgtagcctggtgcttcatgagacctatgctaaatgttactggagagttcttgaagccagggataccatatcaggaactattcaggatctatgatattttctgaggtaactgggtaatagaatatcaaattgctgctatctcggacctattgttaaaggatgatgctttgcctatgtaataggatatatcctaagtggggatgtgtatatttcaggaactttaattcacaagtatatattgatatctgatgtgtgtatagtacatctgttggttatgtacattttaatttacatgttgtgtagaacatagatgagaactctgggaaaacttgggaatggcaaccaaccaaaatcatttttaatcatttattagaaatttctcaatattgtgtctttttcttttgaaactctaaacacttcagaaaaaaacactatcagtgtagttcatgttagtataattatagatttacatatatttgaatagttaatttgctttgttttacacgtagcccactgcctcattataggtaaaaggcatttataactgctcaggggattacgagaactcaactgaaactgaatttttgtaacaagaatgttaatagtggcaaagtcctctgtcagtaaactctttaagcttggtgccgcaaagagtctttaaatgggggctgatttcaagtaacctaaaagactgtgttatcagaggaagaggtcccaaatttggagtaaagatgggagaaaataaatatgtgctatttccttggcgagttgggggaatttgccaccttacagagtttgtatcactgaattagctgcttttgtttttttttttttttttttgccagggctatggagtgggggttgtttgtcaaactgattttcaataattggatttaattttttttaacattgaaaagtgcctgaaaaatggtaaattcttaaatgtgtgtgagattgtcagaatcaacaaaactaggttggttaaacatatctctggtacatcaaggggcatgatacaaaccagtctaaagactgtttataaaggagagagctggcgacttatttttattttttttttttggacagagtctccctttgtcacccaggccggagtgcagtggcatgatcatggttcacttcaacccctacctcctgggctcaagtgttcctctcaccttatcctcctgagcagctgggactacaggcacacaccaccacacctggctaagttttgtattttttgtagagatggggtttctctgtgttgcccagtcttgtctcaaactcctgggctcaagcgatccacccaccttgggctcccaaagtgttgggattacaggtgtgtgtcactgtgcctgacagctgacagttttaactgacaactttgataacagaggctgctatttttgttttagataattggccagtgacagagtttacccttgcctcctttcttggtctgccagctttgtcctttctgagtgattctctttctgtattgagaggaagtgtgggtctacatagggatgtttggatgctatggcaagaatctttttgtgtttggagtgtagtccatttgcaatagaaataaaaaaatccgtcaccaaattgtaacctggatgttatagcccagcatctagaaatcctatgaaatgtattagcacaatatcttgccattgtcccatctaggaaattttttcttgttgtgaggtagggaagtgaggaggaaagccatgccgaagcaaatgttagaatcttaggcatcctatttgttcatgccatgggtatttgctttggacttggagtctgtactttgaaagaggcctttgaaaaacaaataattctgtgtgaattttcttgtagcgtgcttcatgaaaatatctacttatccaggtttgcaaatgtacatgttcatttgaatgtaaatcaccatttcttggaaccccacgttttttcttaaaaattattctgaattaaatgtatatttctttagccttccctacacagtactaataaaagacttttctttctgttcatgaaaaaaaaaaaaaaaa

SEQ ID NO: 31603 - DNA, 2160 bp, Homo Sapiens
agctacgggtcagagctagtccactaggtgctaatcaaatgctgtgttacaacactgtgaggttttcccagttataagtgtcactattagggttttttttaattgcaaagccaaataaggctgtcaattgcatcatcttaccttatttcttcagattaagtactgtttatagtgggatttttggtggatgtggtggcatcagcataatctatgtttcaggcgtcctatagaagaggattattcttcaggggatgtggaagaaaaggtagcagcaattgcagagacagatgaatctgcagaatcagaaggtgtaattgattctcataaacgtagagaaatcctttcacgaagaccctcttataggaaaatactgaatgaactgtcctctgatgtgcctggtgttcccaagattgaagaagagagatcagaggaagaaggaacaccacctagtattgctaccatggcagtaccaactagcatatatcagactagcacggggcaatacattgctatagcccaaggtggaacaatccagatttctaacccaggatctgatggtgttcagggactgcaggcattaacaatgacaaattcaggagctcctccaccaggtgctacaattgtacagtacgcagcacaatcagctgatggcacacagcagttctttgtcccaggcagccaggttgttgttcaagctgccactggtgacatgccaacttaccagatccgagctcctactgctgctttgccacagggagtggtgatggctgcatcgcccggaagtttgcacagtccccagcagctggcagaagaagcaacacgcaaacgagagctgaggctaatgaaaaacagggaagctgccaaagaatgtcgacgtcgaaagaaagaatatgtaaaatgtctggagagccgagttgcagtgctggaagtccagaacaagaagcttatagaggaacttgaaaccttgaaagacatttgttctcccaaaacagattactagaaatatttaactatgaactgaaggcagcatgtatagttgcttttgaaggaatacaatatatagctggcaagaatggtggcttcttttctttgtatcattcatcttcttctttaatcacttaacattcctaaaatgcttcactgtacgtagttaagtcgtagctataacttcaaattttttaaaagagacaaactgtaaaaaatgtgtgtattcttaaaatgcaatatttgtaaggcttgttccaatgccacatacttgcagctcccattctatgtgtcatcaatagtgtcctatgcaataaaattatttgcaggtctttaaatcattttaggaaaggatgatcaaaaataatgcatccagcagtacaataaaagtaaaccacaaaaaaatacctcaggaaagaatagaaagaaagtctatctaatgacatgcctatatgagaagaatagcctagatatgaatatatggcatttgcagatttttatattagttgctttgttaaaaaaaaaaagattgtattgctgtccttgaatgccatagtcaaagagagtttttaatagaaccatgttggttgcactttgtagtgtttggtgctcatttaaatatctgaacatttactacagtttttaactctactgtgtaatataaaagatcttgcagaagttcttagtgttggtttaatattacctaatgaaagtgatgacatattttttatatctggaatgagcctgttgggatcgcattgcataccttcggggtacaagtcagtttctacactgggtgctgatccttgcacgcgccctttctaccatctcacggtggggatggccgcagggctgtgcacccagaagaagatggctgttagcgtttcggccttcataatggcctgagactttctttctgtaggtggtctggagctgtccggctggtggccccctattttgccatttagcgaacaaccacaggaattttaaaaacaaaaacatcccaagattttttcatttcaaaatgcttcaaagtccacattagatcagatactccgctgtcggcacattcagctgaggttcattacaatcgagactgcaatgtgatctatgtttcatcttgtttttataataaaaagcttcagggaacaagcccaaagccctcaccacaaaaaa

SEQ ID NO: 31604 - DNA, 1240 bp, Homo Sapiens
gagctcgcagcgcgcggcccctgtcctccggcccgagatgaatcctgcggcagaagccgagttcaacatcctcctggccaccgactcctacaaggttactcactataaacaatatccacccaacacaagcaaagtttattcctactttgaatgccgtgaaaagaagacagaaaactccaaattaaggaaggtgaaatatgaggaaacagtattttatgggttgcagtacattcttaataagtacttaaaaggtaaagtagtaaccaaagagaaaatccaggaagccaaagatgtctacaaagaacatttccaagatgatgtctttaatgaaaagggatggaactacattcttgagaagtatgatgggcatcttccaatagaaataaaagctgttcctgagggctttgtcattcccagaggaaatgttctcttcacggtggaaaacacagatccagagtgttactggcttacaaattggattgagactattcttgttcagtcctggtatccaatcacagtggccacaaattctagagagcagaagaaaatattggccaaatatttgttagaaacttctggtaacttagatggtctggaatacaagttacatgattttggctacagaggagtctcttcccaagagactgctggcataggagcatctgctcacttggttaacttcaaaggaacagatacagtagcaggacttgctctaattaaaaaatattatggaacgaaagatcctgttccaggctattctgttccagcagcagaacacagtaccataacagcttgggggaaagaccatgaaaaagatgcttttgaacatattgtaacacagttttcatcagtgcctgtatctgtggtcagcgatagctatgacatttataatgcgtgtgagaaaatatggggtgaagatctaagacatttaatagtatcgagaagtacacaggcaccactaataatcagacctgattctggaaaccctcttgacactgtgttaaaggttttggagattttaggtaagaagtttcctgttactgagaactcaaagggttacaagttgctgccaccttatcttagagttattcaaggggatggagtagatattaataccttacaagaggtatgtgttttatattaaaagtttcaataaggcatttcttataattaagtttgtttatgtttgataaagaacacaatataaatacaaaaaaaaaaaaaaaaaaaaaaaaaaaaa

SEQ ID NO: 31605 - DNA, 4675 bp, Homo Sapiens
cagtagcatcgcccatttgccattcactgcagtagcaaaagtagtactctgtggtgggttaatcggtttgaggcagctccttaaatgaacatttgtgtttcatttttctgttattttcccgaacatgaaaagacgataaaactgaaatggaaaagatctattccagaggggagcttcaccacttcattgacggctttaatgaagagaaaagcaactggatgcgctatgtgaatccagcacactctccccgggagcaaaacctggctgcgtgtcagaacgggatgaacatctacttctacaccattaagcccatccctgccaaccaggaacttcttgtgtggtattgtcgggactttgcagaaaggcttcactacccttatcccggagagctgacaatgatgaatctcacacaaacacagagcagtctaaagcaaccgagcactgagaaaaatgaactctgcccaaagaatgtcccaaagagagagtacagcgtgaaagaaatcctaaaattggactccaacccctccaaaggaaaggacctctaccgttctaacatttcacccctcacatcagaaaaggacctcgatgactttagaagacgtgggagccccgaaatgcccttctaccctcgggtcgtttaccccatccgggcccctctgccagaagactttttgaaagcttccctggcctacgggatcgagagacccacgtacatcactcgctcccccattccatcctccaccactccaagcccctctgcaagaagcagccccgaccaaagcctcaagagctccagccctcacagcagccctgggaatacggtgtcccctgtgggccccggctctcaagagcaccgggactcctacgcttacttgaacgcgtcctacggcacggaaggtttgggctcctaccctggctacgcacccctgccccacctcccgccagctttcatcccctcgtacaacgctcactaccccaagttcctcttgcccccctacggcatgaattgtaatggcctgagcgctgtgagcagcatgaatggcatcaacaactttggcctcttcccgaggctgtgccctgtctacagcaatctcctcggtgggggcagcctgccccaccccatgctcaaccccacttctctcccgagctcgctgccctcagatggagcccggaggttgctccagccggagcatcccagggaggtgcttgtcccggcgccccacagtgccttctcctttaccggggccgccgccagcatgaaggacaaggcctgtagccccacaagcgggtctcccacggcgggaacagccgccacggcagaacatgtggtgcagcccaaagctacctcagcagcgatggcagcccccagcagcgacgaagccatgaatctcattaaaaacaaaagaaacatgaccggctacaagacccttccctacccgctgaagaagcagaacggcaagatcaagtacgaatgcaacgtttgcgccaagactttcggccagctctccaatctgaaggtccacctgagagtgcacagtggagaacggcctttcaaatgtcagacttgcaacaagggctttactcagctcgcccacctgcagaaacactacctggtacacacgggagaaaagccacatgaatgccaggtctgccacaagagatttagcagcaccagcaatctcaagacccacctgcgactccattctggagagaaaccataccaatgcaaggtgtgccctgccaagttcacccagtttgtgcacctgaaactgcacaagcgtctgcacacccgggagcggccccacaagtgctcccagtgccacaagaactacatccatctctgtagcctcaaggttcacctgaaagggaactgcgctgcggccccggcgcctgggctgcccttggaagatctgacccgaatcaatgaagaaatcgagaagtttgacatcagtgacaatgctgaccggctcgaggacgtggaggatgacatcagtgtgatctctgtagtggagaaggaaattctggccgtggtcagaaaagagaaagaagaaactggcctgaaagtgtctttgcaaagaaacatggggaatggactcctctcctcagggtgcagcctttatgagtcatcagatctacccctcatgaagttgcctcccagcaacccactacctctggtacctgtaaaggtcaaacaagaaacagttgaaccaatggatccttaagattttcagaaaacacttattttgtttcttaagttatgacttggtgagtcagggtgcctgtaggaagtggcttgtacataatcccagctctgcaaagctctctcgacagcaaatggtttcccctcacctctggaattaaagaaggaactccaaagttactgaaatctcagggcatgaacaaggcaaaggccatatatatatatatatatatatctgtatacatattatatatacttatttacacctgtgtctatatatttgcccctgtgtattttgaatatttgtgtggacatgtttgcatagccttcccattactaagactattacctagtcataattattttttcaatgataatccttcataatttattatacaatttatcattcagaaagcaataattaaaaaagtttacaatgactggaaagattccttgtaatttgagtataaatgtatttttgtcttgtggccattctttgtagataatttctgcacatctgtataagtacctaagatttagttaaacaaatatatgacttcagtcaacctctctctctaataatggtttgaaaatgaggtttgggtaattgccaatgttggacagttgatgtgttcattcctgggatcctatcatttgaacagcattgtacataacttgggggtatgtgtgcaggattacccaagaataacttaagtagaagaaacaagaaagggaatcttgtatatttttgttgatagttcatgtttttcccccagccacaattttaccggaagggtgacaggaaggctttaccaacctgtctctccctccaaaagagcagaatcctcccaccgccctgccctccccaccgagtcctgtggccattcagagcggccacatgacttttgcatccattgtattatcagaaaatgtgaagaagaaaaaaatgccatgttttaaaaccactgcgaaaatttccccaaagcataggtggctttgtgtgtgtgcgatttgggggcttgagtctgggtggtgttttgttgttggtttttgttgctttttttttttttttttttttaatgtcaaaattgcacaaacatggtgctctaccaggaaggattcgaggtagataggctcaggccacactttaaaaacaaacacacaaacaacaaaaaacgggtattctagtcatcttggggtaaaagcgggtaatgaacattcctatccccaacacatcaattgtattttttctgtaaaactcagattttcctcagtatttgtgtttttacattttatggttaatttaatggaagatgaaagggcattgcaaagttgttcaacaacagttacctcattgagtgtgtccagtagtgcaggaaatgatgtcttatctaatgatttgcttctctagaggagaaaccgagtaaatgtgctccagcaagatagactttgtgttattctatcttttattctgctaagcccaaagattacatgttggtgttcaaagtgtagcaaaaaatgatgtatatttataaatctatttataccactatatcatatgtatatatatttataaccacttaaattgtgagccaagccatgtaaaagatctactttttctaagggcaaaaaaaaaaaaaaaaaaaaaagaacactcctttctgagactttgcttaatacttggtgacctcacaatcacgtcggtatgattgggcacccttgcctactgtaagagaccctaaaaccttggtgcagtggtggggaccacaaaacaaccagggaggaagagatacatcattttttagtattaaggaccatctaagacagctctattttttttttgccactttatgattatgtggtcacacccaagtcacagaaataaaaaactgactttaccgctgcaatttttctgttttcctccttactaaatactgatacattactccaatctattttataattatatttgacattttgttcacatcaactaatgttcacctgtagaagagaacaaatttcgaataatccagggaaacccaagagccttactggtcttctgtaacttccaagactgacagctttttatgtatcagtgtttgataaacacagtccttaactgaaggtaaaccaaagcatcacgttgacattagaccaaatacttttgattcccaactactcgtttgttctttttctccttttgtgctttcccatagtgagaatttttataaagacttcttgcttctctcaccatccatccttctcttttctgcctcttacatgtgaatgttgagcccacaatcaacagtggttttattttttcctctactcaaagttaaaactgaccaaagttactggctttttactttgctagaacaacaaactatcttatgtttacatactggtttacaatgttatttatgtgcaaattgtcaaaatgtaaattaaatataaatgttcatgctttaccaaaaa

SEQ ID NO: 31606 - DNA, 11137 bp, Homo Sapiens
tgctgcttgcagctttttagatcaggactgcaatggagatacaattaaatcctaaaggtactttagaagcagggggtgttgtaatgtcttttctagataatggtgtgacactatgaagagatatcaagtttaattcttacaaattagaaagcatcatctgactaaactgagtgtctctggggcttaatcagcttgtatcactagtggggttttgtcatgcaaactgcactcctttaaatcataaggatgtgctggaaggctgctttcactttttagaattaaacttttcccccagtctcgtgagtattgcaactctcttaatgctttgaggagcttcaaagcatccttaagaaagggaaactaacttttgagaatattatggaaaaactgcgaatcaagtattccgaaatgtacaccatagtccctgcagagattgaatcccaggtggaagaatgcagaaaagctttagaagacatagatgagaagattagcaatgaagtcttaaaaagctcaccatcatatgcaatgaggagaaaaatagaagaaattaacaatgggcttcataatgttgaaaagatgttgcagcagaaaagcaaaaatattgagaaagctcaagaaattcaaaagaaaatgtgggacgagttagatctatggcattccaaactaaatgagctggattctgaagttcaggacattgttgaacaggacccaggacaggctcaagaatggatggataacttgatgattcctttccagcagtatcagcaagtatcacagagagcagagtgtagaacctcacagttgaataaggccacagttaagatggaggaatatagtgaccttctgaagagcactgaggcttggatagaaaataccagtcatttgctggccaatcctgctgactatgactctttgaggacactgagtcaccatgctagcactgtgcaggattccaagtgttttagaagtggaccaagaccaaatatttatgtttcttattatgttacagttatacagatggctttggaagattcagaacagaagcacaatcttttacattcaatctttatggatctagaagacctgtcaataatttttgaaacagatgaattaacccaatccatacaagagttaagtaatcaagtaacagctttacaacaaaaaataatggaaagccttccacagattcagcgaatggctgatgatgtggttgctattgaatctgaagtaaaatcaatggaaaaaagagtttcaaaaatcaaaactatcctattatcaaaagaaatatttgatttttcacctgaagaacatctcaaacatggggaggtcatacttgaaaatatacgtcccatgaagaaaaccattgctgagatagtgtcttaccaagtggaactgaggttgccccaaacaggaatgaaacctctgcctgtgtttcagcggacaaatcagcttttacaagatataaaactattggaaaatgtgactcaagaacaaaatgagttattaaaggtagtcataaaacagaccaatgaatgggatgaagaaatagaaaatttgaaacagatcttaaataattattcagctcagttctcccttgaacatatgtcaccagaccaagctgacaagctgccacaactacagggagaaatcgaacgtatggagaaacagattctgagtttgaaccagagaaaagaagacctgttggtggacttgaaggccaccgtactaaaccttcaccagcatttgaagcaagaacaagaaggagtagaaagagataggctgccagctgtaacatcagaggaaggtggagtggcagagagggatgcttctgagcggaagttgaacagaagaggctccatgtcttacctggcagcagtcgaggaagaggtggaagaaagttccgtgaagagcgataatggagatgagaaggcagagccatcgcctcagtcttggtcttcactttggaagcatgacaaggacatggaagaagacagagcttcctcatcctctggaacaattgttcaggaagcatatgggaaaataagcacctctgataattccatggcacaaatcctcacaccagactcactaaacactgagcaaggcccagaatgttccctaaggcccaaccaaacagaagagggcaccacacctcctattgaggctgacactctggactcttctgacgcgcaaggaggtttggagcccagggtggagaaaactaggccggagcccacagaagtcctgcatgcctgcaagacccaggtggccgagctggagctgtggctgcaacaagccaacgtggcagttgagccggaaacattaaacgcagacatgcagcaggtgctggaacagcagctggtagggtgccaggctatgctaacagagattgagcacaaggttgcctttctgttagagacttgcaaagatcagggcctgggagataatggagccactcaacatgaggctgaagcgctttccctgaaactgaaaacagtgaagtgcaatttagaaaaagtccagatgatgcttcaggagaagcacagtgaagatcagcatcctaccattctaaagaaatcctcagagccagagcatcaagaagctctccaaccagttaacctttctgaattggaatccattgtaactgaaaggccacaattcagcagacaaaaagatttccagcagcaacaggttctggagttaaaaccaatggaacagaaagatttcatcaaattcatagaatttaatgctaagaaaatgtggccccagtattgccaacatgataacgatacaactcaggaatcatctgcaagcaaccaggcatccagccctgaaaatgacgttccagactcgatcttgtcaccccagggccaaaatggagataagtggcaatatctgcatcatgaactctcatcaaaaataaagctcccactccctcagcttgtggagcctcaggtttccacaaatatgggtattctacccagcgtgactatgtataactttagatacccaacaactgaagaactgaaaacctataccacccaacttgaagacctgcgccaagaagcaagtaaccttcagacacaggaaaatatgacagaagaagcatatatcaatttggataaaaaattgtttgaactattcctgaccctcagtcagtgcctcagcagtgtggaggagatgctggagatgcccagactttacagggaggatggttctggccagcaggtgcactacgagacgctggctcttgagttgaagaaactttatttagcgctaagtgacaagaagggtgatcttttgaaagccatgacttggcctggcgagaacaccaacttgctccttgaatgttttgacaaccttcaagtctgcctggagcacactcaggctgcagctgtctgtagaagcaagtccctgaaagctggcctcgattacaaccgcagttaccagaatgaaataaagagattatatcatcagctcattaagagtaagacatctttacaacagtctttgaatgaaatcagtgggcagagtgttgctgaacagcttcagaaagcagatgcatatacagtggagctggagaacgccgagagccgagtggccaaactaagagatgaaggggagaggcttcatttaccttatgctttactccaggaggtttacaaattagaggatgtacttgacagtatgtggggaatgctaagagccaggtacacagaactcagcagccctttcgtcactgagagccagcaagatgctttgttgcaaggcatggtggaactggtgaagattgggaaggaaaagcttgctcatggccacttaaaacaaaccaaaagtaaagtggcgttacaggctcaaatagaaaatcacaaggtttttttccagaagcttgttgctgacatgttgttgatccaagcatactctgccaaaatacttccttctttattgcaaaacagagagacattttgggcagaacaagtaacagaagttaaaatactagaagaaaagtcacgccaatgtggtatgaagctgcagagtttgttgcagaaatgggaagaatttgatgaaaactatgcatctcttgaaaaggacctggaaattcttatatctacattgccctctgtgagtttggtggaagaaacagaggaaagattagtggaaaggatttcattttaccagcaaataaaaagaaacattggtggaaaacacgcccggctttaccaaactctgaacgaaggcaaacagttggtggcgtctgtgagctgtcctgaattagagggccagatcgcaaaactggaagagcagtggttgtccctgaacaagaaaattgaccatgagctccacaggctgcaagctcttctcaagcatctgctcagttataacagagattcggatcagttaaccaagtggttggaatcttcccagcatactctgaattactggaaagaacagtccctcaatgtgtctcaggacttggatacaatcagaagcaacatcaacaatttttttgagttttcaaaagaagttgatgaaaaatcctccttgaagactgccgttatcagtatcgggaaccagcttcttcacctgaaagaaactgatacagctacactgagagcttctttagcacagtttgaacaaaaatggacaatgctcataactcaacttccagatattcaagaaaaacttcaccagcttcaaatggagaaattgccgtctcgtaaagcaatcacagaaatgattagctggatgaacaatgtggagcatcaaacttcagatgaagactccgtgcattcaccaagttctgcatctcaagttaaacatcttcttcagaagcacaaggagtttagaatggaaatggactataaacagtggatagttgacttcgttaaccagtcattacttcagctaagcacctgtgatgtagaaagcaagcgctatgaaagaacggagtttgcagagcacctgggggagatgaaccgccagtggcaccgtgtacatggaatgctgaatagaaagatacaacatttagaacaacttctagaaagtatcactgagagtgaaaataaaatacagatcttgaacaactggctggaagcacaagaagagagactgaaaactttacaaaaacctgaaagtgtgatctcagtgcagaagctgctcctggactgtcaggatatagaaaatcaacttgcaattaaatccaaagcactagatgagttgaaacaaagttatctgactttggagagtggggcagtgccattgttagaagatacagcatcccgaattgatgagttatttcaaaagagaagcagtgttctcactcaggtcaatcagctcaaaacctccatgcagtcagttttacaggagtggaagatttatgatcaactctatgatgaagtgaatatgatgacaatccgattctggtactgcatggaacacagcaagcctgtggtgttatcattggagaccttgagatgccaggtggagaaccttcagtctctgcaagatgaagctgagagcagtgaagggagttgggagaaactccaggaggttatcggcaaactcaaaggtctctgcccctctgttgctgaaataatcgaagagaaatgccaaaatactcataaaaggtggactcaggtgaaccaagccattgcagaccagttgcagaaggcccagagtctgctccagctctggaaggcctatagcaatgctcatggtgaagctgccgcaaggctgaagcagcaggaagcaaagtttcaacagctcgcaaacatcagcatgtctggaaacaacctggcagagatcctgcccccagccctgcaggacataaaggagctgcagcatgatgtgcagaaaacaaaagaagcctttctccaaaattccagtgtcctggatcgactcccacaacccgcagagtccagcacccacatgctcctcccgggccccctgcactctctccagagggctgcttatttggaaaagatgctgcttgtgaaagcaaatgaatttgagtttgttctctcacagtttaaggattttggagtccggctggaatctttaaaaggtcttattatgcatgaagaagagaatttggatagacttcaccaacaggaaaaagaaaatcctgactcattcctgaatcatgtgctggcactgacagcccaatcacctgatattgaacatttgaatgaagtgagcctcaagctcccacttagtgacgtagctgtgaagacgttacaaaatatgaaccggcaatggattcgggccacggccacggcactggagcgctgcagtgagcttcagggaattggattgaatgaaaagtttctttattgctgtgaaaagtggatccaacttttggagaagatagaagaagcactcaaagtggatgtggctaacagccttcctgagctcctggagcagcagaaaacctataagatgttagaagctgaagtttctataaaccagacaattgctgattcctatgtcacccagtccttacaactcctggacacaacagaaatagagaacagaccagaatttattacagaattctcaaagctgacggatcggtggcagaatgctgtccagggtgttcggcagaggaagggtgacgttgatgggctggtgaggcagtggcaagatttcactacttctgtggagaacttgtttcgcttcctcactgacaccagccacctgctatctgcagtgaagggccaggagcgcttcagcctctaccaaaccagaagtctgatccatgagctgaagaataaagaaattcattttcaaaggaggcgaactacctgtgccctaaccttggaagctggagaaaagttactgctcacaactgacctgaaaactaaagagtctgtgggtaggagaatcagtcaacttcaggacagctggaaagacatggagccccagctggcagagatgattaagcagttccagagcactgtagagacctgggaccagtgtgaaaagaaaatcaaggagttgaaaagcaggctgcaagttttaaaggcacaaagtgaagatcctcttccagagcttcacgaggacctccataacgaaaaagagctgattaaggaactagaacagtctttggctagctggactcagaacttgaaagaacttcaaactatgaaggcggacttaacccggcacgttctcgtggaagatgtgatggttttgaaggagcaaatagagcatttgcacagacaatgggaggacctctgcttaagggtggccatacgtaaacaggagattgaagacagactcaatacatgggttgtattcaatgaaaaaaataaagagttgtgtgcctggctggtgcagatggaaaacaaagttctacagacagcggacattagtattgaagaaatgattgaaaagttacagaaggactgcatggaagaaataaacttgtttagtgaaaacaagttacagttaaagcagatgggtgaccagttgatcaaggccagcaacaaatcaagagcagctgagatcgatgacaagctcaacaaaattaacgatcgttggcaacatctttttgatgtcatcggatcaagggtgaagaagctgaaggagacctttgcttttattcagcagttggacaaaaacatgagcaaccttcgcacctggttggctcgaattgagtctgagctttccaagcctgttgtttatgatgtctgcgatgatcaagagatccagaagaggctcgctgagcagcaggatctacagcgagatattgaacaacacagcgcaggggtggagtccgtgtttaacatctgtgacgtcctactgcacgactccgatgcctgtgcaaatgagaccgagtgtgactcgatccagcagaccaccaggagcctggacagacgctggaggaacatttgtgccatgtccatggagcggcgcatgaaaatcgaggagacgtggcgcctgtggcagaagtttttagacgactattctcgctttgaggactggctcaagtcagctgagaggacggcagcctgcccaaattcctcagaggtgttgtacacgagtgccaaagaggaactgaagaggtttgaggcctttcagcggcagattcatgagcggctcactcagctggagctcatcaacaagcagtaccggcggctggcccgggagaaccgcacagacacggccagcaggctgaagcagatggtccacgagggcaaccagcgctgggacaaccttcagaggcgggtcacagccgtcctgcggagactcaggcatttcaccaaccagagggaagaatttgagggcaccagggagagcattctggtgtggctcacagagatggacctgcagctgaccaacgtggagcacttctcagagagtgacgccgatgacaagatgcgccaactgaatggcttccaacaggaaattacattaaataccaacaagattgatcagctcattgtgtttggggagcagctgattcagaagagcgagcccctggatgctgtgctgattgaggatgagctggaggaactccaccgctactgccaggaggtgtttggaagggtctcccggttccaccggcggctcacctcctgcactccgggcttggaagatgaaaaggaggcctctgagaatgaaacagacatggaagaccccagagaaatccagactgattcttggcgtaaacggggagagagcgaggaaccgtcatctcctcagtccctgtgtcatctagtggccccagggcacgagcggtctggctgcgagacccctgtcagcgtggactccatccccctggagtgggaccacacaggcgacgtggggggctcctcctctcacgaagaggacgaggagggcccatactacagcgcactgtcaggtaaatccatttcggatggccactcgtggcatgttcccgacagcccttcctgtcccgagcatcactacaagcaaatggaaggtgacaggaatgttccacctgttccccctgcgtccagcaccccttataaaccaccctatggaaagctactattacctccaggcacggatggtggcaaagaaggcccgcgagtcctgaatggcaacccacagcaggaagacgggggactggccggtatcacagagcagcagtcaggtgccttcgacagatgggagatgattcaagcacaggagcttcacaataagctcaaaataaaacaaaatttgcaacagctgaactctgatatcagcgccatcactacttggctgaaaaaaactgaagcagagctggaaatgttaaagatggcaaagcctccctctgatatccaggaaatagaactgagagtgaagagactgcaggagatactgaaagcctttgacacttacaaggcattagtggtctctgtcaacgtgagcagcaaggaatttctgcaaaccgagagccccgaatccacagagctccaaagtagactccgccagctgagcctgctctgggaagcagcacagggcgcagtggacagctggagagggggcttacgacagtcgctcatgcagtgccaggacttccaccagttgagtcaaaatctgctgctgtggttagcgagtgccaagaaccggaggcagaaggctcatgtcaccgatccaaaggcagacccccgggctctcctagagtgtcggagggaactaatgcaactggaaaaggagctggtagaacgtcaacctcaagtggacatgttacaggagatttcaaacagccttctcattaagggacatggagaagactgtattgaagctgaagaaaaggtgcatgttattgagaagaaactcaaacagttacgggagcaagtgtcccaagatttaatggccttgcagggaacccagaacccagcctcacccctgcccagcttcgacgaggtagactcgggggaccagcctcctgcaacatccgtgccagctccccgagcaaagttcagagcagtgagaactacagaaggcgaggaggagacagagagcagggtccccggcagcacacggccacagcgctccttcctctcaagggtggtccgggcagccctacccctgcagctgctcctcctgctgctgctgctcctggcctgcctgctgccctcctccgaagaagactacagctgcactcaggccaacaactttgcccggtccttttaccccatgctgaggtacaccaatgggccaccccccacatagagggcatagctggccacagtgctacaccacctgcctgattgccaagggtgcccagcacgtggccccagaccaatctgagtgacttagtgttggcaaggtcccgggacctgtgcagacttcttctgggcttacccagcacgggctccctggagcccagggcagctttcagattgtgttcctccccaggagcagggaacctgtgtggcaggtgccccgggtattttggcagaactagttgattagtttagggatctctggaaatgtcagtttcctgaagagccaagcactttgtgaattctggtttgtttgtaaaacagcattattataatgtaggtatggtcaatgagcagtggtgtccatcacatatattatagaagcaagcgaggacattccaccctagaaatggttcagaaactcataggcacccttagctgatggaaacaatcaatcatatttaatacgcttagaatcagttttactccaatcagctggcaattttgagctgccggttatacaccaaaatgttctgttcagtacctagctctgctcttttatattgctttaaatttttaaagaaattgtattgcatggatgtggttatttgtgcatattttttaacaatgcccaatctgtatgaataatgtaaacttcgatttttttttaaaaaaattagattttagctggagcttttgactaatgtaaagtaaatgccaaactaccgacttgatagggatgtttttgtaagttaattttctaagactttttcacatccaaagtgatgctttgctttgggttttaactgtttggccacggcgggggtgggggcggggggttggtacagaaacttgaagctgtttgtgatatgtacaactcagatgtttctcattaaaaaacaaaattagccagaaaaaaaaaaaaaaaaaaaaaaaaaaaaaaaaaaaaaaaaaaa

SEQ ID NO: 31607 - DNA, 7335 bp, Homo Sapiens
tgggggcagcggagggaggggtgggaagcaccatgcagtttgtatcctgggccacactgctaacgctcctggtgcgggacctggccgagatggggagcccagacgccgcggcggccgtgcgcaaggacaggctgcacccgaggcaagtgaaattattagagaccctgagcgaatacgaaatcgtgtctcccatccgagtgaacgctctcggagaaccctttcccacgaacgtccacttcaaaagaacgcgacggagcattaactctgccactgacccctggcctgccttcgcctcctcctcttcctcctctacctcctcccaggcgcattaccgcctctctgccttcggccagcagtttctatttaatctcaccgccaatgccggatttatcgctccactgttcactgtcaccctcctcgggacgcccggggtgaatcagaccaagttttattccgaagaggaagcggaactcaagcactgtttctacaaaggctatgtcaataccaactccgagcacacggccgtcatcagcctctgctcaggaatgctgggcacattccggtctcatgatggggattattttattgaaccactacagtctatggatgaacaagaagatgaagaggaacaaaacaaaccccacatcatttataggcgcagcgccccccagagagagccctcaacaggaaggcatgcatgtgacacctcagaacacaaaaataggcacagtaaagacaagaagaaaaccagagcaagaaaatggggagaaaggattaacctggctggtgacgtagcagcattaaacagcggcttagcaacagaggcattttctgcttatggtaataagacggacaacacaagagaaaagaggacccacagaaggacaaaacgttttttatcctatccacggtttgtagaagtcttggtggtggcagacaacagaatggtttcataccatggagaaaaccttcaacactatattttaactttaatgtcaattgtagcctctatctataaagacccaagtattggaaatttaattaatattgttattgtgaacttaattgtgattcataatgaacaggatgggccttccatatcttttaatgctcagacaacattaaaaaacttttgccagtggcagcattcgaagaacagtccaggtggaatccatcatgatactgctgttctcttaacaagacaggatatctgcagagctcacgacaaatgtgataccttaggcctggctgaactgggaaccatttgtgatccctatagaagctgttctattagtgaagatagtggattgagtacagcttttacgatcgcccatgagctgggccatgtgtttaacatgcctcatgatgacaacaacaaatgtaaagaagaaggagttaagagtccccagcatgtcatggctccaacactgaacttctacaccaacccctggatgtggtcaaagtgtagtcgaaaatatatcactgagtttttagacactggttatggcgagtgtttgcttaacgaacctgaatccagaccctaccctttgcctgtccaactgccaggcatcctttacaacgtgaataaacaatgtgaattgatttttggaccaggttctcaggtgtgcccatatatgatgcagtgcagacggctctggtgcaataacgtcaatggagtacacaaaggctgccggactcagcacacaccctgggccgatgggacggagtgcgagcctggaaagcactgcaagtatggattttgtgttcccaaagaaatggatgtccccgtgacagatggatcctggggaagttggagtccctttggaacctgctccagaacatgtggagggggcatcaaaacagccattcgagagtgcaacagaccagaaccaaaaaatggtggaaaatactgtgtaggacgtagaatgaaatttaagtcctgcaacacggagccatgtctcaagcagaagcgagacttccgagatgaacagtgtgctcactttgacgggaagcattttaacatcaacggtctgcttcccaatgtgcgctgggtccctaaatacagtggaattctgatgaaggaccggtgcaagttgttctgcagagtggcagggaacacagcctactatcagcttcgagacagagtgatagatggaactccttgtggccaggacacaaatgatatctgtgtccagggcctttgccggcaagctggatgcgatcatgttttaaactcaaaagcccggagagataaatgtggggtttgtggtggcgataattcttcatgcaaaacagtggcaggaacatttaatacagtacattatggttacaatactgtggtccgaattccagctggtgctaccaatattgatgtgcggcagcacagtttctcaggggaaacagacgatgacaactacttagctttatcaagcagtaaaggtgaattcttgctaaatggaaactttgttgtcacaatggccaaaagggaaattcgcattgggaatgctgtggtagagtacagtgggtccgagactgccgtagaaagaattaactcaacagatcgcattgagcaagaacttttgcttcaggttttgtcggtgggaaagttgtacaaccccgatgtacgctattctttcaatattccaattgaagataaacctcagcagttttactggaacagtcatgggccatggcaagcatgcagtaaaccctgccaaggggaacggaaacgaaaacttgtttgcaccagggaatctgatcagcttactgtttctgatcaaagatgcgatcggctgccccagcctggacacattactgaaccctgtggtacagactgtgacctgaggtggcatgttgccagcaggagtgaatgtagtgcccagtgtggcttgggttaccgcacattggacatctactgtgccaaatatagcaggctggatgggaagactgagaaggttgatgatggtttttgcagcagccatcccaaaccaagcaaccgtgaaaaatgctcaggggaatgtaacacgggtggctggcgctattctgcctggactgaatgttcaaaaagctgtgacggtgggacccagaggagaagggctatttgtgtcaatacccgaaatgatgtactggatgacagcaaatgcacacatcaagagaaagttaccattcagaggtgcagtgagttcccttgtccacagtggaaatctggagactggtcagagtgcttggtcacctgtggaaaagggcataagcaccgccaggtctggtgtcagtttggtgaagatcgattaaatgatagaatgtgtgaccctgagaccaagccaacatctatgcagacttgtcagcagccggaatgtgcatcctggcaggcgggtccctggggacagtgcagtgtcacttgtggacagggataccagctaagagcagtgaaatgcatcattgggacttatatgtcagtggtagatgacaatgactgtaatgcagcaactagaccaactgatacccaggactgtgaattaccatcatgtcatcctcccccagctgccccggaaacgaggagaagcacatacagtgcaccaagaacccagtggcgatttgggtcttggaccccatgctcagccacttgtgggaaaggtacccggatgagatacgtcagctgccgagatgagaatggctctgtggctgacgagagtgcctgtgctaccctgcctagaccagtggcaaaggaagaatgttctgtgacaccctgtgggcaatggaaggccttggactggagctcttgctctgtgacctgtgggcaaggtagggcaacccggcaagtgatgtgtgtcaactacagtgaccacgtgatcgatcggagtgagtgtgaccaggattatatcccagaaactgaccaggactgttccatgtcaccatgccctcaaaggaccccagacagtggcttagctcagcaccccttccaaaatgaggactatcgtccccggagcgccagccccagccgcacccatgtgctcggtggaaaccagtggagaactggcccctggggagcatgttccagtacctgtgctggcggatcccagcggcgtgttgttgtatgtcaggatgaaaatggatacaccgcaaacgactgtgtggagagaataaaacctgatgagcaaagagcctgtgaatccggcccttgtcctcagtgggcttatggcaactggggagagtgcactaagctgtgtggtggaggcataagaacaagactggtggtctgtcagcggtccaacggtgaacggtttccagatttgagctgtgaaattcttgataaacctcccgatcgtgagcagtgtaacacacatgcttgtccacacgacgctgcatggagtactggcccttggagctcgtgttctgtctcttgtggtcgagggcataaacaacgaaatgtttactgcatggcaaaagatggaagccatttagaaagtgattactgtaagcacctggctaagccacatgggcacagaaagtgccgaggaggaagatgccccaaatggaaagctggcgcttggagtcagtgctctgtgtcctgtggccgaggcgtacagcagaggcatgtgggctgtcagatcggaacacacaaaatagccagagagaccgagtgcaacccatacaccagaccggagtcggaacgcgactgccaaggcccacggtgtcccctctacacttggagggcagaggaatggcaagaatgcaccaagacctgcggcgaaggctccaggtaccgcaaggtggtgtgtgtggatgacaacaaaaacgaggtgcatggggcacgctgtgacgtgagcaagcggccggtggaccgtgaaagctgtagtttgcaaccctgcgagtatgtctggatcacaggagaatggtcagagtgctcagtgacctgtggaaaaggctacaaacaaaggcttgtctcgtgcagcgagatttacaccgggaaggagaattatgaatacagctaccaaaccaccatcaactgcccaggcacgcagccccccagtgttcacccctgttacctgagggactgccctgtctcggccacctggagagttggcaactgggggagctgctcagtgtcttgtggtgttggagtgatgcagagatctgtgcaatgtttaaccaatgaggaccaacccagccacttatgccacactgatctgaagccagaagaacgaaaaacctgccgtaatgtctataactgtgagttaccccagaattgcaaggaggtaaaaagacttaaaggtgccagtgaagatggtgaatatttcctgatgattagaggaaagcttctgaagatattctgtgcggggatgcactctgaccaccccaaagagtacgtgacactggtgcatggagactctgagaatttctccgaggtttatgggcacaggttacacaacccaacagaatgtccctataacgggagccggcgcgatgactgccaatgtcggaaggattacacggccgctgggttttccagttttcagaaaatcagaatagacctgaccagcatgcagataatcaccactgacttacagtttgcaaggacaagcgaaggacatcccgtcccttttgccacagccggggattgctacagcgctgccaagtgcccacagggtcgttttagcatcaacctttatggaaccggcttgtctttaactgaatctgccagatggatatcacaagggaattatgctgtctctgacatcaagaagtcgccggatggtacccgagtcgtagggaaatgcggtggttactgtggaaaatgcactccatcctctggtactggcctggaggtgcgagttttatagctaaggtgctttgaagaggaagccattatggatggatgaaggatagtaatgcaatacctccaccttaatttgggtgcatgtgtatgtgtgtgtgtgtttgtgtgtgacttgtatgcttgtgtgtgtaaatgtgtgtacatatacatatatacatatctacacatacatatatacacatatatgtgtgtatgtagatatgtagactatcctaatgatgtaaagtttaatatttatgtttgaaattatttattgtgatgtaatatttttgtacgtaaaatgattctattatgactgcctttgcatgtagtaatatgacaaagtgatccttcattatcacggtacactattgtttacttttcatctgtaaatgttttattgttacttttttaaaatgaatttttttaaaacaatctagccatcatcaaggtgctataagagttgtataaaagatatttttggcatttctaggcaagtatcagccaataagtatgttagtgatatcacagattgtaccaactattaactatgttaaataagtattcagtttcatgtgatctctgggaaaaaaatatgctgccttggtgctaatattgtatgtatttaaatgatcatccgactcagaaatataaacacttttaatgaaagggaggaacggaaggacaatttccagtgcacagaatcacttggatgaaataagaccagctctttacccttatttttggatatgccttttttggaagagacttagactttatccttattgttgttagtgttgttaatattcgttgcttcagcccacggtgccttggtctctccacaatcaaatggaggatcccccaagcagcttcattacagagtgatattgggaaagtgagatcctctcaccattttgccaagatactctaaaatgacatccaagtttaccagtagaaagacacaggatgcacagaatgggcatgaccttcagctcacgagcacacctggagaaattcagaaccaggttctgaatcatcacgattgccttttgcatgaaaacatcggctggtgatgtgacttctcttcaggccatgagcctaacaccctgccggttttcatgcccgctgcagtaatggacgtttgtgtgaagaaatgaactgtggagtacaaaatgctttgagtctttccgattgctcattaattcacttttttgttacttctttccaaaatggaagtgctgaagccatggtctttctgcccctccaagctgatgaagggaagcctttgccaatggcccatggaagacacttggtttgagaaaccctgcccacttccaaagaccaaagagattaggaaaagcctggcagtattctccaactccaaacaagctctagagtgctccaggaaaagttatattcagtatatgaataagtgttattctccattattaatgtgttctgaaaatatattatgaataaatacatcaccacacccaaaaaaaaaaaaaaaaaaaaaaaaa

SEQ ID NO: 31608 - DNA, 3743 bp, Homo Sapiens
ccacgcgtccgctcagctgcgttacgcgccgctccggctgccggccgcgcgccttgcccgccggctcccgcccgcaatcggcggctcagggcggacccgggtctctgcgttctcgcgagaagcgcggcgctgcggggccgtgggcgcctgagcccgcgcggccctcgagggccgaatatggggggatgcacggtgaagcctcagctgctgctcctggcgctcgtcctccacccctggaatccctgtctgggtgcggactcggagaagccctcgagcatccccacagataaattattagtcataactgtagcaacaaaagaaagtgatggattccatcgatttatgcagtcagccaaatatttcaattatactgtgaaggtccttggtcaaggagaagaatggagaggtggtgatggaattaatagtattggagggggccagaaagtgagattaatgaaagaagtcatggaacactatgctgatcaagatgatctggttgtcatgtttactgaatgctttgatgtcatatttgctggtggtccagaagaagttctaaaaaaattccaaaaggcaaaccacaaagtggtctttgcagcagatggaattttgtggccagataaaagactagcagacaagtatcctgttgtgcacattgggaaacgctatctgaattcaggaggatttattggctatgctccatatgtcaaccgtatagttcaacaatggaatctccaggataatgatgatgatcagctcttttacactaaagtttacattgatccactgaaaagggaagctattaacatcacattggatcacaaatgcaaaattttccagaccttaaatggagctgtagatgaagttgttttaaaatttgaaaatggcaaagccagagctaagaatacattttatgaaacattaccagtggcaattaatggaaatggacccaccaagattctcctgaattattttggaaactatgtacccaattcatggacacaggataatggctgcactctttgtgaattcgatacagtcgacttgtctgcagtagatgtccatccaaacgtatcaataggtgtttttattgagcaaccaaccccttttctacctcggtttctggacatattgttgacactggattacccaaaagaagcacttaaactttttattcataacaaagaagtttatcatgaaaaggacatcaaggtattttttgataaagctaagcatgaaatcaaaactataaaaatagtaggaccagaagaaaatctaagtcaagcggaagccagaaacatgggaatggacttttgccgtcaggatgaaaagtgtgattattactttagtgtggatgcagatgttgttttgacaaatccaaggactttaaaaattttgattgaacaaaacagaaagatcattgctcctcttgtaactcgtcatggaaagctgtggtccaatttctggggagcattgagtcctgatggatactatgcacgatctgaagattatgtggatattgttcaagggaatagagtaggagtatggaatgtcccatatatggctaatgtgtacttaattaaaggaaagacactccgatcagagatgaatgaaaggaactattttgttcgtgataaactggatcctgatatggctctttgccgaaatgctagagaaatgactttacaaagggaaaaagactcccctactccggaaacattccaaatgctcagccccccaaagggtgtatttatgtacatttctaatagacatgaatttggaaggctattatccactgctaattacaatacttcccattataacaatgacctctggcagatttttgaaaatcctgtggactggaaggaaaagtatataaaccgtgattattcaaagattttcactgaaaatatagttgaacagccctgtccagatgtcttttggttccccatattttctgaaaaagcctgtgatgaattggtagaagaaatggaacattacggcaaatggtctgggggaaaacatcatgatagccgtatatctggtggttatgaaaatgtcccaactgatgatatccacatgaagcaagttgatctggagaatgtatggcttcattttatccgggagttcattgcaccagttacactgaaggtctttgcaggctattatacgaagggatttgcactactgaattttgtagtaaaatactcccctgaacgacagcgttctcttcgtcctcatcatgatgcttctacatttaccataaacattgcacttaataacgtgggagaagactttcagggaggtggttgcaaatttctaaggtacaattgctctattgagtcaccacgaaaaggctggagcttcatgcatcctgggagactcacacatttgcatgaaggacttcctgttaaaaatggaacaagatacattgcagtgtcatttatagatccctaagttatttacttttcattgaattgaaatttattttgggtgaatgactggcatgaacacgtctttgaagttgtggctgagaagatgagaggaatatttaaataacatcaacagaacaacttcactttgggccaaacatttgaaaaactttttataaaaaattgtttgatatttcttaatgtctgctctgagccttaaaacacagattgaagaagaaaagaaagaaaaaacttaaatatttatttctatgctttgttgcctctgagaataatgacaatttatgaatttgtgtttcaaattgataaaatatttaggtacaaataacaagactaataatattttcttatttaaaaaaagcatgggaagatttttatttatcaaaatatagaggaaatgtagacaaaatggatataaatgaaaattaccatgttgtaaaaccttgaaaatcagattctaactggatttgtatgcaactaagtatttttctgaacacctatgcaggtcttatttacagtagttactaagggaacacacaaagaattacacaacgttttcctcaagaaaatggtacaaaacacaaccgaggagcgtatacagttgaaaacatttttgttttgattggaaggcagattattttatattagtattaaaaatcaaaccctatgtttctttcagatgaatcttccaaagtggattatattaagcaggtattagatttaggaaaacctttccatttcttaaagtattatcaagtgtcaagatcagcaagtgtccttaagtcaaacaggttttttttgttgttgtttttgctttgtttccttttttagaaagttctagaaaataggaaaacgaaaaatttcattgagatgagtagtgcatttaattattttttaaaaaactttttaagtacttgaattttatatcaggaaaacaaagttgttgagccttgcttcttccgttttgccctttgtctcgctccttattctttttttggggggagggttatttgcttttttatcttcctggcataatttccattttattcttctgagtgtctatgttaacttccctctatcccgcttataaaaaaattctccaacaaaaatacttgttgacttgatgttttatcacttctctaagtaaggttgaaatatccttattgtagctactgtttttaatgtaaaggttaaacttgaaaagaaattcttaatcacggtgccaaaattcattttctaacaccatgtgttagaaaattataaaaaataaaataattttagaaaaaaaaaaaaaaa

SEQ ID NO: 31609 - DNA, 4499 bp, Homo Sapiens
acacatgcatagctcttagcttctgtgtaagaagttgtgagctccttctggaaacatttgcagttacattaagtaaagtgtaaatgcacatgaatggcagcttatagagaaccaccttgtaaccagtatacaggtacaactacagctcttcagaaattggaaggttttgctagccggttatttcatagacactctaaaggtactgcacatgatcagaaaacagctctggaaaatgacagccttcatttctctgaacatactgccttatgggacagatcaatgaaagagtttctagccaaagccaaagaagactttttgaaaaaatgggagaatccaactcagaataatgccggacttgaagattttgaaaggaaaaaaacccttggaacaggttcatttggaagagtcatgttggtaaaacacaaagccactgaacagtattatgccatgaagatcttagataagcagaaggttgttaaactgaagcaaatagagcatactttgaatgagaaaagaatattacaggcagtgaattttcctttccttgttcgactggagtatgcttttaaggataattctaatttatacatggttatggaatatgtccctgggggtgaaatgttttcacatctaagaagaattggaaggttcagtgagccccatgcacggttctatgcagctcagatagtgctaacattcgagtacctccattcactagacctcatctacagagatctaaaacctgaaaatctcttaattgaccatcaaggctatatccaggtcacagactttgggtttgccaaaagagttaaaggcagaacttggacattatgtggaactccagagtatttggctccagaaataattctcagcaagggctacaataaggcagtggattggtgggcattaggagtgctaatctatgaaatggcagctggctatcccccattctttgcagaccaaccaattcagatttatgaaaagattgtttctggaaaggtccgattcccatcccacttcagttcagatctcaaggaccttctacggaacctgctgcaggtggatttgaccaagagatttggaaatctaaagaatggtgtcagtgatataaaaactcacaagtggtttgccacgacagattggattgctatttaccagaggaaggttgaagctccattcataccaaagtttagaggctctggagataccagcaactttgatgactatgaagaagaagatatccgtgtctctataacagaaaaatgtgcaaaagaatttggtgaattttaaagaggaacaagatgacatctgagctcacactcagtgtttgcactctgttgagagataaggtagagctgagaccgtccttgttgaagcagttacctagttccttcattccaacgactgagtgaggtctttattgccatcatcccgtgtgcgcactctgcatccacctatgtaacaaggcaccgctaagcaagcattgtctgtgccataacacagtactagaccactttcttacttctctttgggttgtctttctcctctcctatatccatttcttccttttccaatttcattggttttctctaaacagtgctccattttattttgttggtgtttcagatgggcagtgttatggctacgtgatatttgaagggaaggataagtgttgctttcagtagttattgccaatattgttgttggtcaatggcttgaagataaactttctaataattattatttctttgagtagctcagacttggttttgccaaaactcttggtaatttttgaagatagactgtcttatcaccaaggaaatttatacaaattaagactaactttcttggaattcactattctggcaataaattttggtagactaatacagtacagctagacccagaaatttggaaggctgtagatcagaggttctagttccctttccctccttttatatcctcctctccttgagtaatgaagtgaccagcctgtgtagtgtgacaaacgtgtctcattcagcaggaaaaactaatgatatggatcatcacccagattctctcacttggtaccagcatttctgtaggtattagagaagagttctaagttttctaaaccttaactgttccttaaggattttagccagtattttaatagaacatgattaatgaaagtgacaaattttaaattttctctaatagtcctcatcataaactttttaaaggaaaataagcaaactaaaaagaacattggtttagataaatacttatactttgcaaagtcaaaaatggcttgatttttggaaacaatatagaggtattcatatttaaatgagggtttacatttgttttgttttgtaaccgttaaaaagaagttgtttccagctaattattgtggtgtactatatttgtgagcctagggtaggggcactgctgcaacttctgctttcatcccatgcctcatcaatgaggaaagggaacaaagtgtataaaactgccacaattgtattttaattttgaggtatgatattttcagatatttcataatttctaacctctgttctctcagtaaacagaatgtctgatcgatcatgcagatacaatgttggtatttgagaggttagtttttttcctacacttttttttgccaactgacttaacaacattgctgtcaggtggaaatttcaagcacttttgcacatttagttcagtgtttgttgagaatccatggcttaacccacttgttttgctatttttttctttgcttttaattttccccatctgattttatctctgcgtttcagtgacctaccttaaaacaacacacgagaagagttaaactgggttcattttaatgatcaatttacctgcatataaaatttatttttaatcaagctgatcttaatgtatataatcattctatttgctttattatcggtgcaggtaggtcattaacaccacttcttttcatctgtaccacaccctggtgaaacctttgaagacataaaaaaaacctgtctgagatgttctttctaccaatctatatgtctttcggttatcaagtgtttctgcatggtaatgtcatgtaaatgctgatattgatttcactggtccatctatatttaaaacgtgcaagaaaaaaataaaatactctgctctagcaagttttgtgtaacaaaggcatatcgtcatgttaataaatttaaaacatcattcgtataaaatattttaattttcttgtatttcatttagacccaagaacatgctgaccaatgtgttctatatgtaaactacaaattctatggtagctttgttgtatattattgtaaaattattttaataagtcatggggatgacaatttgattattacaatttagttttcagtaatcaaaaagatttctatgaattctaaaaaatatttttttctatgaaattactagtgcccagctgtagaatctaccttaggtagatgatccctagacatacgttggttttgagggctattcagccattccattttactctctatttaaaggccgtgagcaagcttgtcatgagcaaatatgtcaagggagtcaatttctgaccaatcaagtacactaaattagaatatttttaaagtatgtaacattcccagtttcagccacaatttagccaagaataagataaaaacttgaataagaagtaagtagcataaatcagtatttaacctaaaattacatatttgaaacagaagatattatgttatgctcagtaaataattaagagatggcattgtgtaagaaggagccctagactgaaagtcaagacatctgaatttcaggctggaaaactatcagtatgatctcagcctcagttctcttgtctgtaaaatggaagaactggattaggcagtttgtaagattcctcctaactttcacagtcgatgacaagattgtctttttatctgatattttgaagggtatattgctttgaagtaagtctcaataaggcaatatattttagggcatctttcttcttatctctgacagtgttcttaaaattatttgaatatcataagagccttggtgtctgtcctaattcctttctcactcaccgatgctgaatacccagttgaatcaaactgtcaacctaccaaaaacgatattgtggcttatgggtattgctgtctcattcttggtatattcttgtgttaactgcccattggcctgaaaatactcattgtaagcctgaaaaaaaaaatctttcccactgttttttctgcttgttgtaagaatcaaatgaaataatgtatgtgaaagcaccttgtaaactgtaacctatcaatgtaaaatgttaaggtgtgttgttatttcattaattacttctttgtttagaatggaatttcctatgcactactgtagctaggaaatgctgaaaacaactgtgttttttaattaatcaataactgcaaaattaaagtaccttcaatggataagacaaaaaaaaaaaaaaaaaa

SEQ ID NO: 31610 - DNA, 27652 bp, Homo Sapiens
cccgggcagtggaaaccgtgggcaaaagttagctggcaggacagcgcagctcctccaggcagcggaggcagcgcgtcccggctctcagggacatttccttcccacctcgacccccgggaggtggtcccggtataaaggctcgctgagcgggtgggtcacagcacagttttgcagctgcggagaaacgcccaaggccgtgcatctccaggagggcggctgggctcccgcagtcctgcagaccgcgcccgatcccggcgacagggcgggcggacagccgcgcatccccggggtcccgccgagcctgggcgcagagagccgggaggaagcattcgctcgcttcgccttgctgctgggaaactgaacgaggccgagagagaaggttcttgagttcatgtaagaggacagtcttaaaacggaagaagaaaaagaagcagttcagtctttgggagagctgcctccttgttgagtgctgcaaaggcctggaattcatttatgacagaatagatctagaaaagtccaagcatgttttctagagtggtgtagccctgtgctgcctccagtgaagagtctcttggtgttggcttcgtgcttccggagggaccatggcaacctccagaggggcctcccggtgtcctcgggatatcgccaatgtgatgcagaggctgcaagatgagcaagagatagtacaaaaacgaactttcacaaaatggatcaactctcatctggccaagcggaaacctccaatggtggtggacgatctttttgaagacatgaaagatggtgttaaactgcttgcccttctggaggtcctgtctgggcagaaactgccttgtgaacaaggacgccggatgaagcgaatccatgctgtggctaacattggcacggcactcaagctcctcgaaggaagaaagattaaattagtcaacattaactccaccgatatagccgatggccgaccctcaatagttcttggattgatgtggaccattattctatatttccagattgaagagttgaccagcaacctgccccagctccagtctttgtccagcagcgcatcctccgtggacagcatagttagctctgagactcccagcccaccaagtaaacggaaggtgaccaccaagatccaaggaaatgctaagaaggctttattaaagtgggttcagtacacagctggcaagcagactggaatagaagtaaaagattttgggaagagttggagaagcggggttgcctttcattcagttattcatgccattcgaccggaattggtggacttggagacagtgaaaggcagatccaaccgagaaaatttggaggatgctttcactatcgccgaaacagaactggggatcccaagactgctagatcctgaagacgttgatgtggataaaccagatgagaaatctattatgacctatgtagcccagtttctgaaacattatcctgacatccacaatgcaagcactgatgggcaagaggatgatgaaatacttccaggtttcccatcttttgcaaattctgtacaaaattttaagagagaagacagagtaatttttaaggaaatgaaagtttggatagaacaatttgagagagatttgacaagagcacagatggtggaatcaaatttacaggataaatatcagtcatttaagcacttcagagttcaatatgaaatgaagaggaaacagattgaacatttaatacaaccattacacagagacggtaaattgtcacttgaccaagcattggtaaaacaatcttgggatagagtgacctccaggctctttgactggcatatacagcttgataaatctcttcctgcacctctgggcaccataggtgcctggctgtacagagcggaggtggccctgagagaggaaataaccgttcaacaggtccacgaggaaacagcaaacacgatacaacggaaacttgagcaacataaggatctgcttcaaaacacggatgcccacaaaagagcattccatgaaatctaccggaccaggtctgttaacgggattccagtgccacctgatcaattagaggacatggccgagaggtttcattttgtttcctccacatcagagctacacctaatgaaaatggaatttttagaattaaagtaccgtctgctctcactgctggttcttgcagagtcaaagctgaagtcttggatcattaagtacgggaggagagagtcagtggagcagcttctacaaaactacgtgtcttttatagaaaatagcaagttctttgaacaatatgaggtgacataccagatcttgaaacagacagctgagatgtatgtcaaagcagatggttcagtggaagaagctgagaatgtgatgaaattcatgaatgaaaccaccgctcagtggaggaatctctcagtagaagtgaggagtgtgaggagcatgctggaagaagtgatctctaactgggatcgctatggcaatacagtggctagtctgcaagcctggctagaggatgctgaaaaaatgctcaatcaatcagaaaatgccaaaaaggatttttttcgaaatttacctcattggattcagcagcatactgccatgaacgatgctggcaattttctaattgaaacctgtgatgagatggtttcccgtgacctgaagcagcaattactgttgctaaatgggcggtggagggagttgtttatggaagtcaagcaatatgctcaagctgatgagatggacagaatgaagaaggaatacacagactgtgttgttaccctgtctgcttttgcaacggaagcccataagaaactttctgaacccttagaagtctcttttatgaatgtcaagctattaattcaagacttggaggatattgagcagagggtgcctgtgatggatgcccaatacaagataattacaaagacagcacacctcattaccaaagaaagcccccaagaagaaggaaaagaaatgtttgcgaccatgtcaaagctcaaagagcagctaaccaaggtcaaagaatgttactccccactcctttatgagtctcagcagctgttgattccgttggaggaattagaaaagcagatgacgtccttttatgactcacttgggaaaatcaatgaaattatcacagttcttgagcgtgaggcacaatcgagtgccctttttaaacaaaaacatcaggaactgttagcttgtcaagaaaactgtaagaaaaccttgacacttattgagaaaggcagtcaaagtgttcaaaagtttgtgaccttgagcaacgtgttaaagcattttgatcagacgaggctacaaagacagattgcagatattcatgttgcttttcagagtatggtaaagaaaactggagattggaagaagcatgtggaaaccaacagtcgcttgatgaagaagtttgaggagtctcgagcagagttggagaaggtactgcggattgctcaggagggcctggaggaaaagggggatccagaggagctcctgcggagacacactgagtttttcagtcagctggatcagagggtgctcaatgctttcctgaaagcttgtgatgaactcaccgacatccttccagagcaggagcagcaggggctgcaggaagctgttcgaaagctccacaaacaatggaaggatcttcaaggagaagccccttatcatttgcttcatctgaagattgatgtggagaagaataggttcttagcctctgtagaagaatgcagaactgagctggatcgagagaccaagctgatgccccaggaaggcagtgaaaagataattaaagagcacagggttttcttcagtgacaaaggtcctcatcatctctgtgagaaaaggttacagctcatcgaggaactctgtgtgaaactcccagtgcgggacccagtaagggacacacctggaacctgtcacgtgactctcaaagagctcagagctgccattgacagcacctacaggaagctcatggaagacccagacaagtggaaggactacactagcagattctctgagttctcatcttggatatctacaaatgagacacaattaaaggggatcaagggtgaggccatcgatactgccaaccacggagaggttaaacgtgccgttgaagagatcagaaatggtgttaccaaaaggggtgagaccctcagctggctgaaatccaggctgaaagttttgacagaagtttcttctgagaatgaagcccaaaagcagggagatgagctggcaaaattatccagctctttcaaggctcttgtgacgctgctgtcagaggttgaaaagatgctaagcaattttggggactgtgtccagtacaaagaaatagtcaaaaattctctcgaagaattaatttctggctctaaagaagtccaggaacaagctgagaagatcttggatactgaaaatctgtttgaagcacagcagttacttcttcatcaccagcaaaagacaaagcggatctcagcaaagaagagagatgtgcagcagcagatcgcgcaggcgcagcagggagaaggggggctgcctgaccgaggccacgaggagctgcggaagctggagagcacactggatggcctggagcgcagccgggagaggcaggaacgccgcatccaggtcacattaagaaaatgggagcgatttgaaacaaacaaagaaacagtagtaagatacctttttcaaacaggttccagtcatgaacgcttcttgagttttagcagtttggaaagtttatcttcagaactggaacaaacaaaggagttttctaaacggacagaaagtattgcagtccaggctgagaaccttgtaaaggaagcttcagagataccgcttgggccccaaaataagcagctgcttcaacagcaggccaagtcaatcaaagaacaagtcaaaaaattagaagacacgcttgaagaagatattaaaaccatggaaatggtgaaaaccaagtgggatcattttggcagtaattttgagactctgtccgtctggataactgagaaagaaaaagaactcaatgccttggaaacttcgtcatctgccatggacatgcaaatcagccaaattaaggtcacaattcaggaaatagaaagtaagctcagcagcattgtaggattagaagaagaagcccagtcttttgctcagtttgttaccactggagaatctgctcgaattaaagccaagttgacacaaataagaagatacggggaagagcttcgagagcatgcacagtgtctggaaggaacaatcctgggacatttatctcagcagcaaaagtttgaagagaaccttagaaagatccagcaatctgtgtctgaatttgaagataaacttgctgttccaattaaaatatgttcttcagctacagaaacatacaaagttcttcaagaacatatggatctctgccaggccctggagtcactgagcagcgcgatcactgccttctcagccagtgccaggaaggttgtgaacagagattcctgtgttcaggaggctgcggctctacagcagcaatacgaggacatcctaaggagggcgaaggagagacagacggcgctggagaatctgctggcccactggcagaggctagagaaagaactatcatcctttttgacctggttagagcggggtgaagctaaagccagttccccagaaatggacatttctgcagacagagtcaaagtggaaggtgaacttcagttaatacaggcactgcaaaatgaagttgtatcccaggcctcattctatagcaaacttttgcaattgaaggaatcattgttctcagtagcctccaaagatgatgtgaaaatgatgaaactacatttggagcagttggatgagagatggagagatttaccacagatcattaacaaaaggattaattttcttcagtctgtggttgctgaacaccagcaatttgatgagctgctgctttccttttctgtctggattaaactgtttctcagtgaattacaaactacctctgagattagcataatggaccatcaagtagcccttactcggcataaggaccacgcagcagaagtagagagcaaaaagggcgaattgcagagtctgcagggtcacttagcaaagttgggttctctgggccgtgctgaggacctccacctcctgcagggaaaggctgaggactgcttccagctgtttgaggaggccagccaggttgtggagaggcggcagcttgccctgtcccatttggcagaattcctccagagccatgcctctctgtccggcattctccgccagctgaggcaaacagtggaagcaaccaacagtatgaataagaacgagtctgatttgatagaaaaggacctcaatgatgctcttcaaaatgctaaagcattagaatctgctgccgtcagtctggatggcattctttccaaagcccaataccatctgaaaatcgggagctctgagcaaaggacttcctgcagagccacggctgatcagctctgtggagaggtagagaggatccagaaccttctgggaaccaagcagagtgaggcagatgctctggcagtgttgaaaaaagcattccaagaccagaaagaggagcttctgaaaagcattgaggacattgaagaaaggactgacaaagagcgattgaaagaacctacccgccaagctcttcagcagaggttaagagtgtttaatcagctagaagatgaattgaattctcacgagcatgaactatgttggttgaaagacaaagccaagcaaattgcccagaaagatgtagcttttgcacctgaagttgacagggagataaaccgcttagaggtcacctgggatgataccaaaagactaattcatgaaaatcagggtcagtgctgtggacttattgacttaatgagagaatatcagaacctgaaatcagctgtatctaaagtcttagaaaatgccagcagtgtgattgtaaccagaactaccataaaagatcaggaggatcttaaatgggctttttccaagcatgaaactgccaagaacaaaatgaattacaaacagaaagacttggataactttaccagcaaaggaaaacacttgttatctgagctgaagaaaattcacagtagtgatttcagcttggtgaaaacagacatggagagcaccgtggacaaatggctggatgtatcagagaaacttgaagaaaacatggataggctgagagtaagcctgtccatttgggatgatgtactgtcaactagagatgagattgagggatggtcaaacaactgcgttccacagatggcagaaaacatcagcaacctggataaccacctcagagctgaagaactgcttaaagaatttgagtctgaagttaaaaacaaagcattgagattggaagaactgcattccaaagttaatgatctgaaagaattaactaaaaatctagaaacaccgccagaccttcagtttatagaagcagacttaatgcagaaactggagcatgccaaagaaataactgaagtagcaaaaggaaccctgaaggatttcacggctcaaagtacacaagtggagaagtttattaatgacataacaacatggttcacaaaagtggaagaatcgttgatgaactgtgcccaaaatgagacttgtgaagcattgaaaaaagtcaaggatatacaaaaagaacttcaaagtcaacaaagcaacatcagctctacccaagaaaatctcaatagcttgtgccgcaagtaccactcagctgagttggagagcctgggccgtgcaatgactggtctgataaagaaacatgaagccgtgagccagttgtgctccaaaacccaggccagcctgcaggaatctctggaaaaacacttcagtgagtctatgcaggaattccaagaatggtttttgggagcaaaggcagcagcaaaagaatcatcagatcgcaccggtgacagcaaagttctagaagcaaagctccatgatcttcagaacattttggactcagtcagtgatgggcagagcaaacttgatgcagtgactcaagaaggacaaactttgtatgcacatttgtctaaacaaattgtcagtagcattcaagaacaaatcacaaaggccaatgaagagtttcaagcatttctgaaacaatgccttaaagataagcaggctcttcaagactgtgcttcagaacttggaagctttgaagatcagcacagaaaactgaacttatggatccatgaaatggaagaaaggttcaatacggaaaacttgggagagagtaaacagcacattcctgagaagaaaaatgaagttcataaagttgaaatgtttttgggagaactgctggctgcaagagagtctcttgataagctttcccagagagggcagcttctgagtgaagaaggccacggtgctgggcaggagggccgcctgtgttcccagctcctcacaagccaccagaacctacttagaatgaccaaagagaaactccggagctgccaggtggcccttcaggagcacgaagccctggaggaagcactgcaaagcatgtggttctgggtgaaggccattcaggacagactggcctgtgcagagagcactcttgggagcaaagacaccctggagaaacggctgtcacaaatacaggatattctcctgatgaaaggtgaaggggaagttaagttgaatatggccattggcaagggggaacaggccttgagaagtagcaacaaagaaggtcagagggtgattcagactcagttagagacccttaaagaagtgtgggctgacatcatgagctcctccgtccacgctcaaagcactttagagtctgtgattagccaatggaatgactatgtagagaggaaaaaccagttggagcagtggatggaatcagtggatcaaaaaatagaacatcccttacaaccacagccaggtctgaaagagaagttcgtcctgcttgaccacctccagtccatcctgtctgaggcagaagatcacacgagagcccttcaccgtctaattgcgaagtccagggagctctacgaaaagacagaggatgagtctttcaaggacacagctcaagaggagctgaaaacacagtttaatgatataatgactgttgccaaggaaaaaatgaggaaagtggaagagattgtgaaagatcatctaatgtatttagatgcggtccacgagttcacagattggctccattcagcaaaggaagaacttcaccggtggtcagatatgtctggagattcatcagccacccagaaaaagttatcaaaaattaaggagctgatagattccagagagattggtgcaagccgtctcagcagagtggagtcgctggctcccgaagtgaaacagaacacaactgccagtgggtgtgagctcatgcacacggagatgcaggccctgcgtgccgactggaagcagtgggaagacagtgtattccaaacgcagagctgtttggagaacctggtcagccagatggccctttcggagcaggaattctcaggccaagtggctcaactggagcaggccctggaacagttcagtgcccttctgaaaacctgggctcagcagttaaccctcctggaaggcaagaacacggatgaggagatagtggaatgctggcacaaaggacaagagatactggatgctttgcaaaaagcagagcctagaacagaggatctcaagtctcagctgaatgaactttgtcgattttccagagacctgagtacctacagtggaaaagtttctggcttgattaaagagtataattgtctttgtttgcaagcatccaagggctgccagaataaagaacagattttacagcaaagatttcgaaaggccttcagggatttccagcagtggttggttaatgcaaaaatcactaccgccaagtgttttgatatacctcaaaatataagtgaagtttcaactagtcttcagaaaatacaggagtttttgtcagaaagtgaaaatggacagcacaagctaaacatgatgctgtctaaaggggaacttctgagtaccctgctgaccaaagagaaagcgaaagggatccaggccaaagttacagctgcaaaagaagattggaaaaattttcattcaaatctccaccaaaaagaatctgctctagagaatctaaagatccaaatgaaggactttgaagtaagtgctgagcctatccaggactggctgagtaaaactgagaagatggtccatgaaagcagcaatcgcctctatgatctgccagcaaagaggagggagcagcagaagctccagtctgtccttgaggaaatacactgctacgagcctcagctcaacaggctgaaagagaaagctcagcagctgtgggaaggacaagctgccagcaagagctttaggcacagagtgtcgcagctgtcttctcagtatctagcgctaagcaatttaacaaaggagaaagtgtcaagactggatagaatcgttgcagaacacaatcagttctctcttgggattaaagaattacaagactggatgacggatgcgattcacatgctggattcatactgccacccgacatccgacaaaagtgtgctggacagcaggacgctcaagctcgaggctctattatcagtcaaacaggaaaaagagattcagatgaaaatgatagtgaccaggggagaatctgtccttcagaatacttctccagaaggcattcccactattcagcagcagctgcagagtgtgaaggatatgtgggcatcccttttgtctgcagggattcgttgtaaaagccaactcgaaggagctctctccaagtggacaagttatcaggatggcgttcgacagttctccggttggatggatagtatggaagccaacctgaatgaatcagaaaggcagcatgcggagctgcgggataaaacaacgatgctcggaaaagccaagttattaaatgaagaagtgctgagttacagcagcttgctggagaccatcgaagtcaaaggggctggcatgacagaacactatgtcacccagctagaactccaggatctacaggaacgatacagagccatccaagagagggccaaggaagccgtaaccaagtctgaaaaacttgtccgcctgcaccaagagtatcagagagacctaaaggcatttgaagtttggttggggcaagaacaagaaaagctcgaccagtattcagttcttgaaggtgatgcccacactcatgagacaacattgcgtgatcttcaggagctacaggtacactgtgcagaggggcaggccctgttgaactcagtgctgcacaccagagaggatgtgatcccatcaggtatcccacaggcagaggaccgggctttagagtctctccggcaagactggcaggcttaccagcacaggctgtccgagactcgaactcagttcaataacgtggtgaacaaattgaggctaatggagcaaaagtttcagcaagtagatgaatggctcaaaacagcagaggagaaagttagtcccaggaccagacgtcagtctaacagggcaaccaaggagatacaattacatcagatgaagaagtggcacgaagaagtgactgcatacagagatgaagttgaggaagtgggagctagagctcaggagatactggacgagagccacgtgaacagcagaatgggttgccaggccacccagctgacttccagataccaggccctgcttctccaagtgctggaacaaataaaattcctggaggaggagattcagagtttggaggaatcagaatcatccctcagttcctattctgattggtatggctctactcataaaaacttcaagaatgtggctaccaagattgacaaagtagatacagtaatgatggggaagaaattgaagacgttggaggttttgctcaaagacatggagaaaggtcacagtttgctgaaatcagcccgggagaaaggagagagggctgttaaatacttggaggaaggcgaggcagagaggttaagaaaggagattcatgatcacatggagcagttgaaggaactgaccagcactgtccggaaagaacacatgacgctggaaaaaggtcttcatttagcaaaggaattctcagataaatgcaaagcactgacacagtggatagcagaataccaggaaattctacatgttcctgaagaacccaaaatggaattatatgagaaaaaagctcagttatctaaatacaagtcacttcaacaaacggtgctgtcccatgaaccatcagtaaagtcagtgagagagaagggtgaagctcttttggaactggtgcaggacgtcactttaaaggacaaaatagatcaacttcaaagtgattaccaggacctgtgcagcataggaaaggagcatgtcttcagtctggaggcgaaagtcaaagaccatgaagactacaacagtgagctccaagaggtcgaaaagtggctgctgcagatgtctggcagactggtggcacctgacctcctggagacaagcagcctggagacaatcacccagcaattggcccaccacaaggcaatgatggaagaaattgctggttttgaagaccgtttgaacaatcttcaaatgaaaggtgatactttgattggccaatgtgcagaccacctgcaagcgaaacttaaacaaaacgtgcatgctcatctgcagggcacaaaggacagctactcagcgatctgcagcacagctcagaggatgtaccagagtttggaacacgaacttcagaagcacgtcagccgacaagacaccctgcagcagtgccaggcctggctttctgcagtccagccggatttagagccaagtcctcaaccacctcttagtagggcagaagccattaagcaggtcaaacacttcagagctttgcaagagcaggcaaggacctacctagatctcctttgctccatgtgtgacctgtcaaatgcttcggtgaaaaccacagcaaaagacattcaacaaacagagcaaacgattgaacaaaagcttgtccaggcccagaacttaactcagggctgggaagagatcaagcacctgaagtctgagctctggatttacctgcaagatgctgatcagcaactgcagaacatgaagaggaggcactctgagctggagctgaacattgcacagaacatggtttcacaagttaaggattttgttaagaaactacagagcaaacaggcatccgtgaacaccataatagaaaaggtgaataagttaacaaagaaggaggaatcgcctgaacacaaggaaataaatcatttaaatgatcagtggctcgatttgtgccgtcagtctaacaacctgtgcttgcaaagggaagaggatcttcagagaacaagagattaccatgactgtatgaatgttgttgaagtgttcctagaaaaatttactacagaatgggataacttggccagatctgatgcagagagtacagctgtccacctggaagctttgaaaaagttagcattggcattgcaggagagaaagtatgctattgaagatctgaaagatcaaaagcagaaaatgatagagcatctgaatttagatgacaaggagttagtcaaagaacagacgagtcatttagagcaacgttggtttcagcttgaggacctcattaaaaggaaaatccaagtgtcagtcaccaacttggaggagttaaatgtggtgcagtccagatttcaggagctaatggagtgggcagaagagcaacaacccaacatcgccgaggcccttaagcagagccctcctccagatatggctcagaaccttctcatggatcacctggccatctgcagtgaactggaggccaagcagatgctcctgaaatcgcttataaaggacgcagacagggtcatggcagatcttggtctcaatgagcgacaggtcatccagaaggctctctctgatgcacaaagccacgtgaattgtctcagtgacttagtgggccagcgaagaaagtacttaaacaaagccttgtccgagaaaacccagtttctcatggcagtgttccaggccaccagccaaattcagcaacatgagcgaaagataatgttccgtgaacacatctgtctgttaccagatgatgtgagcaaacaagtcaaaacatgtaagagtgcacaagccagcctcaagacttaccaaaatgaagtcactggactttgggcccagggtcgcgaactaatgaaggaagtcacagagcaggaaaagagtgaagtgctggggaagcttcaggaattgcagagtgtctatgacagtgttttacaaaagtgcagtcaccggttacaagaactagagaagaatttggtttctaggaagcattttaaggaagattttgataaagcttgccactggctaaaacaagcagatattgttacatttcctgaaatcaacctaatgaatgagagtactgagcttcatacacaactggctaaataccaaaacattcttgaacaatctccagaatatgaaaatcttctacttacgctgcagagaactgggcagaccatattaccatcgctgaatgaagtcgatcattcctacctcagtgaaaagctaaatgctttgcctcgacaatttaatgtaattgttgccttggctaaagacaagttctataaagtccaggaagcaattcttgctcggaaggaatatgcttccttgattgagttgacaacccagtctctcagtgaacttgaagcccaattcttgaggatgagcaaagttcccaccgacctggccgttgaggaggctctttctctgcaagatggttgcagagccattctggacgaggtggcgggccttggggaggcggtggatgaactgaaccagaaaaaagaaggttttcgcagcacaggtcagccttggcagccagacaagatgctgcaccttgtcaccttatatcacaggctgaagcgacaaacagaacagagggttagcttattagaagacaccaccagtgcttaccaagaacacgagaagatgtgccaacagctggagagacaactgaagtctgtaaaagaggagcagtccaaagtgaatgaggaaacgctgcctgcagaggagaagctcaaaatgtatcactccctggcaggaagtctccaggactcagggattgtactgaaacgagtaaccatacatcttgaagatcttgccccacaccttgaccccttggcttatgagaaagccaggcatcagatccagtcctggcaaggggagttaaaactgttgacttctgccattggtgagacggtgacagaatgtgagagccgaatggtgcagagtatagacttccagactgagatgagtcgctccctggactggctgaggagagtgaaggcagagctcagtgggccggtgtacctagacctcaacctgcaggacatccaagaggaaatcagaaaaatccaaattcatcaggaagaggtccagtccagcttgagaatcatgaatgcgctgagtcacaaggaaaaggagaagttcacaaaggccaaggagctgatttctgcggatttagaacacagcctcgctgagctctcagagctggatggagacatccaggaagccttacgcaccagacaggctaccttgactgaaatatatagccagtgtcaaaggtattatcaggtatttcaagcagccaatgactggcttgaggatgcccaagaaatgttacagctggcaggcaatggcctagacgtggagagcgcagaggaaaatctcaaaagccacatggaatttttcagtacagaggatcagttccatagtaacctggaggagctccacagcctggtagccaccctggacccactcatcaagccaaccggcaaagaagacctagaacagaaagtggcttctctggaactcaggagccagaggatgagccgggactctggtgcccaagtggatctcttgcagagatgcacagctcaatggcacgattaccagaaagcaagggaagaggttattgaattgatgaatgatacagaaaagaaattgtctgagttttctttgttgaagacttcgtctagtcatgaagcggaagaaaaattgtcagaacacaaggctttagtgtcagtggttaactctttccatgagaaaattgtggcccttgaggaaaaagcttcacaactggagaaaaccggaaatgatgccagcaaagccaccctgagcaggtcaatgaccaccgtctggcagcgctggacacgccttcgagctgtggcccaggaccaggagaagatcctggaagatgcagtggatgagtggacgggctttaacaacaaggttaaaaaggccactgaaatgattgatcagctgcaagataagttacctggaagttcagcagagaaagcatcgaaagcagagctcttaactcttcttgaataccacgacacgttcgttctggagctggagcagcagcagtcggccttgggcatgctgcggcagcaaaccctgagcatgctccaggatggagccgccccaacccctggggaagagcctccgctcatgcaggaaatcaccgccatgcaagatcggtgcctgaacatgcaggagaaagtgaagactaatggaaagttggtgaagcaagagctgaaggaccgagaaatggtggagactcagatcaattctgtgaaatgttgggttcaggaaacgaaagaatatttagggaatccaacaatagaaatagatgctcaacttgaagaacttcagattctcctaacagaagccacaaatcaccgacagaacattgaaaaaatggcagaagaacagaaggagaagtacttaggtctttataccatattaccttctgaactctcccttcagttggctgaagtggcgttagatctaaagatccgagatcagatccaagacaaaataaaagaagttgagcagagcaaggccacgagccaggaactcagccggcaaattcagaagttagctaaagacctcacaactattctaactaagctgaaagcgaagacagataatgtagttcaagctaaaactgaccaaaaggtgctgggagaggaattagatggctgtaattcaaagttaatggaattagatgcagcagtacagaaattcttggaacagaatggccaactgggtaagccactggccaagaagataggaaaactgactgaacttcaccagcagaccattagacaagctgagaatcggctctccaagctcaatcaggcagcatcacatttagaagaatacaatgaaatgcttgaattaattttgaagtggattgaaaaagctaaagtcttggctcatggaactattgcatggaattctgcaagccagcttcgggaacaatatattttgcatcagaccctgctagaagaatccaaagaaattgacagtgagctggaagcaatgactgagaaattacagtacctcactagcgtgtactgtacagaaaaaatgtctcagcaagtggcagaactgggacgggagactgaggagttgcgacagatgatcaaaattcgtttgcagaacctccaagatgcagctaaggatatgaaaaaatttgaagcagagttgaaaaagttacaagctgccttggagcaagcccaggcaacactgacttctccagaagttggacgtctcagtctcaaggagcagctctctcatcggcagcatttgttgtctgagatggagtcactgaagccgaaggtgcaagcagtgcagctctgccagagtgccctccggatccccgaggatgtggttgccagcttacctctctgtcatgctgctctgcggctgcaggaagaggccagccggctgcagcacaccgccatccagcagtgtaacatcatgcaggaagctgtggtacaatatgaacaatatgagcaagaaatgaaacatctccagcaactgatagaaggagctcacagagagattgaggataaacctgttgccaccagtaacatacaggagctgcaggctcagatttctcggcatgaggagctggcgcagaaaattaagggctaccaggagcagatcgcttctttgaattccaagtgcaagatgctgacgatgaaagccaagcacgccaccatgctgctgacggtgaccgaggtcgaggggctggcggaagggacagaggacctggatggggagctcctccccacgccttcggcccacccctctgtggtcatgatgactgcaggtcgctgtcacactttgctgtcaccggtcactgaggagtctggggaggagggaaccaacagtgagatttcctctccacctgcctgtcgctccccttcacctgtggctaatacagatgcttctgttaaccaggacattgcatattaccaagccttgtctgctgagaggttgcagacagatgctgcaaaaattcaccccagcacatccgcatcccaggagttctatgaaccgggattggagccatccgctactgccaaactgggtgatttgcagcgttcttgggaaaccttaaagaatgtgatcagtgagaagcagcgcacactctatgaagctttggagcgccagcagaagtaccaggactccctccagtccatctctacgaagatggaggccattgagctgaaactcagtgagagcccagagcctggcaggagtccagaaagccagatggctgaacatcaggcattgatggatgagattctcatgctccaggatgaaatcaatgagctccagtcctctctcgcagaggagctggtatccgagtcttgtgaggccgaccctgcggagcagctggccttgcagtccacgctcactgtcttagccgagcgaatgtccaccatcaggatgaaagcctcggggaaacggcagcttttggaggagaagttgaatgatcagctggaggaacaaaggcaggaacaggccctgcagaggtatcgctgtgaagccgatgagctggacagctggctcttgagtaccaaggccactctggacactgcgctgagtccacccaaggagcccatggacatggaggcccagcttatggactgccagaatatgctggtggaaatagagcagaaggtggtggctttatcagaactgtcagtccacaatgagaacctgctgctggagggcaaagctcacaccaaggacgaggccgagcagctggctggaaagctgagaaggctcaaggggagcctgctggagctgcagagagccctgcatgataagcagctcaacatgcagggaacagcacaggagaaggaggagagcgatgttgacctaacagccacgcagagccccggcgtccaggaatggctggcccaagctcgcaccacatggacccagcagcggcagagcagtctccagcaacaaaaagagttagaacaggaattagccgagcagaagagtctccttcgctcagtagccagtcgtggagaggagattctaattcaacattcggcggcagagacctctggtgatgctggcgaaaaacctgatgtgttatcccaggagttggggatggaaggggagaaatcatccgctgaagaccagatgagaatgaaatgggaaagcctacatcaagaatttagtaccaagcagaaactactacagaatgttctggaacaggaacaagagcaagtgctttatagcaggccaaatcgactcttgtctggtgtgccactgtacaaaggggacgtgccaacccaagataaatctgcagttacatctttgctggatggactgaaccaagccttcgaggaggtttcatcccagagtggaggggcaaagaggcagagtatacacttggagcagaagttgtatgatggagtctcagccacctctacttggttggatgacgttgaagaacgtttatttgttgccacagcacttttaccagaagaaacagagacttgtctcttcaaccaagagattcttgccaaagacattaaggaaatgtctgaagaaatggataagaacaaaaacttgttttcccaagcttttccagagaatggtgataatcgagatgttattgaagatactttgggttgtcttttgggcaggttatccttgctagactcagtagtgaatcaacgatgtcatcagatgaaagaaagacttcagcaaatactaaatttccagaatgatctgaaagtgctgtttacatcactggctgacaacaaatacatcattctgcaaaaactggcaaatgtgtttgaacagcccgtagcagaacaaatagaggcaatacaacaggctgaagatggactcaaagaatttgatgcaggaatcattgaattaaagaggcgtggtgacgagctacaggtcgagcagccgtccatgcaagaactctccaagctccaggacatgtatgatgagctgatgatgatcattggctcccggaggagtggtctgaatcagaaccttacactcaagagtcagtatgagagggccctacaagatctggctgacctgctagaaactggtcaggagaagatggcaggagaccagaaaatcatcgtgtcttccaaagaggaaatccagcaaccacttgacaaacataaggaatactttcagggcctggaatctcatatgatcttgactgtaacactcttcagaaagataatcagctttgcagtccaaaaggaaacccagttccatacagagctgatggctcaggcttctgctgtactgaaacgggctcacaagaggggtgtggagctggagtacattctagagacgtggtcccatctggatgaggaccagcaggagctcagcagacagctggaggtggtggaaagcagcatcccaagcgtgggtctggtggaggagaacgaggacaggcttattgaccgcataacactctaccagcatttaaaatctagccttaatgaataccagcccaaattatatcaagtattagatgatgggaaacgacttctgatatccatcagctgctcagatctagaaagccaactaaatcaacttggagagtgctggctaagtaacaccaataaaatgtctaaggaacttcacagactggaaacaatattgaaacactggaccagatatcaaagtgaatctgcagatctaattcactggttacaatctgcaaaagaccggctagaattttggactcagcaatctgtgacagtcccacaagagctggaaatggtccgtgatcatctaaatgctttcctggagttttctaaagaagtggatgcccaatcttccctgaaatcatctgttctgagtactggaaatcagctccttcgactaaaaaaggtggacacagccacgctgcgctctgagttgtcgcgcattgatagccagtggactgacctgctaaccaatatcccagccgtccaggagaagctccaccagctccagatggataaactgccttcccgccatgccatttctgaagtcatgagttggacttctctaatggaaaatgctattcagaaggatgaagataatattaaaaattccataggttacaaggcaattcatgaataccttcagaaatataagggttttaagatagacattaactgtaaacagctgacagtggattttgtgaaccagtccgtgctacaaatcagcagtcaggatgtggaaagtaagcgtagtgataagactgattttgctgagcaacttggagcaatgaataaaagttggcaaattctgcaaggtctagtaactgagaagatccagctgttggaaggcttattggaatcttggtcagaatatgaaaataatgtacaatgtctgaaaacatggtttgaaacccaggaaaagagactaaaacaacagcatcgaattggagatcaggcttctgttcaaaatgcactgaaagactgtcaggatctggaagatctgattaaagcaaaagataaagaagtagagaaaattgagcagaatggacttgctttgattcagaccaagaaagaagacgtctctagcattgtcatgagcacactgcgagagctcggccaaacctgggcaaatttagatcacatggttggacaattaaagatactgctgaaatcagtgcttgaccaatggagtagtcacaaagtggcctttgacaagataaacagttacctcatggaggccagatactctctttcccgattccgtctgctgactggctccttagaagctgtgcaagttcaggtggacaatcttcagaatctccaagatgatctggaaaaacaggaaaggagcttacagaaatttggctctatcaccaaccaattattaaaagagtgtcacccacccgtgacagaaactcttaccaatacactgaaagaagtcaacatgagatggaataacttgctggaagagattgctgagcagctacagtccagcaaggccctacttcagctttggcaaagatacaaggactactccaaacagtgtgcttcgacagttcagcagcaggaggatcgaaccaatgagctgttgaaggcagccacaaacaaggacattgccgatgatgaggttgccacatggattcaagattgcaacgacctcctcaaaggactgggcacagttaaagattccctctttgttctccatgagctgggagagcaactgaagcaacaagtggatgcttccgcagcatcagctattcaatcggatcaactctctttgagtcaacacttgtgtgccctggagcaagctctctgcaaacagcagacttcattacaggctggagttcttgattatgaaacctttgccaagagtttagaagctttggaggcctggatagtggaagctgaagaaatactacaagggcaggaccctagccactcatctgacctctccacaatccaggaaaggatggaagaacttaagggacagatgttaaaattcagcagcatggctccagatttagaccgtctaaatgagcttggatataggttacccttgaatgataaggaaatcaaaagaatgcagaatctgaaccgccattggtctctgatctcctctcagactacagaaagattcagcaagttgcagtcatttttgctacaacatcagactttcttggaaaaatgtgaaacatggatggaattcctagttcagacagaacaaaagttagcagtagagatttcaggaaattatcagcaccttttggaacagcagagagcacacgagttgtttcaagccgagatgttcagtcgtcagcagattttgcactcaatcattattgatgggcaacgtcttctagaacaaggtcaagttgatgacagggatgaattcaacctgaaattgacactcctcagtaatcaatggcagggagtgattcgcagggcccagcagaggcgggggatcattgacagccagattcgccagtggcagcgctatagggagatggcagaaaagcttcgtaaatggttggttgaagtgtcctacctccccatgagtggtctcggaagtgttcctataccactgcaacaagcaaggaccctctttgatgaagtgcagttcaaagaaaaagtgtttctgcggcaacaaggcagctacatcctgactgtggaggctggcaagcaactccttctctcggcggacagtggcgctgaggccgccttgcaggccgaactcgctgaaatccaagagaaatggaaatcagccagcatgcggctggaagaacagaagaaaaaactagccttcttgttgaaagactgggaaaaatgtgagaaaggaatagcagattccctggagaaactacgaactttcaaaaagaagctttcgcagtctctcccggatcaccatgaagagctccatgcagaacaaatgcgttgcaaggaattagaaaatgcagttgggagctggacagatgacttgacccagttgagcctgctgaaggacaccctctctgcctatatcagtgctgatgatatctccattcttaatgaacgcgtagagcttctgcaaaggcagtgggaagaactatgccaccagctctccttaaggcggcagcaaataggtgaaagattgaatgaatgggcagtcttcagtgaaaagaacaaggaactctgtgagtggttgactcaaatggaaagcaaagtttctcagaatggagacattctcattgaagaaatgatagagaagctcaagaaggattatcaagaggaaattgctattgctcaagagaacaaaatacagctccaacaaatgggagaacgacttgctaaagccagccatgaaagcaaagcatctgagattgaatacaagctgggaaaggtcaacgaccggtggcagcatctcctggacctcattgcagccagggtgaagaagctgaaggagaccctggtagccgtgcagcagcttgataagaacatgagcagcctgaggacctggctcgctcacatcgagtcagagctggccaagccaatagtctacgattcctgtaactcggaagaaatacagagaaagcttaatgagcagcaggagcttcagagagacatagagaagcacagtacaggtgttgcatctgtcctcaacctgtgtgaagtcctgctgcacgactgtgacgcctgtgccactgatgccgagtgtgactctatacagcaggctacgagaaacctggaccggcggtggagaaacatttgtgctatgtccatggaaaggaggctgaaaatcgaagagacgtggcgattgtggcagaaatttctggatgactattcacgttttgaagattggctgaagtcttcagaaaggacagctgcttttcccagctcttctggggtgatctatacagttgccaaggaagaactaaagaaatttgaggctttccagcgacaggtccacgagtgcctgacgcagctggaactgatcaacaagcagtaccgccgcctggccagggagaaccgcactgattcagcatgtagcctcaaacagatggttcacgaaggcaaccagagatgggacaacctgcaaaagcgtgtcacctccatcttgcgcagactcaagcattttattggccagcgtgaggagtttgagactgcgcgggacagcattctggtctggctcacagagatggatctgcagctcactaatattgaacatttttctgagtgtgatgttcaagctaaaataaagcaactcaaggccttccagcaggaaatttcactgaaccacaataagattgagcagataattgcccaaggagaacagctgatagaaaagagtgagcccttggatgcagcgatcatcgaggaggaactagatgagctccgacggtactgccaggaggtcttcgggcgtgtggaaagataccataagaaactgatccgcctgcctctcccagacgatgagcacgacctctcagacagggagctggagctggaagactctgcagctctgtcggacctgcactggcacgaccgctctgcagacagcctgctttctccacagccttcctccaatctctccctctcgctcgctcagcccctccggagcgagcggtcaggacgagacaccccagctagtgtggactccatccccctggagtgggatcacgactatgacctcagtcgggacctggagtctgcaatgtccagagctctgccctctgaggatgaagaaggtcaggatgacaaagatttctacctccggggagctgttgccttatcaggggaccacagtgccctagagtcacagatccgacaactgggcaaagccctggatgatagccgctttcagatacagcaaaccgaaaatatcattcgcagcaaaactcccacggggccggagctagacaccagctacaaaggctacatgaaactgctgggcgaatgcagtagcagtatagactccgtgaagagactggagcacaaactgaaggaggaagaggagagccttcctggctttgttaacctgcatagtaccgaaacccaaacggctggtgtgattgaccgatgggagcttctccaggcccaggcattgagcaaggagttgaggatgaagcagaacctccagaagtggcagcagtttaactcagacttgaacagcatctgggcctggctgggggacacggaggaggagttggaacagctccagcgtctggaactcagcactgacatccagaccatcgagctccagatcaaaaagctcaaggagctccagaaagctgtggaccaccgcaaagccatcatcctctccatcaatctctgcagccctgagttcacccaggctgacagcaaggagagccgggacctgcaggatcgcttgtcgcagatgaatgggcgctgggaccgagtgtgctctctgctggaggagtggcggggcctgctgcaggatgccctgatgcagtgccagggtttccatgaaatgagccatggtttgcttcttatgctggagaacattgacagaaggaaaaatgaaattgtccctattgattctaaccttgatgcagagatacttcaggaccatcacaaacagcttatgcaaataaagcatgagctgttggaatcccaactcagagtagcctctttgcaagacatgtcttgccaactactggtgaatgctgaaggaacagactgtttagaagccaaagaaaaagtccatgttattggaaatcggctcaaacttctcttgaaggaggtcagtcgtcatatcaaggaactggagaagttattagacgtgtcaagtagtcagcaggatttgtcttcctggtcttctgctgatgaactggacacctcagggtctgtgagtcccacatcaggaaggagcaccccaaacagacagaaaacgccacgaggcaagtgtagtctctcacagcctggaccctctgtcagcagtccacatagcaggtccacaaaaggtggctccgattcctccctttctgagccagggccaggtcggtccggccgcggcttcctgttcagagtcctccgagcagctcttccccttcagcttctcctgctcctcctcatcgggcttgcctgccttgtaccaatgtcagaggaagactacagctgtgccctctccaacaactttgcccggtcattccaccccatgctcagatacacgaatggccctcctccactctgaactaagcagatgccatctgcagaagtgctggtagcataaggaggatcgggtcataagcaatcccaaactaccaacaagaggaccttgatcttggcgaaagccctcggtgtggcagctttagccctcctccagatcacatgtgtgcaaattatggcttcagaggtggaagataaacagtgacgggggaacaaacagacaacaagaaggtttggaagaaatctggtttgagactctgaaccttagcactaaggagattgagtaaggacctccaaagttccccggactcatgaattctgggcccttggcccattctgtgcacagccaaggacttcagtagaccatctgggcagctttcccatggtgctgctccaaccatcagataaatgaccctcccaagcaccatgtcagtgtcgtacaatctaccaaccaaccagtgctgaagagattttagaaccttgtaacatacaatttttaagagcttatatggcagcttcctttttaccttgttttcctttggggcatgatgttttaacctttgctttagaagcacaagctgtaaatctaaaaggcacttttttttagaggtataaagaaaaactagatgtaataaataagatcatggaaggctttatgtgaaaaaagttgaatgttatagt

SEQ ID NO: 31611 - DNA, 11137 bp, Homo Sapiens
aggaggaaatttgcaagaggcggcagcccctgagcgcccagagctcttgaaaggccacccaggagaggtgtgagacccggcggcagcatccgtccaggtgggacccgctgagcgccgtggccagtcccccattcccatcccggcaccccaaaggcgcgctcgcccgattgcttcgagttccccgacctggggattttttttttagccgctggtggtgggcgcctcgtgggctaaggcccggcgcctgctctgctacccgcgctgcctttagcggtcgcccccgccgccgctgccagggacgtgctgggaaagcccaagccccgggagaagatgccggccatcctggtcgcctccaaaatgaagtcgggactgcccaaacccgtgcacagcgccgcgcccatcctgcacgtgcccccggcccgggcgggcccccagccctgctacctgaagttgggaagcaaggtggaggtgagcaagaccacctatcctagccagatccccctgaaatcgcaggtgctgcaggggctgcaggagccagcgggggaggggctcccgctgcggaagagcggctcggtggaaaacgggttcgatacccagatctacacagactgggccaatcattacctagccaaatccggccacaagcgtctcatcagggatctccagcaagatgtgacagatggcgtcctcctggcccagattatccaggttgtggcaaatgaaaagattgaagacatcaatggctgtccgaagaacagatcccaaatgattgaaaacatagatgcctgcttgaatttcctggcagctaagggaataaacatccaggggctgtctgcagaagagatcaggaatggaaacctcaaggccattctaggcctcttcttcagcctctcccgatacaagcagcagcagcagcagccccagaagcagcacctctcctcacctctgccgcccgccgtatcccaggtggccggggccccctcccagtgccaggctggcacccctcagcagcaggtgccagtcactccccaagccccgtgccagcctcaccagccagcgccacatcagcagtcaaaagcacaagctgaaatgcagtccagtgcatcatccaaggactcatctcaaagcaaaatcatccgcttcactctgggtcagaaaaagatctctagacttccaggtcctaccgcgagggtatccgctgcaggcagcgaggccaaaacacgcggagggtcaactactgctaacaaccgacgcagccagagctttaacaactatgataaatccaaaccagtcacctccccacccccaccgccaagcagccacgagaaagagcctttggcaagttcagcctcctcccaccccggaatgagtgacaatgcacctgcttccttggagagcggcagcagctccacccctactaattgcagtacctcctcggccatcccgcagcccggtgcagccaccaagccttggcgcagcaaatccctcagcgtgaagcacagtgccacggtatccatgctctcggtcaagcctcctgggcctgaggcccccaggcccacacctgaagccatgaagccggcccccaacaatcagaagtccatgctggaaaagctgaaacttttcaacagtaaagggggctcaaaggcaggtgaggggccggggtcccgggacacaagctgtgagcggctggagactctgcccagcttcgaagagagcgaggagctggaggccgccagtcgcatgctcaccaccgtgggccctgcttccagcagccccaagattgcactcaagggcattgcccagaggacttttagccgggcactgaccaacaagaagagttctctgaaaggcaatgagaaagagaaggagaaacaacagcgggagaaggataaggagaaaagcaaggaccttgccaagagagcctctgtgacggagaggctggacctcaaggaggagccaaaagaagaccccagtggagcagctgtgcccgagatgccaaaaaagtcctccaagattgccagcttcatccccaaaggggggaagctcaacagtgccaagaaggagcccatggccccttcccacagtggaataccaaaaccaggaatgaagagcatgcccgggaaatccccaagtgccccagcgccttccaaggaaggggagcggagccggagtgggaagctgagctcaggactcccccagcagaagccccagctggacggcagacactccagttcctcttccagcctggcgtcctcagaaggaaaaggcccaggagggaccaccctgaaccacagcatcagcagccagactgtcagtgggtctgtcgggaccacccagaccacaggaagcaataccgtcagtgttcagctacctcagccccagcagcaatacaaccatcccaacactgccacggttgcacctttcctgtacaggtctcagacggacactgaagggaatgttactgccgagtcaagctcaacaggtgtgagcgtggagcccagccacttcaccaagactggacagcctgctctggaagaactcactggggaagatcctgaggctcggcggctgcggacagtgaagaacatcgctgatctgcggcagaatttggaggaaaccatgtccagtttaaggggaactcaggttacacacagcacattggaaaccacgtttgacaccaatgtcaccacggagatgagtggccgtagcatactcagcttgacagggaggcccacacctctgtcctggagactgggccagtccagccctcggctccaagcaggagacgccccctcaatgggcaatgggtatccccctcgagccaacgccagcaggttcatcaacactgagtcaggtcgctatgtgtactccgcccctctgagaaggcagctggcctcccggggcagtagtgtctgccatgtggacgtctcagacaaggcaggagatgagatggacctggaaggcatcagcatggacgcccccggctacatgagcgatggggatgttctgagcaagaacatccggaccgatgacattacaagcggatacatgactgatggtggacttggcctctatacccgtcgcctgaaccggctccctgatgggatggctgtggtacgggagaccctgcaacgaaatacctccctgggcctcggagacgctgacagctgggacgacagcagctccgtcagcagcggcatcagcgacaccatagacaacctcagcactgatgacatcaacaccagctcctccatcagctcttatgccaacacacctgcctcctctcgaaaaaacctggatgtgcagactgatgctgagaagcactcacaggtggagaggaattccctgtggtctggtgatgatgtcaagaaatcagacggaggctcagacagcggcataaaaatggagccaggttccaagtggaggcggaatccttctgatgtgtctgacgagtccgacaaaagcacgtcgggcaagaagaatcctgtcatctcccagacaggctcatggcggcgaggcatgacagctcaggtgggcatcaccatgccaaggacgaagccttcagccccggcaggcgcactgaagaccccaggaactggaaaaacagacgacgcaaaggtgtctgagaaaggaaggctttctcctaaagcctcccaggtgaagcgctccccatcagatgcaggccggagcagtggtgacgaatccaaaaagcccctccccagcagctctaggacacctactgccaatgccaacagctttgggttcaagaagcagagtggttccgccgccggcctggccatgatcacagccagcggggtgactgtcaccagcaggtcagccacactgggcaaaatcccaaagtcatctgcactcgtcagtcggtctgctggtcggaagtcaagtatggatggggctcagaatcaggatgacgggtatctagccctaagctcccggacaaaccttcagtaccggagtttgccgaggcccagtaagtccaacagccggaacggggctgggaacaggtctagcaccagcagcatagattccaacattagcagcaagtccgcaggcctgccagtgcccaaactgagggagccttccaaaacagccctaggcagctctctaccaggtctggtcaaccaaacagacaaggagaaaggcatctcatcagacaacgagagtgtggcttcctgtaactcggtgaaagtgaatccggcagcccagcctgtgtccagtccggctcagaccagtctccagcctggagccaagtacccagatgtggcctctcccacactccgcagactctttggtgggaagcctaccaagcaagtgcccatcgccacagctgaaaacatgaaaaattcggtggtcatctccaatcctcatgccaccatgactcagcaaggtaacctagactccccgtcaggcagtggcgtcctgagcagtgggagcagcagtcctctctacagcaagaatgtggacctcaaccagtctccgctagcctccagccccagctcagcccactcggccccttccaacagcctcacctggggcaccaacgccagcagctcctccgcagttagcaaggatggcctgggctttcagtctgtcagcagcctccacaccagctgtgagtccatcgacatctccctcagcagtggaggggtccccagccacaattcttccactggcctcatcgcctcctccaaggacgactccttgactccctttgtcagaactaacagtgtgaagaccacactgtcagaaagccctctctcttcccctgctgctagccctaagttctgcagaagtactctgcccaggaaacaggacagtgacccgcaccttgataggaacactttgcctaagaaaggactcaggtatactcccacctcccagcttcgcacgcaagaagatgcaaaagaatggttacggtcccattctgcaggaggccttcaggacaccgctgccaattcccccttttcctctggctccagcgtgacttctccctccggaacaagattcaacttttcccagcttgcgagtcccaccactgtcacccagatgagcttgtccaacccgaccatgctgaggactcacagcctctccaatgctgatgggcagtatgatccatacactgacagccgcttccggaatagctccatgtccctggatgagaagagcagaaccatgagccgttcaggctcattccgggatgggtttgaagaagaatcatgggagaaaagttctgtggacaactttgtcagccgtcttcacagctcacttcatttctctcttcctttgttccatcacgcaaggtatgagttagttcatggatcctcactctccttggtttccagcacatcgtcagtttattctacaccagaagaaaaatgccagtcagagattcgcaagctgcggcgggaactggatgcctcccaggagaaagtttcagctttgaccacccagctgacagcaaatgctcaccttgtggcagcctttgaacagagtcttggtaacatgacaatcaggctccagagtctgaccatgacagctgagcagaaggactcagaactgaatgagttaagaaaaaccattgagctgctaaagaaacagaacgcagctgcccaggctgccattaatggagtaattaacacacctgagctcaactgcaaaggaaacggcactgcccagtctgcagacctccgcatccgcaggcagcactcctcagacagcgtctccagcatcaacagtgccaccagccactccagcgtgggcagcaacatagagagtgactcaaagaagaagaagcggaagaactgggtcaatgagttacgcagctccttcaagcaagctttcgggaagaagaagtccccaaaatctgcgtcctctcattcagatattgaggagatgacggattcttctttgccttcctcaccaaagttaccgcacaatgggtccacaggttccaccccactgctgaggaattctcactccaactctctaatttcagaatgcatggatagtgaagctgagaccgtcatgcagctccgaaatgagttaagagacaaggagatgaagctgacggatatccgcttagaagctctcagttctgcccaccagctggaccagctccgggaggccatgaacaggatgcagagtgaaatagagaagctgaaagctgagaatgatcggctgaagtcagagtctcaaggcagtggctgcagccgggctccttcccaagtgtccatctctgcctccccgaggcagtccatgggcctctcccagcacagcttgaacctcactgagtcaaccagcctggacatgttgctggatgacactggtgaatgctcggctcggaaggaaggaggcaggcatgttaagatagttgtcagctttcaggaggaaatgaagtggaaggaggattccagaccacatctctttcttattggctgcattggagttagtggcaagacgaagtgggatgtgctcgatggggtggttagacggctgttcaaagaatacatcattcatgtcgacccagtgagtcagctagggctgaattcagacagcgttcttggctacagcattggagaaatcaagcgcagcaacacttccgaaacaccggagctgcttccttgtggctatctggttggagagaacacgaccatctcagtgactgtgaaagggctcgcagaaaacagcctggactcactggtgtttgagtccttgattcccaagcccatcctgcagcgctacgtctccctcctgatagagcaccgtcggatcattctctctggccccagcggcactgggaaaacctacctggccaaccggctgtctgagtatatagtgcttcgagagggacgggagttgacagacggggttatcgccacctttaacgtggaccataagtccagcaaggaattgcgccagtacctgtccaaccttgctgaccagtgcaacagtgagaacaatgctgtggacatgcccctcgtcatcatcctggacaacctacaccacgtgagctctctgggcgagatcttcaatgggctgctcaactgcaagtaccacaaatgcccttacataattggcacaatgaaccaggctacctcttcgactcccaacctgcagcttcaccataacttcagatgggtgctttgtgccaaccacacggagcctgtgaagggtttccttggccgattcctgaggaggaagctcatggaaacagagatcagtgggcgggtgcgcaatatggagctggtaaaaatcattgactggattcccaaggtctggcatcacctcaaccgcttcctggaggctcacagttcctcggacgtcaccatcggcccccggctcttcctgtcatgccccatcgatgtggacggctcgagagtgtggttcaccgacttgtggaactattccattatcccctatctcctggaagccgtcagagaaggactccagctctatggaaggcgcgccccctgggaggatcctgccaagtgggtgatggacacatatccatgggcagccagcccacaacagcacgagtggcctcccctgctgcagttacggcctgaggatgtcggcttcgacggctactccatgcctcgggagggatcgacaagcaagcagatgccccccagtgatgctgaaggtgacccgctgatgaacatgctgatgaggctgcaggaggcagccaactactccagcccccagagctatgacagcgactccaacagcaacagccatcacgatgacatcttggactcctctttggagtccactctgtgacaggggcccggagcccagcgccctcctcttctcctcaccgcattccacctgcatcccccacatcaccctgaagatgacttcctgagccagcccccagccacagccttagagctgcgggaacaccgagaccccccgtccttcagcctcgacctgggtgcaggcatcccgggccagctgcctgcggaccgcttccttccacagcgagaactgcactaccttctgttgtactttaattattgttttgccttgttgctgtgacctccctaagacactgaagatacttctcgggaaaggatcatcgccgttgaaatgaaaagagagacagagagaaaaaaaaaaagagaacccacatgaagctctgaaaccaaacagcatcctgccatgagcttcccagagacagaagagactggagcaaagtcggaaacacagagaagcacggcttcccctcagcacagaccctccagactgggtctcagagccgtgccacccaccctcccacacagccggccacagggagaactggtgctaaccagggtgcttgctttggtcacgttcaacgcactacagagctacgacacaggggaaccttaggagcaaataaaccgtgctttcatgttttttaaatggtgctttccttacccgagaggtattttgcctgttccaatcgaaccaccccattcaggtccatcagcctctgattaatatccgtgagagtgagtgacggagtgagagtgtgagcgagtggatgtggctgtcagtgcagaacagcatgtgtctctttccttctgatatatgaatgaatcaggtttttttttttttttttctgcaaacactgtgtatagtgagacttgttctactttggagaacaggttaccttttgaaaatgaggttgagtttcttcctttctgatgcattgatttttgaagatttttttttcccccttcccctcttggtcagaatcaatcctttggtgaaagtaagaaccgcaggagttgagttttggtttggtcctgctcagttttggtttttagttgtccatcctcacagtcctacacactcgcctcctcctgctagggctgggggtatctgtgtcctttaaaatggatgaggacctggtcctcgacatgtgggtgagccatggaccttgccttcccttctcgtccttgagggtttagaacacacaccaacacctccagcgtccccgccccagcttccggtggggtgatgcggtcaccctgcaaaagacttgcactttcctcagaaccaacatgacgcagctcaataagggtgagggtcactccctcccagaagccccgtctggacgagccttgcctgacctcttcggtgctgaccttcccaaagtgatgccttactggttttgtactaactgtgttcattttacataagtgtcgtgcctgcctggggtttgttttttttgtcattgttttccccattgaaacaaacagggctaaaaagtcatctgttcattaggagaactcaagttgctgtgacttttctcatccaaaagactcatttgtgtggatgcgtgaccatgggaaaaagaaaaaaaaaaagatccattttttaggttcttttcggtctccagctggcaacccaactggacaatgatctgtctggtgcaggagaaggcaaaagtttctacaagtctacatgaccttgctgatacttgttctaatagaaacccagtctgctgtgtcttcaacatactggtattttcattacaaagtatggtaaatttttgagttgtttgtttctgttttgtaaagagaatccttattggacaccagtgaaggtgtctctgttttaatgatcagggtttttattccatcttttgcatttcttctatttctgaaggtttgtctcttggcatctttttttagtttcttaccataagagtttgacccgaaactgctcacttcacattggatgacaccatgttcttcctctttgaaaagaaaaggggaatgtgtcccactagtgaaaggaaaacttttcaacactatccctgctttagtctcagcaaactcagactattctgcttagccttcattagtcatctgggtgtgagtgtgtcttgttctgtttttctttttaataaaacttttaaaccatatatttagcctgtgaccaggggggccaaaccctaagatttctggtaaacctgaagggtggccctcctcagacaatttatctcccagcaatgaccctactacactcgcgtactgtgaatttgggaggaggtaaagttgacttctcctcgtgggcagttttccaatcaccttgtgagtagacacctgccaatattgtttgaaacctttttttaatatgacatcctctcttgtcattctcttctcccctttcccacagacttccctcctgggtccaggttcagaaccaagacttctgtacctagtgctgcctgattggtgaacattgacttcaagtagcatagcccttgtgtgactcacaactccgtgtccttcctaaagtttcgggaagcagggttgtctaatatgcacatttcttattttggtcatatttttactttagtgtcactcaccttttacaaagtgactttgtactcatttagggctctatcggaaatgcttccattttgccttttctacagttaggccaattttgaaatatataaattctatgcaacatttatgttgagttaccaatggaagccaaaagttctcttcccaaactgccaagaatgatacaggccataattgaaatgggaataccttttaagtttcattaggggtggggtgggagtgggacaggaacaagacttgcctagatctttgttgtatcttggggacttttactttgttgtttgatgcttaaacttcaaaattctctgtattcaaatttgattgtggcgaatctacttcaaaaaggaaaaataatccaactttgtggatattaaatggaaggtttgctgttttgatctagttgtttccagtggagcagttttatgaaatatgttctataagatgtacattttttcattgtaacatagaaattgtaaataattgattaaagtgctgcattttgatgaattttttctagccatttttaaagagaaaactaggaattgagtattttgtgtacggtatgtttccatcctccctccccttcctcctcccctcctctctctctcttcctacctatttaattttcatttgtcatgaggtttttggatttgccaatgatctgctggacatcatgccccatgtcatagagaataaagctgatgattgtaccagtcttaaattattcatgattcaataaaattgatgcttatttattc

SEQ ID NO: 31612 - DNA, 3544 bp, Homo Sapiens
ctcaagcaaggggaacccgaggccgccggcgcccggaccatgtcgtctccggggccgtcgcagccgccggccgaggacccgccctggcccgcgcgcctcctgcgtgcgcctctggggctgctgcggctggaccccagcgggggcgcgctgctgctatgcggcctcgtagcgctgctgggctggagctggctgcggaggcgccgggcgcggggcatcccgcccgggcccacgccctggcctctggtgggcaacttcggtcacgtgctgctgcctcccttcctccggcggcggagctggctgagcagcaggaccagggccgcagggattgatccctcggtcataggcccgcaggtgctcctggctcacctagcccgcgtgtacggcagcatcttcagcttctttatcggccactacctggtggtggtcctcagcgacttccacagcgtgcgcgaggcgctggtgcagcaggccgaggtcttcagcgaccgcccgcgggtgccgctcatctccatcgtgaccaaggagaagggggttgtgtttgcacattatggtcccgtctggagacaacaaaggaagttctctcattcaactcttcgtcattttgggttgggaaaacttagcttggagcccaagattattgaggagttcaaatatgtgaaagcagaaatgcaaaagcacggagaagaccccttctgtcctttctccatcatcagcaatgccgtctctaacatcatttgctccttgtgctttggccagcgctttgattacactaatagtgagttcaagaaaatgcttggttttatgtcacgaggcctagaaatctgtctgaacagtcaagtcctcctggtcaacatatgcccttggctttattaccttccctttggaccatttaaggaattaagacaaattgaaaaggatataaccagtttccttaaaaaaatcatcaaagaccatcaagagtctctggatagagagaaccctcaggacttcatagacatgtaccttctccacatggaagaggagaggaaaaataatagtaacagcagttttgatgaagagtacttattttatatcattggggatctctttattgctgggactgataccacaactaactctttgctctggtgcctgctgtatatgtcgctgaaccccgatgtacaagaaaaggttcatgaagaaattgaaagagtcattggcgccaaccgagctccttccctcacagacaaggcccagatgccctacacagaagccaccatcatggaagtgcagaggctaactgtggtggtgccgcttgccattcctcatatgacctcagagaacacagtgctccaagggtataccattcctaaaggcacattgatcttacccaacctgtggtcagtacatagagacccagccatttgggagaaaccggaggatttctaccctaatcgatttctggatgaccaaggacaactaattaaaaaagaaacctttattccttttgggatagggaagcgggtgtgtatgggagaacaactggcaaagatggaattattcctaatgtttgtgagcctaatgcagagtttcgcatttgctttacctgaggattctaagaagcccctcctgactggaagatttggtctaactttagccccacatccatttaatataactatttcaaggagatgaagagcatctccaagaagagatggtaaaaagatatataaatacatatccttctaagcagattcttcctactgcaaaggacagtgaatccagcaactcagtggatccaagctgggctcagaggtcggaaggagggtagagcacactgggaggtttcatcttggaggattcctcagcaggatacttcagccattttagtaatgcaggtctgtgatttgggggatagaaaacaaagtacctatgaaacgggatatctggattttacttgcagtggcttccaccgatgggccaatcttctcatttcttagtgcctcagacatcccatatgtaaaatgagagtaataaaacttggcttctctctacctctcagcactaatgatggtcaaatgccttacatcttttctgatatctctaaaatgctgttaagttctggagaagaacttcaggagaagaagatctatcagctggcttttaaagacctatgacaacatgaaagtggtgttcagcctggaatgctttgtcagagatgggtgtggatttaggttatactgggggagaacttttctcagcacagattctatgccagcttctttgggcttgttctgtcactatctttttgtttatgattttagtttttactttttgtagatgtgggatgaagtggactctgtcgtgtatattgaggaaaaaagaaattataattttaaaaaatcccttgtaggattattatctaaatttatatgtctaacttctactacaactacaggaacagtgagccttgctacttctttagtagcttcttggcagaattcctttctactgagttatttgcaaagatgcagctctacctttttacttaaggcctgaatggtgagcatggggattttgatactgggactcatcaggaaaggattctgctttcaaactatactgaacattcctgtcctagcgtccctgccaccaggcccaatgcatctgatccttgaatatactctcaaagaattcactctcgttttattaagagaactaaattgtttctaaatgtagatggtccctctggaaaagcagttttcagcaggggtggtaaccccttcagagggagtttggaaatgtgtgggtatgattcttggttatcataatgatgggggtgctactggccttctgctgccatgggaccaggatgctaaatgtcaaggtagtcctatacagtgaagaattgtcctgctcaagatgccaggatttcccccagtgagaacatgctctaaggaatgaccacccctttcttttattctcccacagtgctccatgtacagaagtaagcatagcagtcatatgagcaaccacattcctgaacctttcctcatgctggctctacacttaatcctttacttgtatgtttctgtaattcttacataaattctattaagagggtggcatactgtagtggatgaagctgaggcttatagtaggtaaggcacaaagttaaaaagtaacatcactgggtttcaaacctactggtctctgtgactaaagaacactttcagaaccacttcttgattctgccaccacttgatcccataacaggctaccccttggcctcatgctggagttgtgtgtgtctgtcttcatcccaggctgagctccttgaggtgaggatgttgtgctgtttgcctccctcacagtgccttggtcttagtggatgcccagttgtcttgtgaatgacttttaagaagtgtacttaagagaaaaatcctaccttatttgaataattacaagtcatgtttttgttgcttaaaggtgataaatcagtgtatattatttgttaatgtccattaaagccagtttttaaaaaaaaaaaaaaaaaaaaaaaaaa

SEQ ID NO: 31613 - DNA, 2623 bp, Homo Sapiens
ttcttgttcatagagtgctggaatatgaatgagccaaattgtgctgttccattgacactggttgctacagaattaactttactcggagatccgaggagccatcggcagttcccaggagtaagaacctgagagcgtgtgagaatttgagagggaagatctgatctcctagaattagagttggtacagaaaccatttcagctccaaaaatgttggaggaagatatggaagtcgccataaagatggtggttgtagggaatggagcagttggaaaatcaagtatgattcagcgatattgcaaaggcatttttacaaaagactacaagaaaaccattggagttgattttttggagcgacaaattcaagttaatgatgaagatgtcagactaatgttatgggacactgcaggtcaggaggaatttgatgcaattacaaaggcctactatcgaggagcccaggcttgtgtgctcgtgttctctaccacagatagggaatcttttgaagcagtttccagttggagagagaaagtagtagccgaagtgggagatataccaactgtacttgtgcaaaacaagattgatcttctggatgattcttgtataaagaatgaggaagctgaggcactggcaaaaaggttaaagttaagattctacagaacatcagtgaaagaagatctaaatgtgaatgaagtttttaagtatttggctgaaaaataccttcagaaactcaaacaacaaatagctgaggatccagaactaacgcattcaagtagtaacaagattggtgtctttaatacatctggtggaagtcactccggtcagaattcaggtaccctcaatggtggagatgtcatcaatcttagacccaacaaacaaaggaccaagaaaaacagaaatccttttagcagctgtagcataccctaagatgttttgggaggaaaacaattgaattacattgtgcaatgcattaagaaacccatccagctgtcatggtatgttacaaggttttcagcagactttgctcctaatggctctctgaaagtgacagacttaaatattgctctgcagtgcttttcagaatgtagagtgagacctctggtggaaaaattattgccctgtggactcctttaattttttttacattagacgaagcttctcctgtttgtaaaggaatgctataagaaatttcaaacacaggttttgcggaattttaaatgctggaaaacataaatgaaatgcctaaatatattgttacagattttaatactgtggatcaaggaaagatagcaagcattcttttcctgaaattggtcatgtagcttttctgcgaaatagtattgaatctgaatactttcacaaaataatactgaaaggtaaaccctaaatcttgccagactgcattagtattttggcattgaaacttgtgcaatatctgtgtaatgtagaatgtggggtgtgcatgcagatgtctggtactggagtaagctgaaggtatgtgcagtatttaagaaaatgtacattctaattaattcacttataaaaccatttacatattgtgtatatgtttttattttcaaatgataaactctagacatatattttgcaaaatgagcttgggtttaaaaagtgctttgtgccaaaaatatcatacctaatttttatagtgctttactatcagaatttatattgtttattatatcttttaaaagcagtaagcagttttcatctgacagcgtagataaaagaggagtataggaatttgaatgctagagcatctcccaggtgagccttattgcagatctttttgatatagtcacccataagcatggtgagctcctgctctcataaggtcagccaaagccccttaagaaggtacacagcacatctgcagtcattcaggaggtcctgtgaagtgtggtgatgcatctaacaccttttgctgctcactgagaacccagctttgaacttacaagattacactaaccatttttaaagtgcacaaaaatattattattagtcttaactaaaattacatattttataatgccctgcaactctaaaccatccttttgtttacacatttttgtatggtattttaagattatcaatcacttcaacatttctataaccttgtttgtatagcactttctcaagagctgtcagtcccacatacagaatcatttcttttacaaaatgatttaatatgtaatcatgtgtcaggacataaattttgtcacttgggacagtagctttccagctaagataattgcgtgaactctgttaaaactgattatcactcatcaatggctttatttttaacctataaataacccctttcaatatacctggtttttacagcattgcaaaatctgtaaaaataacttttattggaaaatgtcatgaagtcatttttcattatttgtactaaacaatgttttatgtactccttttgtgttttatcttttgtttttccatctgtactcccctcatcctcctaatgttgagaaaatcaaatttcctgggtgtgtccttgttaagtgatcaaaagtaaatgttctctttgccattttagatggaaaaataaaaaaaattaaaaagtaaaaaaaaaaaaaaaaaaaaaaaaaaaa

SEQ ID NO: 31614 - DNA, 2812 bp, Homo Sapiens
agacaaaaagtaaccttcctgaagaggacatgtgattggaagttgtcaattgttgaagcattggtaactccagtctctaacgttttagaaaatcataacaagcggttctctaccctgtaaagaacagaaacctggaaatctaaggctcaaagacatccaagtaattggtatctgggagatttgggattcaaacccagctctgcttgacttggtgaactactgagttcttcattatgtctgatggagattatgattacctcatcaagtttttagctttgggagactctggtgtagggaagaccagtgtactttaccaatatacagatggtaaatttaactccaaatttatcacaacagtgggcattgatttcagggaaaaaagagtggtgtacagagccagtgggccggatggagccactggcagaggccagagaatccacctgcagttatgggacacagcagggcaggagaggtttcgtagcttaacgacagcgttcttcagagatgctatgggttttcttctactttttgatctgacaaatgagcaaagtttcctcaatgtcagaaactggataagccagctacagatgcatgcatattgtgaaaacccagatatagtgctgtgtggaaacaagagtgatctggaggaccagagagtagtgaaagaggaggaagccatagcactcgcagagaaatatggaatcccctactttgaaactagtgctgccaatgggacaaacataagccaagcaattgagatgcttctggacctgataatgaagcgaatggaacggtgtgtggacaagtcctggattcctgaaggagtggtgcgatcaaatggtcatgcctctacggatcagttaagtgaagaaaaggagaaaggggcatgtggctgttgagaagtcaagtaagcgacatagtagttcaggtggcccatgcctgggatcttctctatgattgatacatggcacagtgagagattaatgggcattgtgtacaaattgcttctcaccatccccattagacctacgaataaagcatccggttctaaaattaatttgttgcagctttgtaaatatttctttaagattcagcctgagagttaggagaaatatttcagagccaaaagtgccttatacaaccttagcctattatagtaaatcattcaaggattcagaattttgcagtcacagaagagtgtatttattatgtagaatgaatgagggtactgtcacctgccttaatgtaggtaggcccagagtcttacatttaagatcttacatgcagttataaaaccgccacagtcttcaatccagatttgaagactcatgccataggtgacattctaaaataccattaaagccacttaaatgttaaataagaatatacatgcacatcagctcaatgtctttgagtattaattttatgtaagcattctatttaacatgaatataggacaaatcatggctatatctatagaccttggataaactggattgaccaattatacactcacggtgacttttttattggtgggaaggggattggggtggggcaggctggcttaatgtaatatgagcaaccaaagtgggacttctgtctccccgctatattcccattgctctgaatggttgattgaagggtcagggaactagattttatggctttagttcactgtgattgtacatttatacttggcctatgtgctggccgcacctgaacatagctggtgcttatgccgagttatttgcgatgagtaaatatttagtttctttttcttcatatttataatgttgatctggcatcctcaggctgcagctttattagcttataacttactcatctctatctttaccagcaggctctgtattgttgatatttgcaacttgttttgcttttccattggtggaattgaaataattagtttttaattacataagatgcctgtttgctatttggtggaagatagatgttcatattgaagcagtcacatttgtactgtagttcaataaaagaaaaatgaagtattctgtagcctatatttttcatagagctcatgagcatttactgtacttgctgggtcttgccaagatcatttattccgctgcattgccaaagtgtcttcataccaaattaaaggtggttttaatatatgtttcatggaagttgtttataaaattcaaaggtatttcatttaggtgaaaagtcttatttattaaagtggtttgaataaagtagatcaaaacttccagagatcttaatggctatataggaagaaatatcactcaccataatttaaataaagaataaaaatacttgtattttgtggtggcaaatgtttggtagaactgtaattagaaaaatacaagtatatttgcgtgatggttacactagaagcccagactttacgactacacaatatattcatgtatctaaactgtacttgtaccccctaaatttatttttaaaaaaggaaaaataaaagtatcatgaaaaaacctatttttttttccactgtccttccactactcccataacaaacttatccatggttggtaaaattttacatatttctatccttgaaatgaaggcttcttttaaattccaaagaagtcatggaggcctgtgcatttgaattgtatatgctagtgaggaaaagatttagacatttcaagagcagggttggccaggcgcggtggctcacacctgtaatcccagcactttgggaggccgaggagggcggatcacgaggtcaggagatcgagaccatcctggctaacacagtgaaaccccatctctactaaaaaaaaaa

SEQ ID NO: 31615 - DNA, 1011 bp, Homo Sapiens
atgggccctgctggctgtgccttcacgctgctccttctgctgggttcttgcttacactcttttcccaaaaagaaagagctacaatcagtgtgtgggcaacctgtatactccagccgcgttgtaggtggccaggatgctgctgcagggcgctggccttggcaggtcagcctacactttgaccacaactttatctgtggaggttccctcgtcagtgagaggttgatactgacagcagcacactgcatacaaccgacctggactactttttcatatactgtgtggctaggatcgattacagtaggtgactcaaggaaacgtgtgaagtactacgtgtccaaaatcgtcatccatcccaagtaccaagatacaacggcagacgtcgccttgttgaaactgtcctctcaagtcaccttcacttctgccatcctgcctatttgcttgcccagtgtcacaaagcagttggcaattccacccttttgttgggtgaccggatggggaaaagttaaggaaaattaccattctgcccttcaggaagcagaagtacccattattgaccgccaggcttgtgaacagctctacaatcccatcggtatcttcttgccagcactggagccagtcatcaaggaagacaagatttgtgctggtgatactcaaaacatgaaggatagttgcaagggtgattctggagggcctctgtcgtgtcacattgatggtgtatggatccagacaggagtagtaagctggggattagaatgtggtaaatctcttcctggagtctacaccaatgtaatctactaccaaaaatggattaatgccactatttcaagagccaacaatctagacttctctgacttcttgttccctattgtcctactctctctggctctcctgcgtccctcctgtgcctttggacctaacactatacacagagtaggcactgtagctgaagctgttgcttgcatacagggctgggaagagaatgcatggagatttagtcccaggggcagataa

SEQ ID NO: 31616 - DNA, 18036 bp, Homo Sapiens
cggcggccaggaaatgccgcagatgcgccgcgcagcatccccggtgaaggcagcgcgccggtcctcccgcaccgctgccgcggcctcggcccggcccgaagcacgcgcctcgtgcagggccagcagagcggtcagcgcggccgcagagggtccgggcgcccgccggcccccgcccgccctcgccgcacgccccgctcctccgcttggcgtggcgctgctcgtcgccgcccctgggctcgctgagatttgccgctgctgaaacccgagagggactcgggctcccggagccgggcggcccaccatcggcctgcccggaggcctgggcgtttcctttgccggccctggcgccggcagccccctgcgcccccgctctgcgtcttcggcttccgtgcttctccccagcgtgctgctccttcctcttttccagttcccaaggctgtgtcttgctgactgcgatactgtccgggggttacgagggggagaggggaatttgtcagtcatcgcttagataaacttcggcatggcgggttacctctcccctgctgcttacctgtacgtggaggagcaggagtatctccaggcctacgaggatgtcctggagaggtacaaagatgaacgggacaaagttcagaagaaaacatttacaaaatggataaatcagcatctcatgaaggttcgaaaacatgtgaatgatctctatgaagacttaagggatggacacaatttgatttctcttttagaggttctttcaggagataccttgcccagagaaaaaggtcggatgcgttttcacagactacagaatgtacaaattgcacttgactatttgaaaagacgccaggtgaaattagtgaatattagaaatgatgacataacagatggaaatcccaaattgactttgggattaatctggacaataattttgcactttcagatatctgatatccatgttactggagagtcagaggatatgtctgcaaaagagagattgctactctggacgcagcaggcaacagagggttatgctggaattcggtgtgaaaatttcactacctgctggagagatggaaaattatttaatgccatcattcataaatacaggccggacctgatagatatgaatactgttgctgttcaaagcaaccttgcaaatttagagcatgctttttacgtagcagaaaaaattggtgttataagacttctggaccctgaagatgtcgatgtctcctcacctgatgaaaaatcagtaataacttacgtgtcatctctctatgatgcatttcctaaagtccctgaaggtggggaaggcattggtgcaaatgatgttgaagtcaaatggattgaataccagaatatggtgaactacctcatccaatggattagacaccatgtgaccacaatgtctgagagaacatttcctaataatcctgtagaactgaaggcactttataatcagtatttacagtttaaagaaacagaaattccaccaaaggagacagaaaaatcaaaaattaaacgtctatataaattattagagatttggatagaatttggacgcatcaagctccttcaaggttatcatccaaatgacatagaaaaagagtgggggaaactcattattgccatgctagagagagagaaggcccttcgtccagaagtagaaaggttagaaatgttgcaacagattgccaacagagttcagagggacagtgtcatctgtgaagacaaactgattcttgctggaaatgctcttcagtctgattctaaaagattagaatcaggagtgcagtttcagaatgaagcagaaattgctgggtatatacttgaatgtgagaaccttttacgccagcatgtaattgatgtacagattcttattgatggaaaatactaccaggcagatcaattggtacagagggttgcaaaactgcgtgacgaaattatggccttaaggaacgaatgttcttctgtgtacagcaaaggacgcatactgacaacagaacagacaaagctcatgatatcaggaatcactcaaagtttaaactcaggatttgcacagaccttacaccctagtctgacctcagggctgacccagagtttaacaccttccctaacctcttctagtatgacttctggcctgtcatcagggatgacttcccgcctgactccatctgtcactccagcttatacacctggtttcccatcaggattagttccaaatttcagttcaggagtagagccaaattcattgcaaactttgaagttgatgcagatccgaaaaccccttctaaagtcttctttgctggatcaaaatttaacagaagaagaaatcaatatgaaatttgttcaggatcttttgaattgggttgatgagatgcaggtacaactggaccgcactgagtggggctcagatttgccaagtgttgaaagccatttagaaaatcataaaaatgttcatagagctattgaagaatttgaatctagtctcaaagaagctaaaatcagtgagattcaaatgacagcacctcttaaactgacttatgcagaaaagttgcacagattagagagtcagtatgcaaaactcttgaatacatccaggaatcaagaacggcaccttgatacactccataattttgtaagtcgtgcgactaatgaacttatttggttgaatgaaaaagaagaggaggaagttgcttatgactggagtgagagaaacaccaacatagctaggaaaaaagattatcatgctgaattaatgagagaacttgatcaaaaggaagaaaatattaaatcagttcaggagatagcagagcagctacttctagaaaatcatccagcccggttaactattgaggcctacagagcggcaatgcagacgcagtggagctggatcttacagctctgccagtgtgtggagcagcacataaaggagaacacagcgtatttcgagtttttcaatgatgccaaagaagctactgattacttaaggaatctaaaagatgccattcagcggaagtacagctgtgatagatcaagcagcattcacaagctagaagaccttgttcaggaatcaatggaagagaaagaagaacttctgcagtacaaaagcactatagcaaacctaatgggaaaagcaaaaacaataattcaactgaagccaaggaattctgactgtccactcaaaacttctattccgatcaaagctatctgtgactacagacaaattgagataaccatttacaaagacgatgaatgtgttttggcgaataactctcatcgtgctaaatggaaggtcattagtcctactgggaatgaggctatggtcccatctgtgtgcttcaccgttcctccaccaaacaaagaagcggtggaccttgccaacagaattgagcaacagtatcagaatgtcctgactctttggcatgagtctcacataaacatgaagagtgtagtatcctggcattatctcatcaatgaaattgatagaattcgagctagcaatgtggcttcaataaagacaatgctacctggtgaacatcagcaagttctaagtaatctacaatctcgttttgaagattttctggaagatagccaggaatcccaagtcttttcaggctcagatataacacaactggaaaaggaggttaatgtatgtaagcagtattatcaagaacttcttaaatctgcagaaagagaggagcaagaggaatcagtttataatctctacatctctgaagttcgaaacattagacttcggttagagaactgtgaagatcggctgattagacagattcgaactcccctggaaagagatgatttgcatgaaagtgtgttcagaatcacagaacaggagaaactaaagaaagagctggaacgacttaaagatgatttgggaacaatcacaaataagtgtgaggagtttttcagtcaagcagcagcctcttcatcagtccctaccctacgatcagagcttaatgtggtccttcagaacatgaaccaagtctattctatgtcttccacttacatagataagttgaaaactgttaacttggtgttaaaaaacactcaagctgcagaagccctcgtaaaactctatgaaactaaactgtgtgaagaagaagcagttatagctgacaagaataatattgagaatctaataagtactttaaagcaatggagatctgaagtagatgaaaagagacaggtattccatgccttagaggatgagttgcagaaagctaaagccatcagtgatgaaatgtttaaaacgtataaagaacgggaccttgattttgactggcacaaagaaaaagcagatcaattagttgaaaggtggcaaaatgttcatgtgcagattgacaacaggttacgggacttagagggcattggcaaatcactgaagtactacagagacacttaccatcctttagatgattggatccagcaggttgaaactactcagagaaagattcaggaaaatcagcctgaaaatagtaaaaccctagccacacagttgaatcaacagaagatgctggtgtccgaaatagaaatgaaacagagcaaaatggacgagtgtcaaaaatatgcagaacagtactcagctacagtgaaggactatgaattacaaacaatgacctaccgggccatggtagattcacaacaaaaatctccagtgaaacgccgaagaatgcagagttcagcagatctcattattcaagagttcatggacctaaggactcgatatactgccctggtcactctcatgacacaatatattaaatttgctggtgattcattgaagaggctggaagaggaggagaagtcactggaagaagaaaagaaagaacatgttgaaaaagccaaagaattgcaaaaatgggtatcaaatatcagcaagacattgaaagatgcagagaaggctggaaaacctcccttctctaagcaaaagatttccagtgaggaaatatcaaccaagaaggaacaattatcggaagcacttcaaactatacagctttttttggcaaaacatggagacaaaatgacagatgaagaaagaaatgaattggaaaaacaagtgaaaactcttcaggaaagttataatttattattcagtgaatctctgaaacagctacaagaatcacaaacctcaggagatgtaaaggtagaggagaagattgtagcagagcgtcagcaggagtataaagagaaactccaagggatatgtgatcttcttacccaaactgaaaaccgcctaattggtcaccaagaagccttcatgattggagatggcacagttgagttaaagaaatatcagtccaagcaagaggaattacagaaagatatgcaaggaagtgcacaggcattggctgaagtagtgaaaaacacagagaacttcttaaaagagaatggtgaaaagctgtcacaggaagataaggctttgattgaacagaaacttaatgaagctaagataaagtgtgaacagcttaatttaaaagcagaacagtctaaaaaggagctggataaagttgtgacaacagcaatcaaggaagaaactgaaaaggtagcagcagtgaagcagctggaagagagcaaaaccaaaatagaaaaccttttggactggttgtcaaatgttgacaaagactcagaaagggcagggacaaaacacaaacaggtaatcgaacagaacgggacccattttcaagaaggtgatggcaagtcagcaattggagaagaggatgaagttaatggtaacctgttggagactgatgttgatgggcaagttggaaccactcaggagaatctgaatcagcaatatcagaaagttaaggcccaacacgagaagatcatctctcagcaccaagcagtgatcatagccactcagtctgcacaagtgttgcttgagaaacagggtcagtatctctctcctgaagaaaaagagaaactgcaaaagaacatgaaggaactgaaagtgcattatgaaactgcactggctgagtcagagaagaaaatgaagttaactcactctctgcaggaagaattagaaaagtttgatgctgactataccgagtttgagcactggctacagcagtcagaacaagaacttgaaaacctggaggcaggtgcagatgacatcaatggtttaatgaccaaattgaagaggcagaagagtttctcagaagacgttatttctcacaaaggtgacttgagatacatcacaatttctggaaacagagtgttggaagctgccaaatcttgcagcaagagagacggtggcaaggttgatacttctgcaacccacagagaagtgcagcgcaagttggatcatgctactgatcggttcaggtctctctactctaagtgcaatgttcttggaaataatcttaaagatctggtggataaatatcaacactatgaagatgcttcatgtggacttcttgctggactccaggcctgtgaggccacagcgagcaaacacttatctgaacctattgcggtggaccccaaaaatcttcaaaggcaattagaagagaccaaggctttgcaaggacagatatcaagtcagcaggttgctgtagagaaactgaagaaaacggctgaagtgcttttagatgccaggggatctttacttccagccaagaatgatatccagaaaacacttgatgacattgttgggagatatgaggatctgtccaagtctgttaatgaacgaaatgaaaaactccagataaccttgacccgttcactgagtgtgcaggatggcttggatgaaatgctggactggatgggaaatgtggaaagttctctgaaagaacaaggtcaagtgcctttaaactctactgctcttcaggatattatcagtaaaaacattatgttggaacaggatattgcaggtcgtcagagcagtataaatgccatgaatgaaaaagtgaagaaatttatggaaacaacagatccatccactgcatcctcactgcaagccaaaatgaaagacttgtctgctcggttttcagaagcaagtcataaacacaaagaaactcttgccaaaatggaggagctaaaaaccaaagtagaactgtttgagaacctctcagaaaagctccagacatttttagaaacaaaaactcaggctcttactgaagtagatgtgccaggaaaagatgttactgaattgtctcagtatatgcaggaatcaacttctgaatttttagaacacaagaaacatcttgaagttttgcatagtctcttgaaggagatatccagccatggcttaccaagtgataaggctttggtccttgaaaaaacaaataatttgtcaaagaaattcaaggaaatggaggataccatcaaagaaaaaaaagaagctgtaacttcttgtcaagaacagttggatgctttccaagttcttgttaaatcattgaagtcatggataaaagaaacaacaaaaaaagttcccattgtacagccttcttttggtgcagaggatttaggaaaatctttggaagacactaagaaattacaagaaaagtggagtttaaaaacaccagagattcagaaagtaaacaacagtgggatctcactatgtaacttaataagtgctgtgaccacccctgcaaaggcaatagcagcagttaaatcaggtggagcagtattaaatggtgaaggaacagccacaaatactgaggaattttgggcaaataaaggtttaacatccattaaaaaggacatgactgacataagtcatggttatgaagatcttggcctcttactcaaggacaaaatagcggaactgaacactaaactctccaaattgcaaaaggctcaggaagaatcaagtgcaatgatgcagtggttacagaaaatgaacaaaactgcaacaaaatggcagcagacacctgcacctacagatactgaagctgtgaagactcaagttgagcagaataagtcgtttgaggcagaactgaagcagaatgtaaacaaagtacaggagttgaaagacaaattgacagagctgttggaggagaacccagatactcctgaggcccccagatggaaacagatgttgacagaaatagattctaagtggcaagaactcaatcaattaacaattgatagacaacaaaaactggaagaatcctccaataatctaacccagttccagactgtagaggcccaattgaaacagtggcttgtggaaaaagaacttatggtcagtgttcttgggcccttgtcaattgacccaaatatgctaaacacacaaaggcagcaggtgcagattttgctgcaagaattcgccactcggaaacctcaatatgaacagctgacagcagctggtcagggcattctgagcaggcctggagaagacccttctttacgtgggattgtgaaagagcaactggcagctgtgacccaaaaatgggatagcctaacagggcaattgagtgacagatgtgactggattgaccaagccattgttaaaagcacacagtatcaaagcctgctgagaagcctttctgataaactgagtgacttggataataaactcagcagcagtctggctgtgagcacgcaccctgatgctatgaaccaacagttggaaacagcccaaaaaatgaagcaggagatacagcaggaaaagaagcagataaaagtggcccaggcactctgtgaggatttgtcagcactggttaaagaagagtacttgaaagcagaacttagtaggcaactagaaggcatcttaaaatcatttaaggatgttgaacagaaagcagagaatcatgtccagcaccttcagtcggcctgtgcaagctctcatcaatttcagcaaatgtctagagattttcaggcttggctggatacaaagaaagaagagcaaaacaaatctcatccaatatctgccaaactcgatgtcttggagtcattaattaaagatcataaagactttagtaaaactttgaccgctcagtctcatatgtatgaaaaaaccattgcagaaggtgaaaatctgttattaaaaacacaagggtctgagaaggcagccttacagttacagcttaatacaattaaaaccaattgggatacatttaataagcaggtgaaagaaagagaaaacaagttaaaagagtcattggaaaaagcccttaagtataaagagcaagtagagactctctggccatggatagacaaatgccaaaacaacctggaggaaataaaattttgcttggatcctgctgaaggagagaattctattgccaagttaaagtctctgcagaaggaaatggaccaacactttggtatggtagaattactgaacaacacagccaatagcttgctcagtgtctgtgagatagataaagaagttgttacagatgagaataagtcactgatccagaaggtggacatggtcactgaacaacttcacagtaagaaattctgtctggagaacatgactcagaagtttaaagaatttcaagaagtttccaaagaatctaaaaggcagcttcagtgtgcaaaggagcagctagatatccatgattcgctgggatcccaggcttacagtaacaaatacctgaccatgttgcaaactcagcagaaatcacttcaggccttgaagcatcaggtagatttggctaaaagacttgcacaggaccttgtggtagaggcctcagactcaaagggaacctctgatgttttattacaagtggaaaccatagctcaagagcatagtacactaagtcagcaggttgatgaaaagtgttctttcttagaaaccaagcttcagggcattgggcatttccagaataccattcgagaaatgttttctcagttcgcagagtttgatgatgaactggatagcatggctccagtggggagagatgcagaaacattgcaaaagcaaaaggaaactataaaagcctttctaaagaaactagaagccctcatggcaagcaatgacaatgccaataaaacctgcaagatgatgttagccacagaagaaacctctcctgaccttgttggaatcaaaagggacttggaggccttaagcaaacaatgcaacaagttactggaccgagcccaagccagagaagagcaggttgaagggacaattaagcgccttgaagaattttacagcaaattgaaagaattttctattctgctccagaaagccgaagaacatgaagagtcacaaggtcctgttggtatggaaacggagacaattaatcagcagcttaacatgttcaaggtattccagaaagaagagattgaacccttgcaaggtaaacagcaagatgtaaactggttaggtcaaggccttattcagagtgctgccaaaagcactagcactcagggcttggagcatgacctggatgatgtcaatgcacggtggaagactctcaataagaaggtggctcagcgagcagcccagctgcaggaggccttgctgcactgtgggaggttccaggatgccctggagtccctgctcagctggatggtggacactgaggagcttgtggccaatcagaagcccccgtcggctgagttcaaagtggtaaaggcccagatacaagaacaaaagcttctccagagattgttggatgaccgaaaatctacggtggaggtaatcaaacgagaaggagaaaaaattgctacaacagcagagcccgcagataaagtgaagattttgaaacagctcagtctcttggatagcagatgggaggcattgcttaataaagctgaaacaaggaatcgtcagttggaaggtatctcggtggtagcacagcaatttcatgaaaccttagaaccactgaacgagtggcttacaaccatagaaaagaggctggtgaattgtgaacccataggaacccaagcatctaaacttgaggaacaaattgcacagcacaaagccttagaagatgacatcatcaatcacaataaacatttacaccaggctgttagcattggccagtccttaaaggttttgagctccagggaggataaagatatggtgcagagtaaattagacttctctcaagtatggtacattgagattcaagagaaaagtcacagcaggtctgagctcctccagcaggccttatgtaatgctaagatttttggggaagatgaagttgaactgatgaactggctgaatgaagtgcatgacaaactgagcaagctctcagtccaggattacagcactgaggggctatggaagcagcagtctgaacttcgggttctgcaagaggacatcttactcaggaaacaaaatgtagatcaggctttactaaatggtttagaactacttaaacaaaccacaggtgatgaagttttaataattcaagataaattggaagccattaaagcaaggtacaaagacattactaaactgagcactgatgtggccaagactctggaacaggcgctgcagcttgcaaggcggctgcactccacacacgaagagctgtgtacctggctggacaaagtggaggtggaattactttcatatgaaactcaggttctgaaaggagaagaagcaagtcaagcacaaatgagaccaaaggaactgaaaaaggaagctaagaacaacaaagccttactggactcccttaatgaagtgagcagtgctttgctggaactggtaccatggagggcaagagaaggacttgagaaaatggtagctgaggacaatgagcgctaccgattagtgagcgacaccatcactcagaaggtggaggagatcgatgcagccattctgcgatcacagcagtttgaccaagcagctgatgctgagttatcctggattactgaaacagaaaaaaaattgatgtctctgggtgacatcaggcttgagcaagaccagacttctgctcagcttcaagttcaaaagacattcaccatggagattttgagacacaaggatattattgatgaccttgttaaatctgggcataaaatcatgaccgcatgcagtgaagaggaaaagcaatcaatgaagaaaaaactggacaaggtactgaagaactatgataccatctgccagattaattcagaaaggtatctgcagctggaacgggcacagtccctggttaaccaattctgggaaacatatgaagaactttggccatggctgacagaaacacaatcaatcatctctcagcttcccgccccagcccttgaatatgaaactctaaggcagcagcaggaagaacatcggcaactgcgtgagttgatagctgaacacaagcctcatatagataagatgaacaaaactgggccacagttactggaattgagccctggggaaggcttttctatccaagagaagtatgtggcagccgacaccctttacagtcaaattaaagaagatgtcaaaaagcgtgctgtggcactggatgaagccatttctcaatcaactcagttccatgacaagatagatcagatccttgagagcctggaacgcatcgtggaacgtctgaggcagccaccctctatctctgcagaggttgagaagatcaaggaacagatcagtgaaaataagaatgtgtcagtagacatggaaaagctacagccgttgtatgaaactcttaaacagaggggagaggaaatgattgctagatctggggggactgataaagacatatctgccaaagctgttcaggataagcttgaccaaatggttttcatttgggagaacatacacacactggtggaagagagggaagccaaactactggatgtgatggagctagcagaaaagttctggtgtgatcacatgtcattgatagttaccattaaagatactcaagatttcatccgggacctggaagatcctggaattgatccttcagtagtaaaacaacagcaagaagcagcagagaccataagggaagaaatagatggactacaggaggagctggatatagttattaacctaggttctgaactcattgcggcatgtggggagcctgataaacccattgtcaagaagagtatagatgagttaaattcagcatgggattctctaaataaagcttggaaagaccggattgacaaacttgaggaggcaatgcaggctgccgttcagtaccaggatggactgcaggcggtatttgactgggtagatattgcaggtggtaaattagcttcaatgtctccaattggaacagatctcgaaactgtcaagcagcagattgaagagctaaagcaatttaagtctgaggcctatcaacagcagatagaaatggaaagactgaatcatcaagcagagcttttgctaaagaaagtaacagaagagagtgacaaacacactgttcaagacccattaatggaactgaaattgatatgggatagcctggaggagagaatcatcaacagacagcataaactggagggtgctctattagccttgggtcagttccaacatgccctggatgagctcctggcatggctgacacacaccgagggcttgctaagtgagcagaaacctgttggaggagaccctaaagccattgaaattgaacttgccaagcatcatgtgctccaaaatgatgtattagcccatcagtccacagtggaagccgttaataaagcaggaaatgatctaattgaatcaagtgcaggagaagaagcaagcaaccttcagaacaagctagaggttttaaatcaacgctggcaaaatgttttggaaaaaacagaacaaaggaagcagcagctggatggtgccttgcgccaggccaaagggttccatggcgaaattgaggatttgcagcagtggctgactgacacggagcgtcatctgttggcatctaaaccgctgggaggtttaccggaaacagccaaggagcagcttaatgtccatatggaagtctgtgctgcctttgaagctaaagaagaaacatataagagtctgatgcagaaaggccagcagatgcttgcaagatgcccaaaatctgcagagacaaatattgaccaagacataaataacttgaaagaaaaatgggaatcggtggaaaccaaactcaatgaaaggaaaactaaactggaagaggctctcaacttggcaatggagttccacaattctctccaagacttcatcaactggcttactcaggctgaacagaccctaaatgtagcttctcggccaagtctcatcttggacacagtcttatttcaaattgacgaacacaaggtttttgccaatgaagtaaattctcatcgtgagcagataatagagctggacaaaactggaacccacctaaaatattttagtcagaaacaagatgttgttctaatcaagaatctacttatcagtgtacaaagtcgatgggaaaaagtggttcaacggttggtagagagaggaagatctttggatgatgcaaggaagagagccaagcagttccatgaagcttggagtaaacttatggagtggctagaagagtcagaaaagtctttggattctgaactggaaatcgcaaatgatccagacaaaataaaaacacaacttgcacaacataaggagtttcagaaatcactcggagccaagcattctgtctacgacaccaccaacaggactggacgttctctgaaggagaaaacctccctggctgatgacaacctgaaactggatgacatgctgagtgaactcagagacaaatgggataccatatgtggaaaatctgtggaaagacaaaacaaattggaggaagccctgttattttctggacaattcacagatgccctacaggctctcattgattggttatatagagttgaaccccagctggcagaagaccagcctgttcatggagacattgatttggtgatgaatctgatcgataatcacaaggccttccaaaaagagttggggaagaggaccagcagtgtgcaggccctgaagcgctcagcccgagaactcatagaaggcagtcgggatgactcctcctgggtcaaggtccagatgcaggaattaagcacacgctgggagaccgtgtgtgcactttctatatcaaagcaaacacggttagaagcagccctgcgtcaggcagaggaattccactcggtggtacatgccctcttggagtggctggctgaggcggagcaaaccctgcgtttccatggtgtcctcccagatgatgaggatgctctccggactctcattgatcagcataaagaattcatgaagaaactggaagaaaagagagctgaactaaataaagccaccactatgggcgacaccgttttggctatctgccaccccgactccatcactaccattaagcactggataacaatcatccgggcgaggtttgaggaggtgctggcctgggcaaagcaacatcagcagagattagcaagtgctctggctgggcttattgccaaacaggaattgttggaagctttgctggcttggttgcaatgggctgaaactacacttactgataaggataaagaagtcatcccccaggagatcgaagaggtgaaagcactcattgcagaacaccagaccttcatggaggaaatgaccagaaaacagcctgatgttgataaagtaacgaagacctataagaggagagctgctgatccttcctcattacaatcccatattccagtcttggataagggacgagcaggaagaaaacgctttccagcatcaagcttgtatccctctgggtcacagacacaaattgaaaccaaaaatcctagggtaaacttactggtgagcaaatggcagcaagtctggctcctggcgttggaaagaaggaggaaactcaatgatgccttggacagactagaggagctgagggaatttgctaactttgattttgatatctggcgcaaaaaatacatgcgatggatgaatcacaagaaatctcgagtgatggacttcttcaggagaattgataaagaccaggatgggaaaataacgcggcaggaatttattgatggaattctttcctcaaagtttccaaccagtcgcttggagatgagcgcagttgcagacatctttgacagagatggcgatggatatattgactactatgaatttgtagcagcccttcacccaaataaagatgcatataaacctatcacagatgccgacaaaatcgaagatgaggtgacaaggcaggtagctaagtgtaaatgtgcaaagcgatttcaagttgagcagattggtgataataaatacaggttcttcctgggaaatcagtttggagactcccagcaactgcgactggtccggatcctgcggagtactgtgatggttcgtgttggaggtggatggatggcacttgatgagttcttagtgaaaaatgatccttgcagggccaaaggaaggacaaacatggaactgcgtgagaagttcattttagcagatggtgccagccagggtatggctgctttccgaccccgaggccgaagatcccggccatcatcacgaggcgcttcacccaacagatccacttctgtgtccagtcaggctgcgcaggcggcctccccacaggtccctgccaccaccacacccaagattctccatcctttaacacgcaattatggtaaaccatggttgacaaacagcaaaatgtcaactccttgtaaagcagcagagtgctcagactttcccgtgccatctgcagagggaacgccaatacaaggaagcaagcttcgacttccaggatatttatcagggaaaggcttccactctggggaggacagtggcttgataacaactgcagctgccagagtccgaacacagtttgctgattccaagaagactcccagccgaccaggaagtcgagctggaagcaaagctggcagcagggccagcagccgccgaggcagtgatgcatcagactttgacatttcagaaatccagtccgtgtgctcagatgtggaaactgtcccccagacacacagacctacaccccgagcaggttctcggccatccacagcgaagccttcaaaaatccccacgccccagaggaaatcacctgccagcaaattggacaagtcctcaaagagatagtgcaattggttctaccaaggcccttccttgagcatttattatttaagtttgaacgatgtaaaatatggtgtagaaattcttgtgaaatattgcaagaggcgagtttaaaattctgcagatggccttatttgtgtatttgtctttttattttatctgtataattttttttgtcagatattctggggttaaagtcacatcatatgtgaggaggaaaagtttaacatgaactaacatttctgcactgtaacgtgccgggcacacactaaactcagttactgtacctacaggtaagtctacatcctctctgacagccacagcactacatcaatccctgacgttagggatacctcatgacattttcctgtttttatggaaactctgagaagctgaatgatacatgcaggggatattttttgagatgatttaaatgtaaaccaaaagatggaagacaaaaagacaaacacacccacacgcagtctttgcagtatctgacagagaactcacaggaagttacttcaagcacttgccagtactatgatattcaagtaccttgcagcatttctctgccattgctttcaatgaggccagaggcatcctggatattagacctattatactgtaagaatataagtataaagtgcgttcatatacatgtgaggttttcttttgcttgagtggacagtagcacctgtatcattgaactcattttgtatcagagcaattttgcttgcagaaagctatgaaataaaacacgtcccttaactgcattgctatggaattaattttttttccccagggaaaactagtgtatttttttatgagcaatatcaatttggagtgaccaaaagatacttaaaaatgggtttattttgatttctcatctgaaataatcatgttctggtattatatctatctatatttaataaatatatacattttaatttattatgtgtactcacatactatagaaagatattagtatgcatttaataaaacatattcacttgaaaaaaaaaaaaaaa

SEQ ID NO: 31617 - DNA, 7091 bp, Homo Sapiens
cgctctcggcccaggcgctacgggctgaggagactaggcgagccgaggcgggcgaagggctctgggcatccacttgacagccggcggcgctcgcggccctcagcatgttccgcgaggcgagggttttcctcccgcctcccgtcgccgccgcgggcccgagcgggagcggcgggtgggcgccccgacatggcggcccggagcgccccgagctgccacctgcggctcgagtgggtgtacggctaccggggccaccagtgccgcaacaacctctactacactgcggccaaggagatcgtatacttcgtggcgggggtcggcgtggtgtacagcccgcgggagcacaggcagaagttctaccggggccacagcgacgacatcatcagccttgcattgcatcctgaacgagtgttggtagcaacaggacaagttgggaaagagccttatatttgtatttgggattcatacactgtgcagaccatatcagttttaaaggatgttcatacacatggtatagcttgcttggcgtttgacttagatggacagcgcttggtttcagttggacttgattcaaagaatgcagtttgtgtttgggactggaaaaggggaaaaatgttgtctatggctcctggtcatacagatagaatatttgatatttcttgggatttgtaccagccaaataaacttgtcagctgtggtgtaaaacatatcaagttctggagtttatgtggaaatgctctgaccccaaaacgaggtgtctttggtaagacgggtgaccttcagacaatactgtgcctagcctgtgcaagggatgaattaacatattctggtgcactcaatggggatatatatgtttggaaaggaatcaatcttatacgaacaatacaaggagcccatgctgcaggaatttttagcatgaatgcttgtgaagaaggctttgctactggtggcagagatggttgtattcgtctttgggatttaacttttaaaccaattactgtgattgatctcagggaaacagaccagggatacaaaggtttgtctgtaaggagtgtgtgttggcgaggtgaccacattctagttggaacacaggacagtgaaatttttgaaattgtggtgcaagaaagaaataaaccttttctaattatgcaagggcattgtgaaggtgaactttgggcacttgctgtccatcctactaaacctttggctgtgactggaagtgatgatcgttcggtcaggatatggagcctagtagatcatgcattaatagcaaggtgtaatatggaagaaccaattcgttgtgcagctgtcaatgcagatggaatccatcttgcccttggaatgaaggatggctcattcactgtacttagagtaagagatatgacggaagttgtacatattaaagataggaaggaggcaattcatgagttaaaatattcaccagatggaacttaccttgctgttggatgcaatgacagctcggttgatatttatggagttgctcagcgttataaaaaagttggcgagtgtttgggatcccttagtttcatcactcatctggactggtcttcagacagtagatatttgcagacaaatgatggaaatgggaaaagacttttttatagaatgccaggaggaaaggaagtgacaagtacagaagaaataaaaggtgttcattgggcttcatggacatgtgtttcaggccttgaagtaaatggaatttggcccaagtattcagatatcaacgatataaattcagtagatggaaattatattggccaagttttagttacagctgatgactatggaattataaaattattccgatatccatgtttaagaaaaggggccaagtttagaaaatatattggccattcagctcacgtaactaatgtcagatggtcacatgattatcagtgggttatttctattggtggagcagatcactctgtctttcagtggaaatttattcctgaaagaaaactgaaagatgctgttcacatagcaccccaagaaagtctggctgactctcatagtgatgaatcagattcagatctgtctgatgttccagaactggattctgaaattgaacaagagacacagctcacctaccgtcgacaggtttacaaagaagatctacctcagcttaaagaacagtgcaaagagaaacaaaaaagtgctacttctaaaagaagagagcgggctccaggaaatagtattcgattacactttgttcacggttacagaggttatgactgtcgaagtaatctgttttatactcaaattggtgaaattgtgtaccatgtggcagcagtgggtgtcatttataatcgacagcaaaacacacagcgtttttatctgggtcatgatgatgatattctctgcctaactattcatcctttgaaagactacgtggcaacaggccaggttggtagagatccctcaattcatatatgggatacagagaccattaaaccattgtccatattaaagggccaccaccagtatggtgttagtgccgttgatttctcagcggatgggaaacgtttggcatcagttggcatagatgatagccatactgttgtgctctgggactggaagaaaggagagaaactttcaatagcaagaggaagtaaagataagatttttgttgtaaagatgaacccctatgtgcctgataaactaattacagctggaattaaacacatgaaattttggcgtaaagcagggggaggattgattggaagaaaaggctacataggcacactggggaaaaatgacacaatgatgtgtgcagtgtatggatggactgaagagatggctttttctggaacatccacaggagatgtgtgtatctggagagacatctttcttgtaaaaacagtgaaagcgcatgatgggccagtgttcagtatgcatgcattggaaaaagggtttgtaactggaggaaaagatggtatagtagctctttgggatgactcttttgaaagatgtctcaagacctatgctataaaaagagctgcattggccccaggatctaaaggtcttctcttggaagataatccatctatacgtgccatatcattaggacatggtcatattttagttggcacaaagaatggtgaaatactagaagtggataaaagtggcccaataacacttctggttcagggacacatggaaggagaggtgtggggtttagctacacacccttatctgcccatctgtgctactgtaagcgatgataaaaccttaagaatatgggatctctcacctagtcattgtatgttggctgtccggaagctgaaaaagggtgggaggtgttgctgtttttctcctgatggtaaagctttagccgtaggtctcaacgatggaagcttcttaatggcaaatgcggatactctagaggatcttgtgtcttttcatcacagaaaagatatgatttcagatattcgattttcacctggttctgggaaatatcttgctgtagcatcccatgacagctttatagatatatacaatgtaatgagtagtaaacgagtaggaatatgcaaaggagctaccagttacataacccatattgattgggatattagaggaaagcttttacaggtcaacactggtgctaaggaacaattattctttgaagctcccagagggaaaaaacaaaccatccccagcgtggaggtagaaaaaattgcttgggcatcatggacaagtgtacttggtttatgctgtgaaggaatttggccagtaattggagaagttacagatgtaactgcttcttgcctcaccagtgacaaaatggttctagctaccggggacgatttgggatttgtgaagttatttagatatcctactaaagggaaatttggaaagtttaagaggtatgtggcccatagtacacatgtcacaaatgttcgctggacttatgatgacagcatgttggttaccctaggcggtacagatatgtctttaatggtgtggacaaatgagatggaaggctatcgagaaaaaaggccttgtgatagtgaagaatccgacattgattctgaagaagatgggggctatgacagtgatgttacaagggagaatgaaatcagttacaccatcagagccttatcaacaaatattcgcccaatgttaggaatcaagcctcatttacaacaaaaagaaccctcaattgatgaaaggcagggagtagtaagaggttccaggcctccagtgagcagggccccaccacagccagagaaactccagacaaacaatgtaggcaagaaaaagagacctatagaggaccttgtgttggagctcatttttggttatcgaggcagagactgtaggaataatgttcactatttaaatgatggtgatgatataatttatcacactgcatctgttggaattctgcacaatgttgctacaggttctcagagtttttatcaggaacataatgatgatattctgtgcctcacagtaaaccagcaccccaaatttatcaacatagtggcaactggccaagtaggtgattcagcagacatgtcagctacagctccttctattcacatctgggatgcaatgaacaagcagactttatctatcctaagatgctaccattcaaagggagtatgttcagtcagcttcagtgctactggcaaactattgctgtctgtgggactagacccagaacatactattaccatttggagatggcaggaaggtgccaaaattgccagcagagctggtcacaatcaacgtatttttgtggcagaattccgaccagattcagatacccagtttgtctcagtgggagtaaaacatgtgaagttctggaccctggcaggaagagctcttcttagcaaaaaagggctactgagcacactggaagatgcccggatgcagaccatgctcgctattgcatttggtgcaaataacttgacgtttacaggtaccatcagtggtgatgtctgtgtgtggaaagatcacatattgtgtagaatcgtggcgagagctcacaacgggcctgtgtttgccatgtacaccaccctgcgagatggacttatcgtgactgggggaaaggaaaggccgtcaaaagaaggaggagcggttaaactgtgggatcaggaactgaggcggtgccgtgccttcaggcttgagacaggacaagccacagattgtgttcgttctgtgtgcagaggcaaaggcaagatccttgttgggacaaggaatgctgaaataatcgaagttggagagaaaaatgcagcttgtaatattttagttaacggtcatgtggatgggccaatctggggactagcaacacatccttccagggattttttcctttctgctgcagaagatgggacagtgagactttgggatattgctgataaaaagatgttaaacaaagtgaatttgggacatgctgctcgtactgtgtgttacagccctgaaggggacatggtggctattggaatgaaaaatggagaatttatcattttactagtgagttctctaaaaatatggggaaagaagagagacaggagatgtgcaatccatgatatcagatttagtccggattcccggtatctggcagtaggttctagtgagaactcagtggatttttatgacctaacgctgggccccactcttaacagaatcagctactgcaaagacattccaagctttgtcattcaaatggacttctctgcagatagcagttatctccaggtctctagtggctgctataaacggcatgtctatgaagtgccttcaggaaaacatcttatggatcatgccgctattgacagaattacttgggctacatggactagtattctaggagatgaggttttgggaatctggtccagacatgctgagaaagctgatgtcaactgtgcctgtgtatctcattcaggaatcagtcttgttacaggagatgactttggcatggttaagttatttgacttcccatgtccagaaaaatttgcaaaacacaaaaggttcttgggtcattcgccccatgtgacaaatattcgatttaccagtggtgatcgacatgttgttagtgctggaggtgatgactgcagcttatttgtctggaaatgtgtacatacacctcactgagagatgctgagatgactacagaaattaactttgagaccagaattacagagaagaaaaaccaaaacccaaccctgcatggtcaagtggtgctaacccaagactgtaacagggagaaatgcccagaatcatcaaaatagtgaaagactgatctgttcaaaatatttgctatatgcactgggtataatccgtaatccatacactgccagataatgccatttcaaggaaggatcgaatacttgatggtaaaggccaagtccccctgtattgggaagtgtgtgatttcggcagacctgctgggaaaatttagggtagagcactctttacagaagaactcaaaaacccaatttggataattttcattatctttttagcaaaatggtttcttaatgtttatattttattttcaaggttcattgtttaatgaaatattttattcttgcatttccataaggaaagggaaagtcatgatcatcctaaaggatcacagtttttaaaaggcaaacattttccctaaggaaacagacacaagctttcctagagaatatgatgttttttaggcattaataaggtccttttttataaaggacacttttctcctagtagttttgaattcaggaacagatccaaagttagcagtatatggctgctacatttccattttcattttcgagccatcagtttatgttcagatgccatctctgtaatcgcacatttaaaacataactgtagcctcactaatggaaaagtagtatgatgaacaatcattcccaatggtgtacaatgtaagggttttagggagcaacagtatttaactggaagaaagaattgcatatttaatgtagtctaatatatacacatttgtttaacatgtaaacaaaagtgttaaattcacatatacaacattatacaatttaatcactcttggaataaaatttttatagccttttttctattgggaaaaaaaaaaaaaa

SEQ ID NO: 31618 - DNA, 5372 bp, Homo Sapiens
acagcttgcaacactcggcatcttttctggaggcgcctccttcagcagccgcagatggcatccggctgcgggctcggggctcgcaattgattctcccccttgcccacctcgagtccacggacgcacctctcccttcccctcctcccttcgcgcttctgggtctgagcccagctcgcgaccgccgggcagaggatcagtcgcggcggccgaggctgagcagcagcgctctcgctccctgacctggggagaagcgcccacccgggagagctgatccccggctgcctccagcgccccccaccttttgcactccaagccgggggctccagagaccccgctccccaggcgccactatgctggacccttcgtccagcgaagaagaatcggatgagatcgtggaggaggagagcggcaaggaggtgctcggctcggccccgtccggcgcgcgcctgtctcccagccgtaccagcgagggctcggccggcagcgccgggctggggggcggcggcgccggcgccggagccggggtgggtgcaggcggcggcgggggcagcggcgcgagcagcggcggcggggccggggggctgcaacccagcagccgcgctggcggcggccggccctccagccccagcccgtcggtggtgagcgagaaggagaaggaagagttggagcggctgcagaaagaggaggaggagaggaagaagaggctgcagctgtatgtgttcgtgatgcgctgcatcgcctacccctttaatgccaagcagcccaccgacatggctcgccggcagcagaagatcagcaaacagcagctgcagacagtcaaggaccggtttcaggctttcctcaatggggaaacccagatcatggctgacgaagccttcatgaacgctgtgcagagttactatgaggtgttcctgaagagcgaccgtgtggcccgcatggttcagagtggaggctgttccgccaacgactcccgggaggtcttcaagaagcacattgagaagagagtgcgcagcctgcctgagattgacggcctcagcaaggagactgtgctgagctcctggatggccaaatttgatgccatctaccgtggagaagaggacccgcggaagcagcaggcccggatgacagccagcgcagcctccgagctgattctgagcaaggagcaactctatgagatgttccagaacattcttgggatcaagaagttcgaacatcagctcctttacaatgcctgccagctggacaatccagatgagcaagcagcccagatcagacgagagctggatggacgtctacaaatggcagaccaaatagccagggaacgcaaatttcccaagtttgtatccaaagaaatggaaaacatgtacattgaggagctgaagtcatctgtcaacctgctcatggccaacttggagagcatgccggtatccaaaggcggggagttcaagctccagaaactcaaacgcagccacaatgcttccatcatcgacatgggcgaggagagtgagaaccagctctccaagtcagatgtcgtgctgtctttctcattggaggtggtaattatggaagtccaaggcctcaaatctttggctccaaatcgcatcgtatattgcacaatggaggtggaaggaggagagaaactacagactgatcaggccgaggcttctaaaccaacctggggcacccagggtgacttctccacaacccatgcactgccagctgtgaaggtgaagctgttcacagagagcacaggcgtcctggcgttggaggacaaggagcttgggcgggttattctccatcccaccccgaacagccccaaacagtcagagtggcacaaaatgacagtctccaaaaactgccccgaccaagatctcaaaatcaaacttgctgtccgaatggataagcctcaaaacatgaagcattctgggtatttatgggccatcggtaagaatgtctggaagagatggaagaaaaggttttttgtattggtgcaggtcagtcagtacacgtttgccatgtgcagttatcgggagaagaaagcggagcctcaggaacttctacaattggatggctacactgtggattacaccgacccccagccaggtttggagggtggccgagccttcttcaatgctgtcaaggagggagacaccgtgatatttgccagtgacgatgaacaagaccgcatcctgtgggtccaggccatgtatcgggccacggggcagtcacacaagcctgtgcccccgacccaagtccagaaactcaacgccaagggaggaaatgtacctcagctggatgcccctatctctcaattttacgcagatagagctcaaaaacatggcatggatgaatttatctcttccaacccctgtaactttgaccacgcttccctctttgagatggtacaacgccttactttggatcacagacttaatgattcctattcttgcctgggctggttcagtcctggccaggtgtttgtactagacgagtattgcgcccgaaatggagtccgggggtgtcaccgacatctctgctacctcagagacttgcttgaacgggcagaaaatggcgccatgatcgaccccacccttcttcactacagctttgccttctgtgcatcccatgtccatgggaacaggcctgatggaattggaactgtgactgttgaagaaaaggaacgttttgaagaaatcaaagagaggctccgagttctgctagaaaatcagattacacattttaggtattgctttccatttggtcgacctgaaggtgctttgaaagctactctctcactcttggaaagggttttgatgaaagatattgttaccccagtgccacaagaggaggtaaaaacagttatccgtaaatgtctggaacaggctgcgttagtcaactattctcggctctcagagtatgccaaaatcgaagggaaaaagagagaaatgtatgagcatcctgtcttctgcttggcctcccaagtgatggatttaaccattcaaaatgtaggccggttaatcactcctgccaaaaagcttgaagatacaatacgtcttgctgaactagtcattgaagttcttcagcaaaatgaggagcaccacgcagaggcctttgcgtggtggtcagatttaatggtggagcatgcggagacgttcctgtcactctttgcagtagacatggatgcagccttagaggtgcaacctccagacacatgggacagttttccactatttcagctgctgaatgattttctccgtactgactataatttgtgcaatggaaaatttcacaaacacctgcaagacctgtttgccccacttgttgttagatatgtggatctgatggagtcctcaattgcacaatccattcacaggggctttgagcgggagtcatgggaaccagtcaataatgggtcaggcacctcagaagatctgttttggaaacttgacgcccttcagaccttcattcgggacctgcactggcctgaagaagagtttggaaagcacctggaacaacggctgaagttgatggcaagtgacatgatcgaatcttgtgtcaaaagaaccaggattgcatttgaagttaagctgcaaaaaaccagtcgatcaacagattttcgagtcccacagtcaatatgcaccatgtttaatgttatggttgatgccaaagctcaatcaacaaaactttgcagcatggaaatgggccaagagcatcaataccattcaaaaatagacgaactaattgaagaaactgttaaagaaatgataacactcttggttgcaaagttcgttactatcttggaaggagtgctggcaaaattatccagatatgacgaagggactttgttttcttcttttctgtcatttaccgtgaaggcagcttccaaatatgtggatgtacctaaacccgggatggacgtggccgacgcctacgtgactttcgtccgccattctcaggatgtcctgcgtgataaggtcaatgaggagatgtacatagaaaggttatttgatcaatggtacaacagctccatgaacgtgatctgcacctggttgacggaccggatggacttacagcttcatatttatcagttgaaaacactaattaggatggtaaagaaaacctacagagatttccgattgcaaggggtcctggactccaccttaaacagcaagacctatgaaacgatccggaaccgtctcactgtggaggaagccacagcatcagtgagtgaaggtgggggactgcagggcatcagcatgaaggacagcgatgaggaagacgaagaagacgattagaccatttggtcctagagtctgctgggacagagtcctgtaatcagtgcatgtccttagtctgttagttaaacccattaggaattttctgtcaactaccatgcccatgagatgtttatcaatacaactgccattttagctatgtggtaccaagattagcaaatgaccttcatatccactgatttcctgatgtccatgtctatatgtttacaagcaatatggagcaccattctttaaatactgttcatggagaatacatagtctaaccactaggcgtgtccctgttatcagcaaagatcaatgatgcttcattcatgtactatgtatgcattggtggtaaatggatgtgagggcaagtacatcaagtacattcactctgtttcacgtatgtggatgccagttaattaaatgagtacgtaaataaattaattaaaacacatagatctgctttgtgtttttatttttattttttgaaaaacaaaaggcaagtctccaacaattaacttttgatgctttctgttcccctaaaaccaaaaaatgaaccccttgtgtcgttgttaacccatcctttcatttactcatataattagccaaaaaaaaaaggatggctacataccaatggattgattctcttaattgccacggcaagggggcgatcctatcatgacttaacatcaagcgcgcagttcaaaactactgtcttctgtcaaagttttctcctcttaaatgttattttgcttttacgtctcaactgtgtatgtaaaaaaaacgaatatttaaattacaaccctagactaaaaatgtgtttataataagatgtggatatttccttcagtagattgtaaccataatttaaattattttgttccacactgttttttatatctgtcatgtacattgcattttgatctgtaactgcacaaccctggggtttgctgcagagctatttctttccatgtaaagtagtggatccatcttgcttttgccttatataaagcctacagttatggaagtgtggaaaactgtggcttctcaataaatattcagatgtcctaagaatataaaaaaaaaaaaaaaaaa

SEQ ID NO: 31619 - DNA, 2892 bp, Homo Sapiens
ggtctctggtctcccctctctgagcactctgaggtccttatgtcgtcagaagatcgagaagctcaggaggatgaattgctggccctggcaagtatttacgatggagatgaatttagaaaagcagagtctgtccaaggtggagaaaccaggatctatttggatttgccacagaatttcaagatatttgtgagcggcaattcaaatgagtgtctccagaatagtggctttgaatacaccatttgctttctgcctccacttgtgctgaactttgaactgccaccagattatccatcctcttccccaccttcattcacacttagtggcaaatggctgtcaccaactcagctatctgctctatgcaagcacttagacaacctatgggaagaacaccgtggcagcgtggtcctgtttgcctggatgcaatttcttaaggaagagaccctagcatacttgaatattgtctctccttttgagctcaagattggttctcagaaaaaagtgcagagaaggacagctcaagcttctcccaacacagagctagattttggaggagctgctggatctgatgtagaccaagaggaaattgtggatgagagagcagtgcaggatgtggaatcactgtcaaatctgatccaggaaatcttggactttgatcaagctcagcagataaaatgctttaatagtaaattgttcctgtgcagtatctgtttctgtgagaagctgggtagtgaatgcatgtacttcttggagtgcaggcatgtgtactgcaaagcctgtctgaaggactactttgaaatccagatcagagatggccaggttcaatgcctcaactgcccagaaccaaagtgcccttcggtggccactcctggtcaggtcaaagagttagtggaagcagagttatttgcccgttatgaccgccttctcctccagtcctccttggacctgatggcagatgtggtgtactgcccccggccgtgctgccagctgcctgtgatgcaggaacctggctgcaccatgggtatctgctccagctgcaattttgccttctgtactttgtgcaggttgacctaccatggggtctccccatgtaaggtgactgcagagaaattaatggacttacgaaatgaatacctgcaagcggatgaggctaataaaagacttttggatcaaaggtatggtaagagagtgattcagaaggcactggaagagatggaaagtaaggagtggctagagaagaactcaaagagctgcccatgttgtggaactcccatagagaaattagacggatgtaacaagatgacatgtactggctgtatgcaatatttctgttggatttgcatgggttctctctctagagcaaacccttacaaacatttcaatgaccctggttcaccatgttttaaccggctgttttatgctgtggatgttgacgacgatatttgggaagatgaggtagaagactagttaactactgctcaagatatggaagtggattgtttttccctaatcttccgtcaagtacacaaagtaactttgcgggatatttagggtactattcattcactcttcctgcgtagaagatatggaagaacgaggtttatattttcatgtggtactactgaagaaggtgcattgatacatttttaaatgtaagttgagaaaaatttataagccaaaggttcagaaaattaaactacagaatattaaatattataatgtgcccaaagctctgaatagttaaaaattaaatatttattttcttccccaagctttaggtaaggagaagaggggtcaagagttaaacttagagaccctttgtctctgagaagcatccttctaagacattctgttggagttccctcagtactattccttacaactggagtgggtagaagccttatgaaaattatactgagaacctgatctcgtttactccatgttaatcacattcctaccaacctaaatttctgccaagtcagttctctttggaggaagcccattactccgtaactgactggatggtccagtgtcattttgatctgcttttcagaatggaaatttataatataaatatatgttttaataccacaaacactgtggggcacttgatatttattagtggtgtatatggtccactggtttcaggccaaatctagaatttagtgatactggctcagaagaatttaagttctattcagccttcctgggtgttagaacctagattcaaaatggcttgtctttgctacttttgttccacattctctctctttacctttgccctaccttctgtttgtaaggatgattttaatattaattccaggaacacatgtttttatttcctctgctggaataggagaaagcttaatatattcccaagctgaatgttcttgaattatatctgcatttaccactgtatatgcatatagtgacagtataacctgtctatactacagtagttccagtcctaactttctgaattatttttaaagatcttctctaacaagctatgggaatttggcttcatactctttctttgcaacagcagtgttctgggtgataattttgaattgatacctgttcctttttctgggttttgttggctttttgaaaaattgtctttccttatcattggtgggaggcttggtagcaaagtaacattttttggaaaagaggacagaaaaattgaactacagcttgagaacgtattctttttttcctactttgttattgcaaattgaggaatcacttttaactgttttaggtgtgtgtgtccagagtgagcaaggattatgtttttggattgtcaaagaggatgcttagtcttaaaataaaaataaatttaaaaatcatcttataattagaaaaaaaaaaaaaaaaaaaaaaaaaaaaaaa

SEQ ID NO: 31620 - DNA, 5857 bp, Homo Sapiens
gaacaccgcggggcaagatggcggtagtgcgtcggctgctgccccgggtctggcagaactcgggtgttttgggctgagacagtggcagctgcggccccgaccccaagtgcggggacctccggcgaataaaggtcggcctgcgggtaggccggtagggcctgcggtccggcctgcgggagaactgggtcgtcagtcctccgagtggtggggctggggactttgagggagttggctctagggcacagtccctgcctggccaggtcggaggaacaagtgctgggatctggcgtgtgtgctccaggggctctttccgcggccctttccacctcttttcactttggggacggtaggcctttataaacggactaatgctgggtgatttgttcctgtggttgttgatgccgaggaaagactctgggccccaggactcacctaaactggagttcgaatactgttcgctcgctgtgtgaccttggaaaaaataacaagcttttctgaagtgagaagctgttctcagccacgagtcctgtgcaagatcactaatgattacctggcatttctgcgacacaggcaggtcctcagggtttgtgcaagtttgcaaacatgttcaccctgtctcagacctcgagagcatggttcatcgatagagcccgtcaggcacgagaagaaaggcttgtgcagaaggaacgggagcgggcagctgttgtgatccaggcccatgtccggagttttctctgtcggagtcgactgcagagagatatcaggagagagattgatgacttttttaaagcagatgaccctgagtccactaaaagaagtgcactttgtattttcaagattgccaggaaactgctgttcctattcagaatcaaagaggataatgagagatttgagaagttgtgtcgcagcatcctgagcagcatggatgctgagaatgagcctaaggtgtggtatgtgtccctggcttgttctaaggacctcaccctcctttggattcaacagatcaagaacattttgtggtactgctgtgattttctcaagcagctcaagcctgaaatcctgcaggactcccgactcatcaccctgtacctcacgatgcttgtcaccttcacagacacttcaacgtggaaaattcttcggggaaaaggtgaaagtcttcgaccagcgatgaaccacatttgtgcaaatataatgggacatctcaaccagcatggattttattctgtgctgcagatattgttaacccgtggcctggcaagaccccgtccttgtctatccaaaggcactttaacagcagctttttctctagcgttacgccctgtgattgctgcacagttctcagacaatctgattcggccgttcctcatccacatcatgtctgtgcctgctctggtgactcatctcagcacagtgacccctgagcgcctcactgttttagaatcccatgacatgcttcgtaaattcatcatatttttaagagaccaagatcgatgccgtgatgtatgtgaaagtttagaaggatgccatacgctttgtctaatgggcaacctcctacacttgggctccctcagccccagagtgttagaggaggagacagatgggttcgtgagtttgctcacccagacgctgtgctactgtcggaagtatgtgtctcagaagaagtccaacctgacccactggcatcctgtccttggctggttctcccaatctgtggattatggccttaacgagtcaatgcacttgatcaccaaacagctgcagttcttgtggggggtgcctctgatccggatcttcttctgtgacatcctgagcaagaagctactggagagccaggagccagcccacgcacagccagcatcccctcagaatgtgctcccagtgaagagtctcctaaagcgtgcttttcaaaagtcggcatcagtccggaatattctcaggcctgtcgggggtaaacgggtcgactctgcagaagtccagaaggtttgcaacatctgtgtcctctaccagacctcgctgacaactctcacacagattcggctgcagatactcacaggtctcacttaccttgatgacctgcttcccaaactgtgggcatttatctgtgagctcgggccccacggagggttaaagctcttcttggaatgcctgaacaatgacactgaagagtccaagcaactcttggccatgctgatgctgttctgtgactgttcgcggcacctcatcacaatccttgatgacattgaagtttatgaagaacagatttcattcaaactggaagagctggtcactatctcctctttcctgaattcttttgtgtttaagatgatctgggatggaattgtagagaacgccaagggtgagaccttggagctgttccagtctgtccacgggtggcttatggtgctgtacgagcgggactgccggcggcgcttcacccccgaggaccactggctgcgaaaggatctcaaacctagcgtgctcttccaagaactcgacagggacagaaaacgggcacagttgatcctgcagtacatcccacatgtcatccctcacaaaaacagagttctactgtttcgaaccatggttaccaaggagaaggagaaactggggctggtggaaaccagctctgcctccccgcatgtcactcacatcaccatccgccggtccaggatgctggagagcttgtttgagtgcccctggccactggtgatcaatgccgagagctgctaggaaggcagtgtgtgctgaacagtggatgtttctgacattcttcaaggacggctacgagcagcttaggcagctctcccagcacgccatgaagggggtcatccgtgtgaagtttgtcaatgacctcggggtggacgaagcagggattgatcaagacggtgtttttaaggagttcttggaagagatcatcaagagagtttttgacccagcactcaatctgttcaagacaaccagtggggatgagaggctgtacccctcacccacatcctacatccatgagaattacctgcagctcttcgagtttgtggggaagatgctggggaaggctgtgtatgagggaattgtggtggacgtgccatttgcatccttcttcctgagccaactgcttgggcaccaccacagcgtcttctatagctcggtggatgaactgccttctctggactccgagttctataaaaacctcacctccatcaagcgctatgatggggacatcactgacctgggcctgacgctgtcttacgacgaggacgtcatgggtcagcttgtttgccatgaactgattcctggagggaagaccattcctgttacaaatgaaaataagcaacagaattagctacatccatctgatggcacattttcgaatgcacactcaaataaaaaaccaaacagctgccctcattagcggattccgttccattatcaaacccgagtggatccgaatgttctcaactcctgaactgcagcgtctcatctctggcgacaatgctgagattgatctggaagatttaaagaagcacacagtctactacggtggtttccatggaagtcacagagtcatcatctggctctgggatattctggcctccgacttcacaccggatgagagagctatgtttctgaagttcgtgaccagctgctccagacccccgctcctgggattcgcctacctcaagcctccattctccatccgctgcgtggaggtgtcggacgatcaggacaccggggacactctgggcagcgtcctccggggcttcttcaccatccgcaagcgggagccaggcggccgcctgcccacctcctccacctgcttcaacctgctcaagctgcccaactacagcaagaagagcgtcctccgcgagaagctgcgctacgccatcagcatgaacacgggctttgaactctcctagctcctgtcccagccctgcctccagggctcctgggctgccagggaccttcagctcccagaggcagtgtggtcctgggaatgtgaccaacatgccaggtgacattggcccctagaccctctctatagccatgagactccttgtggcctcaagaaatttagacgcccacgacagcactacacagcatctccaggtgatgcccaaggcacagggctgcagaaaataaacctccagattccaccaacacgggtccattcttcctggtgatggcagaggggcttcttttagctagtttgatcttttgggagtctgtctttccttagccgtctgagtgagctgtgtatgaacaagtcccaggagttccaagagtctagagtggtttttgcagcatgggttgagtgtacaaagcctactgtgcgtgagatcctctccttccgtttctgaaatctcttactcaggtaaggcctcgccaagcctctatgcaccccacaaagtttctgcctccatgccgtccacagcgcctcttcccagacagccaggcccatctgctgcccagggaagcgcaggcgcctgctagggacgctatggacaccgtgagtccaaggcgctgctcctgccttgaagccacgcgctccacgccgcggccctcccattttctgcgtcctcagcgggctgagctgccagagagtcttcccggacctattcccgtcctatgcattcacattggcatcctggtttgggggaagaaaaacaacggcccttagcagcagccccgtttccagaatgtgctgcctgttccccaaagcctgcttgtcccgcggaggacggctgcctttgaccctgcttatttgtctcactggttatctaatgaggaacaaacactaacctaaggtacacatcccatctgggcggtggcttcactcctgagtctgcaaaatcccaggaaacttgggtcttgctgcccatccttcctcagcacagggaacccggaagcccgttgcactgacagaggctcacaccctctgggttttttgttttttttttaaacttcatttctcttccaacccattgtgttcctctgccctcattctttacctttgttgtaagaactttagctccagggaactgaggcagaggccctgtttgtggtctgtgttgacagccacccaccctctcccacctcatgctcctgcacctgcaccaccaaggttgatgccggattcgaagccaggaaggcccagtccctcctctgctctcctcaaagacgcaaaacattttccaacaagagctgtcacagtggcagcaaagcaggggccacccgtctccacagtccttcagagtttcagctgcatcctggtgtcccacccaggtcgagcccccaggcttctggaaaagagtgtgtgctctactttgatggaaacatggcaaggaatttaaagacaggaatgtattaatattattgaaggtgtgttcgtaacctctgattctgtggacttgccactttctccaaacgctcggttcctttgaagatttcttctgaacgtgtgtgcgcacgctgggcgggttcgtgcatacatgcggggaccccagactgtcagcacagggaagatggatcccatcctaatttttatcacctgaaggttggaaccagtgagggactgggagagagtgatttataagcaccaatatcaacttcatgtggatttttgacaaggaggggtagtttgtaatttcatttaaattcttttcagcagctggaaatattgcactatctgaaacactgaatctccttttgtaactggtgttcactgacaccttgatggctcttgatggctctaaaaagttgtaggattttttgtttttgtagctaacttatggattgagatgtgatcaaaggctttattaaatttgtacttcagcataaaaaaaaaaaaaaaaaaaaaaaa

SEQ ID NO: 31621 - DNA, 5780 bp, Homo Sapiens
gcggccgctgctcgcgctgaggtgcgtcggtgcccggccccccgcgcccccgcgcgccgcggctcctgttgacccggtccgcccgtcggtctgcagcgcggctgaggaaacttggctgtaacttcaaaagaagatttgattctttatttctggactgcatatatatatataacaaggccattaaaatgtcgggagcctcagtgaaggtggctgtccgggtaaggcccttcaattctcgagagaccagcaaggaatccaaatgcatcattcagatgcaaggcaactcgaccagtattattaacccaaagaatccaaaggaagctccaaagtccttcagcttcgactattcctactggtctcatacctcacccgaagatccctgttttgcatctcaaaaccgtgtgtacaatgacattggcaaggaaatgctcttacacgcctttgagggatataatgtctgtatttttgcctatgggcagactggtgctggaaaatcttatacaatgatgggtaaacaagaagaaagccaggctggcatcattccacagttatgtgaagaactttttgagaaaatcaatgacaactgtaatgaagaaatgtcttactctgtagaggtgagctacatggaaatttactgtgaaagagtacgagatttgctgaatccaaaaaacaagggtaatttgcgtgtgcgtgaacacccacttcttggaccctatgtggaggatctgtccaagttggcagttacttcctacacagacattgctgacctcatggatgctgggaacaaagccaggacagtggcagctacaaacatgaatgaaacaagtagccgttcccacgctgtgtttacgattgttttcacccagaagaaacacgataatgagaccaacctttccactgagaaggtcagtaaaatcagcttggtggatctagcaggaagtgaacgagctgattcaactggtgccaaagggactcgattaaaggaaggagcaaatattaataagtctcttacaactttgggcaaagtcatttcagccttggccgaggtgagtaaaaagaagaagaaaacagattttattccctacagggattctgtacttacttggctccttcgagaaaatttaggtggcaattctcggactgcaatggttgctgctctgagccccgcggatatcaactacgatgagactttgagcactctgagatatgcagatcgtgcaaaacaaattaaatgcaatgctgttatcaatgaggaccccaatgccaaactggttcgtgaattaaaggaggaggtgacacggctgaaggaccttcttcgtgctcagggcctgggagatattattgatacatccatggggtccctcacttcatccccatcttcctgctcactcagtagtcaggtgggcttgacgtctgtgaccagtattcaagagaggatcatgtctacacctggaggagaggaagctattgaacgtttaaaggaatcagagaagatcattgctgagttgaatgaaacttgggaagagaagcttcgtaaaacagaggccatcagaatggagagagaggctttgttggctgagatgggagttgccattcgggaagatggaggaaccctaggggttttctcacctaaaaagaccccacatcttgttaacctcaatgaagacccactaatgtctgagtgcctactttattacatcaaagatggaattacaagggttggccaagcagatgctgagcggcgccaggacatagtgctgagcggggctcacattaaagaagagcattgtatcttccggagtgagagaagcaacagcggggaagttatcgtgaccttagagccctgtgagcgctcagaaacctacgtaaatggcaagagggtgtcccagcctgttcagctgcgctcaggaaaccgtatcatcatgggtaaaaaccatgttttccgctttaaccacccggaacaagcacgagctgagcgagagaagactccttctgctgagaccccctctgagcctgtggactggacatttgcccagagggagcttctggaaaaacaaggaattgatatgaaacaagagatggagaaaaggctacaggaaatggagatcttatacaaaaaggagaaggaagaagcagatcttcttttggagcagcagagactggacgcggattctgatagcggggacgattctgacaagaggtcgtgtgaagagagctggaaactgattacttctctgagagaaaagctacctcccagcaagttgcaaaccattgttaaaaaatgtggcctcccaagcagtgggaagaaacgtgaaccaattaaaatgtatcagataccccaaagaaggcgcttgagtaaagattccaagtgggtcacaatctcagatcttaaaattcaggctgtcaaagagatttgctatgaggttgctctcaatgacttcaggcacagtcggcaggagattgaagccctggccattgtcaagatgaaggagctttgtgccatgtatggcaagaaagaccccaatgagcgggactcctggagggcagtggccagggacgtctgggataccgtcggtgttggggatgagaagatcgaagacgtcatggccactgggaaaggcagcactgatgtagatgacctcaaggttcatatagacaagctggaagatattttgcaagaagtcaaaaagcaaaataacatgaaagacgaggagataaaagtcttaagaaataaaatgctcaaaatggaaaaagtcttgccactgatcggatctcaggaacagaaaagcccaggaagccacaaagcaaaggagcctgttggtgctggtgttagtagcacctctgagaataatgtaagtaaaggagacaatggagaacttgcaaaagaagaacgtgtttcccagctgatgaatggggatccagcttttagacgtggacgtctgcgctggatgaggcaagagcaaattcggtttaagaacttgcaacagcaggagataacaaagcagcttcgtcggcagaatgtacctcataggttcatccctcctgagaaccggaagccccgcttcccctttaagagcaaccctaaacacagaaactcttggagtcctgggacacatatcatcataacagaagatgaggttatagagcttaggattccaaaagacgatgaagcaaggaaagggaataaagaagagagccaagaaaaagggggtaaaggagcttttaaggatccccagtttccatggggctctcaaggaatgagaagtcaagatcacatccaagttagcaagcagcacattaataatcagcaacagccacctcaactacgttggagaagcaattctctcaataatggccagccgaaaagtacgcgctgccaggcatctgcctccgcggagtcattaaactcccacagtggtcaccccactgctgatgtacagactttccaggcaaagcgccatattcatcaacaccgtcagtcttactgtaattataacactggaggtcagttagagggcaatgcagccacttcctatcagaagcagactgacaaacccagccactgtagccagtttgtgacacctccgcggatgaggagacagttctcagcacccaatctcaaagctggtcgagaaaccacagtataaatcagttactggacaaacttgaaatcatggtggaagaaacagacagtgttagctcatgatttgatttggttctacctttggccttgagttcttattatttacattataaatattaactggttttatattgttaagacaaaacactggtaaaagtttcaacacctcccttttgcttgtataccataaatgggcagtttctgaaattttggataaagcatcaagaactcctttttctgaaacgttcctccttttttagtgcctaattaatatacttacttacacagacttgtcccatcttgatgtaagtttgttatgtttttataatgcctataaattaatctgacatccagaaagacctgcctcttagtttatgcagacattcaaaaggagaatttgataagcagaattaaatgtctgttattcataaatgttagaaattggtttaaaaataataacatgcaactgggtgggcacagctttggatttctcatccacgtctgttcccttctttaaatatgattagaattttcgtaagccaaaactaaaggtcttcaaacatatcttgcaatacatagctttgcatcttccacacaacttccacgtcttcttttattctgtattttacaaaaaactcatataatggttttttcttttgaatgtatcagaatatgtatgaaatttgtcatatcagaatctataaattggcactgtgtctgggattctgtttgtggtttgcattttgaagttcaatgtatcatttgacacacatgcacacaaagtgaactattcaccaaaatcatgccaacagaaataccaacaaaaaacttgtgtagcttgtaaggaggttatttggcttgagagggaagaggtgggacagacatgggggacaaagctacagcatatggctctgtggtgctgcttttttccaatagttgatgaaatagtgaaataaaagttaactttggttgggcttggaataaaggagatgatacataataaactattctttggttagcattagtaatgcttgtagacactcaaacaaggaaggcgaagtcctgatgatgatttattgtatcaatacctcattttatttggttgtggtctcagtttgcctcactggagaatccactaagaaagatggattttaatgggaagaaaagaattattttctacatcgttcctcatctcttgagtttgtcaaaaagttttctaagaggcagtgtgaagagccagagatgtccgaaattgcctgacttcatgttttggaagattcctaagtcacatgaaatcatctatcaaacacttgtcttccaaacggtgtgaaaaactacagccaagatagcagttagcattcaaggaagccttaaagattgtgattatgtttttttttcctttgcgtgtgggcactatgctttattagaacacattatttttaatcatagtattttttctttgcctctaagaaaatactttcttaatgctcagaaagttgcttccaattaatgtttttttccccttaaaaagagaagctttgagagatatttttgctttcatagctagaacagttgaagtcttcaactgaggttttatagcagattagacatgggtaaatgatgtctgtaatgggttgagttactgagatgacaatctcctgtgccatttggtttgaatgtacttgataggctgcttcaaatcagtcacttcaatgcattttgtgtaaacccagttgtccttttttattcctctttagacataaatgtgctaactattcctttctatacacaatttattttctaagattaaaaataataattgctaggtttggtggcacatgcgtacagccccagctacttaggaggctgaagcaggaggatccctagagcccaggagttctgggctgtggtacactatgccagttgggtgtaagtttggcatcaatatggtgatgtccctgaagcaggaaaccacaaacttgcatcaggacgggtgaacccagcccaggttggaaatggagcaggccaaaactcccaggctgatcagtaatgggatcttgcctatgaatagccagtgcactgcagccaggacaacagagtgagaacctgtctttaaaaaaaaaaaaaaaaaaaaaaa

SEQ ID NO: 31622 - DNA, 4366 bp, Homo Sapiens
ggtagttgcggcgctggttcccgggagcagccgtcgagccacaactgcggaggaggagttcgggaaagcggccgtcgggactcctcccctccgtcgtctccgccccggttgagaggcgcctcggcgcatcggagggaccctcccccgcgcttcctcaggctgctgtcgccgctgctgggagatgggcctactcgcccgccaccctgcgctgccgccgctctgaggagttaaagaacatccatgatagcagtcttctgtaaatcgaacttttcaagaattctctgaaggaaccaagtaggatattcttacatcatgacttaatgtgaatgcaagaacaagaaataggttttatctctaaatataatgaagggctgtgtgtaaacactgaccctgtctcaattctaacaagcattttagacatgagtttacatcggcaaatgggttcagatcgagatcttcagtcctctgcttcatctgtgagcttgccttcagtcaaaaaggcacccaaaaaaagaagaatttcaataggctccctgtttcggaggaaaaaagataacaaacgtaaatcaagggagctaaatggcggggtggatggaattgcaagtattgaaagtatacattctgaaatgtgtactgataagaactccattttctctacaaatacctcttctgacaatggattaacttccatcagcaaacaaattggagacttcatagagtgccctttgtgccttttgcggcattctaaagacagatttcctgatataatgacttgtcatcacagatcttgtgtggattgcttacgacaatatttaaggatagaaatctctgaaagcagagttaatattagttgcccagaatgtactgaacggtttaatccccatgatattcgcttgatattaagtgatgatgtcttgatggaaaaatacgaagaatttatgcttagacggtggcttgttgcagatcctgattgtaggtggtgtccagctccagactgtggatatgctgtgatagcatttggatgtgccagctgtccaaaattaacttgtgggcgagagggctgtggaacagagttttgctaccactgtaaacagatttggcaccccaaccagacctgtgatgctgctcgacaagagagagcccagagcttacgtttgagaactatacgttcttcatccattagttatagtcaagagtctggagcagcagctgatgatataaagccatgtccacgatgtgctgcttatataataaagatgaatgatgggagctgcaatcacatgacatgtgctgtttgtggttgtgagttttgttggttgtgtatgaaagaaatctcagatttgcattatctaagtccatcaggatgtactttttgggggaagaaaccctggagccgaaagaagaaaatattgtggcaactgggaacactggttggtgctcctgtcggaatcgctttaatagctggcattgctattcctgcaatgattattggcattcctgtgtatgtgggccgcaagattcacaatcgctatgaaggcaaggatgtttcaaagcacaaacggaatttggccatagcaggtggtgtaacgttgtctgtaatcgtgtctccagtagtagctgcagtgactgtaggtatcggtgttcctattatgttagcttatgtctatggcgtagttccaatttctctttgtcgaagcggaggttgtggagtctcagcaggcaatggaaaaggagttaggattgaatttgatgatgaaaatgatataaatgttggtggaactaacacagctgtagacacaacatcagtagcagaagcaagacacaacccaagcataggggagggaagtgttggtgggctgactggcagtttgagtgcaagtggaagccacatggatcgaataggagccatccgagacaacctgagtgaaacggccagcaccatggcactagctggagccagtataacggggagtctgtcaggaagtgccatggtaaactgttttaacaggttggaagtacaagcagatgtacagaaagaacggtacagtctaagtggagaatctggcacagtcagcttgggaacagttagtgataatgccagcaccaaagcaatggcaggatccattctgaattcctacatcccattggacaaagaaggcaacagtatggaggtgcaagtagatattgagtcaaagccatccaaattcaggcacaacagtggaagcagtagtgtggatgatggcagtgccacccgaagtcatgctggcggttcatccagtggcttgcctgaaggtaaatctagtgccaccaagtggtccaaagaagcaacagcagggaaaaaatcaaaaagtggtaaactgaggaaaaagggtaacatgaagataaatgagacgagagaggacatggatgcacagttgttagaacaacaaagcacgaactcaagtgaatttgaggctccatccctcagtgacagtatgccttctgtagcagattctcactctagtcatttttctgaatttagttgttctgacctagaaagcatgaaaacttcttgtagtcatggttccagtgattatcacacccgctttgctactgttaacattcttcctgaggtagaaaatgaccgtctggaaaattccccacatcagtgtagcatttctgtggttacccaaactgcttcctgttcagaagtttcacagttgaatcatattgctgaagaacatggtaacaatggaataaaacctaatgttgatttatattttggcgatgcactaaaagaaacaaataacaaccactcacatcagacaatggaattaaaagttgcaattcagactgaaatttaggcccataaatgctgcagaataattaccactgtacaaccgtgtttggagctggttgaactacatgtgactacttaagtttcaggttaccagcaaaagccgggtttcattatcataatgcagatacattttctgtgttcagcaaggcattgtgtgtcatgtggatcttagttaccaaactatgaagtgaaggctttaaaagtgcattattttaaggataataaatttgaagagcaaagcatgttttgtgtgtttgccacaaaacattgcttgaagcacatacttagatagaaattggtcttaatttatataatcaatataaaatactaatgcaattctacagcattcaaatgaagaaaacttgaggctttagggataagtggttagtgatattttattgaaaccactaaagagataagtttaaaagaactgcataggttactctcagtatatgatactctgtaacatttctatttatatcggcataaatttcattttttttcttcatatgcaatgtggttatataaagcttaatgcagctcatttgctaccatttggatacttagacactttgagcaagattgtggcagtttttgcacaactttgaaatagaaatacctggtactctatcttgtttattgttgatgccatcttagaggaaaaaatgtaaaggtaagtaattaagcatatgacagcaacaaataagatacataaaactacaaaataaagtcccattaggttataagtattacaaaaaatccacctttctctaaggggaagtttgtaccccattgattcttggtgcctttgggatcgactgggttttaatggcctagttatttgaggattttgctgtgttgttttccatgtcttctctggtcaccttggattatatataaaaatacaggaaatagataaacatgaatgtgattaataatgctgaaaaagtattagcctaccaaagacacactcaggctttagtgaataactttacataacctcagtttttaacacatgcatatcttctccaaccatgaaatcaaagcacggtgcagaacttgtaccaagtacaaaaggtccatgtatgattagcattattttcttttgcttttgtttatggacaatgttcagctgacataagcagaagttggccaaaatactgcctgtactgttaatttcctgtataattcacttaaataaaagcaggttaacctcaatgatagcagttaaaatgttctatcttatgtatttcttttaagtattaccattatggtgctactgagcgttttcttttggtaaaaagaaaaatgccatgggctgcagtcttcttccatcacttttccctaccaggtccattaatatgcttataacactagtgccagttattttatttgataatgcttatggtatttgtatatttgtttgcattccaattttgtttaataatgagtgtgtaaactgcatacgttaaataaatgtaaatactaatgtactgctgcaaaaaaaaaaaaaaaaaaaaaaaaaaa

SEQ ID NO: 31623 - DNA, 2699 bp, Homo Sapiens
gagcgatcatggcaacgggctcgggcggggaacgcgtggcagcggctgcagcggcggcagtttggtggcggactggggcggcggagcggcggcggcggcggcggtggcactggcactggccccggccctgagcaccatgcggcggggcagctccgagagcgagctggcggcccggtgggaggcggaggcggtggctgcggccaaagcggcggccaaagctgaggccgaggccacagcggagacggtggcggaacaggtccgcgtggacgcgggcgcggccggggaaccggagtgcaaggcaggggaggagcagcccaaggtcctggccccggccccggcgcagcccagtgcggctgaggaggggaacacccaggtccttcagcggccgccgcccacgctgcccccgtccaagccgaagccggtgcagggcctctgcccgcacgggaagccccgggacaagggccgaagctgcaagcggagctcgggccacggttccggcgagaacggctcccagcggccggtcaccgtggacagctccaaggccaggacctccctggatgccctgaagatcagcatccgccagctcaagtggaaggagttcccatttggccggcgcttgccttgtgacatctactggcatggagtttcatttcacgacaatgacatattctccggtcaagtgaacaagtttccaggttcaaatggtgaaagacgatgacccctcctggaagcccacttttatcgtgaaacctgatggtggttgtcagggtgatggaatctacctcattaaagaccccagtgacatccgcctggcagggaccctccagagcaggccagcggtggtccaggagtacatctgcaaacctctccttatcgacaagctcaagtttgatattcgtctgtatgtcttactcaagtccttagaccccttagagatttatatagccaaagacggactctctaggttttgtaccgagccatatcaggagcccacccccaaaaacctgcaccgcatctttatgcacttaaccaactattcactgaacatccacagcggcaacttcatccactcggacagtgctagcactggcagcaaaaggactttttccagcatcctttgtagactgtcttccaaaggcgttgacatcaagaaggtctggtctgacatcatctccgtggtgattaagacggtcatcgcgctgactccagagctcaaagtcttctaccagtcagacatccccacggggaggccgggccccacgtgcttccagattttaggctttgacattcttctaatgaaaaatctgaagcctatactacttgaagtaaatgcaaatcccagtatgagaatcgaacatgagcacgaagggtgtttgaaaatgtccccagcctcgttgatgaagaagtgaaagtggctgtgatcagagacactctgcgcctcatggacccacttaagaagaaaagagagaatcagtctcagcagcttgaaaaaccattcgctggaaaggaagatgctttggacggcgagctgaccagtgctccagactgcaacgccaaccccgaagcccacctgccttccatttgcctcaagcaggtgttccccaagtacgcaaaacagttcaactacctgcgcctggtggacaggatggcaaatttgtttatccggttcctgggcatcaagggggcaatgaagttggggccaacaggctttcgtaccttcataaggagctgcaaactcagcagcagcagcctgtccatggctgccgtggacatcctctacattgacatcacacggaggtggaactccatgaccctggaccagcgggactcagggatgtgtctgcaggccttcgtagaagctttctttttcctggctcagaggaagttcaagatgctgccacttcatgagcaggtggcctcactgattgacctttgcgagtaccacctgtccctgctggatgaaaaacgcctggtgtgtggccggggcgtcccgtcggggggccggcccccacaccgtggccctccccaggagccctccccctcggcccagccagcaggggacaaccccccaccccgcaccagctgtgccgataagctctcccatcccagacataccctgtcctgagggccactctgtcctcctggaaaacggaagacgagagcagctttcagggctggagcgccccaggcattctgcctgcagaggaatggcaggcaggctgccgaggggcccagctgaggtccccacgaactgtctctgtgtgcggctgagctgtgcttcaccaggctggctggttctcacctgccttcctcctcacacctcctggtgatacaccctgtttctgagtcatcagtcatcggacatatgacatctaaaacgtgacagatggcaccttctattctgggctcacaggaagcaccaactggggcaaatctgttgtatttggggcacaggacacaatcgatcccaaggcccggagctgtggagaggaagccgagtgttaggatctgctgccggggcctccacgcgcccaccgggaaaagcctgagaacatcgtgtttatttcctgccgcccgttccgagagaaggaagtggaaatatcaagtaggcatctgcgaatctcccatcccagtcatgtgctacatgggtgtagtgaacagattaacctcatttagttcattagcttgcctgttgctgc

SEQ ID NO: 31624 - DNA, 2009 bp, Homo Sapiens
cgagtgttggcggggactgagcctcctgcttgaggtagttgtttttactcccagtccccaggctcacgagccccacgcgcgctcaatctgccctcccgcttctcctcgccactccgagttctgcgccctcgagatccagcgcatccgcggggtgggcgggtcctggcggctctttgccctcttccaacatggccgccgctgcctctgtgacaggcagggtcacgtgggcagcctcgcctatgaggtcgctggggctcggccggcgattgtcccttcccggaccccgtctcgatgcggtgactgccgctgtcaacccgagcctgagcgatcatggcaacgggctcgggcggggaacgcgtggcagcggctgcagcggcggcagtttggtggcggactggggcggcggagcggcggcggcggcggcggtggcactggcactggccccggccctgagcaccatgcggcggggcagctccgagagcgagctggcggcccggtgggaggcggaggcggtggctgcggccaaagcggcggccaaagctgaggccgaggccacagcggagacggtggcggaacaggtccgcgtggacgcgggcgcggccggggaaccggagtgcaaggcaggggaggagcagcccaaggtcctggccccggccccggcgcagcccagtgcggctgaggaggggaacacccaggtccttcagcggccgccgcccacgctgcccccgtccaagccgaagccggtgcagggcctctgcccgcacgggaagccccgggacaagggccgaagctgcaagcggagctcgggccacggttccggcgagaacggctcccagcggccggtcaccgtggacagctccaaggccaggacctccctggatgccctgaagatcagcatccgccagctcaagtggaaggagttcccatttggccggcgcttgccttgtgacatctactggcatggagtttcatttcacgacaatgacatattctccggtcaagtgaacaagtttccaggcatgacggagatggtgcgtaaaattactctgagcagagcagtgagaaccatgcagaatctctttcctgaggagtacaacttctaccctcgctcatggattctgcctgacgagttccagctctttgttgctcaggttcaaatggtgaaagacgatgacccctcctggaagcccacttttatcgtgaaacctgatggtggttgtcagggtgatggaatctacctcattaaagaccccagtgacatccgcctggcagggaccctccagagcaggccagcggtggtccaggagtacatctgcaaacctctccttatcgacaagctcaagtttgatattcgtctgtatgtcttactcaagtccttagaccccttagagatttatatagccaaagacggactctctaggttttgtaccgagccatatcaggagcccacccccaaaaacctgcaccgcatctttatgcacttaaccaactattcactgaacatccacagcggcaacttcatccactcggacagtgctagcactggcagcaaaaggactttttccagcatcctttgtagactgtcttccaaaggcgttgacatcaagaaggtctggtctgacatcatctccgtggtgattaagacggtcatcgcgctgactccagagctcaaagtcttctaccagtcagacatccccacggggaggccgggccccacgtgcttccaggtaaccattgccagttcccagcctgcgtttccagccttgaccggcctcaagagggctctctggcttcgtgtaggatgagtgatcggggtgggatggccagaggaggggacagtgttggtggtgctgtgggcttgggtgttaaacctgggcccaacttccaagctttctgtttgctccctgtgtgatttggggcaagctacttcccctctgttacctgtaaaatgaaatgaagaatacctatcttaaaaggttcttgtaagaattaaatgagataacacatgt

SEQ ID NO: 31625 - DNA, 5772 bp, Homo Sapiens
gaggttactggtggtggcggcggcggcggcggcccgggctccggctgtcggggaagctgctgagctgtgatggtgatgacgaggtgaaaatggcggatctttcgaaatacaatcccggcccctgacataccagaggcggcggcgacggcgacgtcgccaccccggctcccttctcggtccccgggtaccctggagcgctccagtttggacaaactgggaaaggaagctgctggccagagctatcgtgcacgggcaaaacaagccccgccggggctcgggattgcccaggaccttctggagcccctacctcggagcccgagggaggagaaagcggcagccgctggagtgcctgatcaactttctagcgggagaacgatcatggaggtggtgccagctgaggtgagtagtttgcttccagaggaaataatggacactggtataactttagtggatgatgatagtattgaggctgttattgtttcatccccaattcccatggagacagaactggaagaaattgtcaacataaattctactggtgactctacagccacgcccatttccacggaaccaatcacagtgtacagtaaccacactaaccaagttgcagtgaataccacaattactaaagcagattctaataccacagtgaaaccagcttttccaagtggccttcaaaaacttggtgctcagactcctgtgactatatcagccaatcagattattttaaacaaagtatcacagacatctgatcttaaacttggcaatcagacccttaaaccagatggacagaagttaattttaacaactttgggcaagtctggttcaccaattgttttagcactaccccatagccaactaccccaggctcagaaagttacaactcaggcccagtcaggagatgctaagttaccaccgcagcaaattaaagtagttaccattggagggaggccagaggtgaaacctgtcattggtgtctcagcattgaccccaggaagtcaactgattaatactacaactcagccctctgtgttacagacccaacagttaaaaacagtacagattgctaagaagcctcgaacgccaacctctggtccagtaatcacgaagctgatctttgcaaaaccaattaatagtaaagcagttacaggacagacaactcaagtttcaccaccagtcattgcaggtagggttctttcacagtctactcccggaactccatcaaagaccataacaatatctgaaagtggtgttattggatcaactttaaattctacaacacagacaccaaataaaatagccatctcacctttgaaatcgccaaataaggcagtgaaatcaactgtgcagaccatcactgttggaggagtgagcacatcacagtttaagacaattattcctctggcaactgctcccaatgtccagcagattcaagtgcctggaagcaagtttcattatgtccgacttgttactgccacatcagccagtagctcaacccagccagttagtcagaatcccagtacaaacactcagcctcttcagcaagcaaagccagtggttgttaatacaaccccagtgcggatgtcagttccaattgtctcagctcaggctgtcaaacaagttgttccaaaaccaatcaatccaacttcacaaatagtaactactagccagccacagcaacggcttatcatgcccgccacaccactgccacagatccagcccaacctcactaacctgccaccaggcactgtcctggcaccagctccgggaacagggaatgtgggttatgcagtgcttccagctcagtatgttactcagctacagcagtcttcatatgtatcaatagcaagcaactctacctttactggaacatctggtatccagacccaggcacggcttccattcaatggcataatcccatcagagtcggccagtcggccccgaaagccctgtaattgtacaaaatcactgtgtttgaaattgtattgtgattgctttgcaaatggtgaattttgcaacaactgcaattgtactaattgttacaacaatttggaacatgaaaatgaaaggcaaaaagcaataaaggcatgccttgacagaaatccagaagcctttaagcctaagatagggaaaggaaaggagggagaatctgatcgacgtcatagcaaagggtgtaattgcaaacgatcaggatgtcttaaaaactactgtgaatgctatgaggcaaaaataatgtgttcctcaatatgcaaatgtattggctgtaagaattttgaagaaagcccggaaaggaagacattgatgcatttggcagatgcagctgaagtaagggtacagcaacaaacagcagccaagacgaagttatcctctcaaatttcagacttgcttactaggccaacaccagctttaaatagtggaggcggaaaattgccatttacatttgtaactaaggaagtagctgaagccacatgtaattgcctccttgcccaggcagagcaggcagacaagaagggaaaatcaaaggcagcagcggaacggatgatacttgaggaattcggacgatgtttgatgagtgtcatcaactctgcaggaaaggcaaaaagtgccccttgtgccatgaattgctaactcttgcacaaaagactgataaatggaactgtacagaaaatttaaggtgcagggacacttgattttctggaagaaaaacaattactgtattttaattcagtccttgttttaaaagacctgaaattataatactgaaggagaagaaattttaaatgaggaaattagtacattttaaatcttagttaaatctgcttatgccccttctaaattgaatttttctttattatatagattttttaatttgcttgggtttcttaagaattagatgttctctttctgatacctttgacaaaaaatgtttataaattcatataatttataatgtatggtgttgtatgactttgttaatagaaaagccaaagcagcagtggttagcacccattctttgggacttgatctagaatatctgcagacagaatgttacataaacaaattcttatgaaacacattcaaatgacattttgtatttagaaaaggactatcttttaaagaaaaagcagccttttagggccgattctggaataatatcctgttgtcactttgggaatgtcagaaggggaaacaatccccaggcacactaaaaattttttaaagttatttaaaaaaacatataaaatattaaaggacagtaaatctcagaggatgggcaatgtgtttctataataaggaaaggctaacagatgctctgggctgtctccattttctttcaaagaggtggtatgtatttgaagtaataaattgtcaaagtgattactgggtactattaaaatgataggtggatataaatggaagtaaacattatgtagtgataatatagaacctcacatagtaatcaagtataaaatttggcatgggtggagaaacaaagaatagggaagctgcaaaagatgaatttagagaagttttcatctatacaatcaattatttttacagacttttttttttttttttgagacggagtctcgctgtgtagcccaggctggagtgcaatggtgagatctcagctcactgcaacgcctctgcctcccaggttcaagcgattctcctgcctcagcctcccgtgtagctgggactacaggtgcatgccaccatgcccggctcattttttgtatttttagtagagacggggtttcaccgtgttagccaggatggtctcgatctcctgacctcgtgattcgcccgcctcggcctcccaaagtgctgggattacaggcataagccgccgtgccaggccctttttatagacttttgaactaagaggtttcaaaccaaatcgcaactcttacttgatttacagaaatgggcctcctaacaaaattttcaaaattgtggtgggatttctttttataagggaagtttaatatggcattattttcagccagtgatttgggaggtctgttttcctataattactaaaataacctaaatcattttcagtattcaaaaactctatgaatttaagagcctgttgtgacaggactcttgattttatgacaagaaaaaaccatgttggaattcaggcattttgttaggtaccttaatcatcagtaattagtatatgattatttcatttcctacaaggactctatagttgtatgtattaagtgtgtatatatgttcatatgaacatgcaagatataggcaatagaaattaagtaatccaaaagaggattccgttattcactaaagtatcttccttttaaatttggatttataaaatcatagtgcagtaactttaaatgtagatagttcaaacattcttagcacctcaatctagtatgtttaattaaaatttgtataaatgtaaattagtgtaagagggtaaaataataatcaagttatttttcaaaagattgcaataagtttttggtctaaacttaaactttgttcattttgtacatactctgtgttaattctaattgcacctttgtgatgtgtatttatatacagtgtgcagaaaatgttcgtgaaattttgattacaattgtagattatgtatgatggcattgcttacgaatgttttgcttgtaaaaaaatttcaaggtgcaatcaaatgctactagtttttctgattttcaaaaatctatctatctaaaatattaagccttttccttcctgtgtagtacttactaaataactttttgtattcaggcatttgcatcaaattgctgaacaagatgaatagccacattaattcaatgattttaaaagactatttggggagggttgggtatataattttttagctctatttacatcccaaagtagaaagattaaatttatatttactagagctattcaaagaatacacttttctatattgtaaaaacaggacagcaaagtaaatcatacagaaaataaacatttatactattctgtaaaaaaggttttgcattttttctttagtataataacaccactttattaaccatttaatatgcaaaaaaccttttaaattatctgaagtaaatttgacattacttctgaaaacacacaactaaaaaattctatcattttgctcagttattactaacataaattgctttgaaatgagaatatgtcttctctttttttccccactgtttcttttaagagcagaaactcagccgggcatggtggctcacgcctgtaattccagcactttgggaggtcaaggcgggtgaatcacttgagtccaggagttctagaccagcccaggctacatggtgaaaccctgtctctactaaaaatataaaaaaattaactgcgtgtggtggcgcacacctgcagtcctcgctactttgaaggcctgagcctgcagaggttgaggctgtagtgagtcaaaattacaccactgcactccagcctggcaatcagagtgagaccttgtctcaaaaacaaaaatacctagaaaatcaatctactctgtcttttaatgtgaaatgttcttatgatagctatctttcttagtttcctttttttctgaagcactaaacacaacctgtaggtcttatctctggggtctgggaaacagaaccttaatgttacaggtacaaaagcaaacagagtgattagttccccattttctggtagtgaacaactgacatttttttcaatcttatgtaaaatgtgaataaaaataattttaaaaaaaaaaaaaaaaaa

SEQ ID NO: 31626 - DNA, 2725 bp, Homo Sapiens
ttgaaatgattgccaaggaagaactagaatctgtgttagaggaagaggttgatgatttcccaacttttggagactcccagagtgactatgatacggtagtccatcctttctacgcttattggcagagtttctgcactcaaaagaattttgcatggaaggaagaatatgatacacgacaggcttcaaaccgctgggaaaaacgagccatggaaaaagaaaacaaaaagattcgggacaaagcaaggaaagagaagaatgagcttgtccgtcagctggtagctttcattcgtaaaagggataaaagagtgcaggcgcatcgaaaacttgtggaagaacagaatgcagagaaggcgaggaaagccgaagagatgaggcggcagcagaagctaaagcaggccaaactggtggagcagtacagagaacagagctggatgactatggccaatttggagaaagagctccaggagatggaggcacggtacgagaaggagtttggagatggatcggatgaaaatgaaatggaagaacatgaactcaaagatgaggaggatggtaaagacagtgatgaggccgaggacgctgagctctatgatgacctttactgcccagcatgtgacaaatcgttcaagacagaaaaggccatgaagaatcacgagaagtcaaagaagcatcgggaaatggtggccttgctaaaacaacagctggaggaggaagaagaaaatttttcaagacctcaaattgatgaaaatccattagatgacaattctgaggaagaaatggaagatgcaccaaaacaaaagctttctaaaaaacagaagaaaaagaaacagaaaccagcacaggatgtacctggcaaagattcatatctgcctgcagctcactttcagatggcttggggaaaaaagtgtgtgttgggagagagaagagatggagagagcgagcacaaatgtgccaaaatgttgcttgaaaacagacagaattatgatgacaatttcaatgtaaatggacctggagaaggagtaaaggttgatccagaagatactaacttaaatcaagacagtgccaaagaattggaagatagtccccaggaaaatgtcagtgtcacagagatcattaaaccatgtgatgatccaaaaagtgaagctaaaagtgttcctaaacccaaaggaaagaaaaccaaagatatgaaaaaacctgtcagagtacctgctgaaccacaaacaatgagtgttcttatcagctgtacaacctgccatagtgaatttccatctcggaataaactttttgaccatctaaaggccacaggtcatgcaagagcaccttcatcatcgtctttaaacagcgcaacaagtagtcaaagcaagaaagagaaacgtaaaaacagatagagattctgcctgtgcttttgtttgactgtctctagattttgaaaccaaaaaactgaactgaaatcatctaaagagttaaaatttcagtgatctgcaattaattacattgtggaagattattttttatcttgtaaaaacacttttttggtttaatatatatttttaaaacatttcactagtgattgaattctacttttgccatctgaattgacttgaatgtcttaaaacaggtaaatactgtaaagtgtgtattcttgatgtttattggctcatgtggacagaaatgtacagggagaattacattattttaacacacagaagtgcaactttctgctttattttctgaatttcacattacttttacttaatgcttttgtgttttgttaatacttcataatatgtgaaaaactcggatcttttaaaaagcatcatagatcatttttccatatgacactggttccgattttaaaaattatttttaaataaccgattattgattactgtattttttttctcaagaacagtgataggtagaaactaattgaacatttggtagtctttcaagaatagtgtctcttcaaggtttcacttgatttaatttgatattttactggtttaccagtaaggtgtattgttcagttttttgctccgatttgaattgtggaggtggaagcaaattagtttacatggcatgtcctccctaggcacagtgacagctgtaaagtatgacggaacaaggtagcagatggtacagaatttatactatttaagaagagatgtggtgttcttcattgagtttttttcttcactattttcagaagtttttgttctttttttttttccatcactcagtggagaaaagctttgttaatgaaagattttgtgatagagctgatgcttatacatctattctataacagtgatgaatattaacacaaaggaaatatggagaactgttataactgagtgttagaacagtcgtgtacattgatcagtattgagtccatttttaggatggattagtcagttcttttcattggtcttgaaagtaattttggctggtcgcggtggctcacgcctgtaatcccagcactttgggaggccgaggcgggcggatcacgaggtcaggagatcgagaccatcccggctaaaacggtgaaaccccgtctctactaaaaatacaaaaaattagccgggcgtagtggcgggcgcctgtagtcccagctacttgggaggctgaggcaggagaatggcgtgaacccgggaggcggagcttgcagtgagccgagatcccgccactgcactccagcctgggcgacagagcgagactccgtctc

SEQ ID NO: 31627 - DNA, 2425 bp, Homo Sapiens
aggactgcgttctggaggccgagccggaacccgtgcggcggcgctgggaagagactgtgcccctgcagctcccctgtcaccggctccaaggagcgtcgggctccccccgcccagccctgcagcacccatccggcaacgccagactcggcgcaacgggggcagctgcgactttaaatctctcagatccgcggcctgagggctgccgccaccgagaaatggaggcacagagctgtgaacaagagaccacggctcgccgaaatggcggtgccaggagcctgaaagggaatgcagccggcggggttgtcaaggacaacatttgttttggcgcaaccagcggtgccgtcaccaagaaaccgtcgactctgagaaaaaaagagaagttcggctaccgagaaactccgtgcagcaagtgctgtgacagcaaaaccgccggcttcgcgccgctggcgaaagagccaacggaaacgccgggtgctgcgaccgcgaagccggcactagagggcctcggatggagaaagccccgcaccgagacgaggaaactgtgcacagcacgactagcagttgacacaaacagaaaagtgtctcgtctgctctctgggagaaagcgtggatcaaaaccagcaactcagtggagagaaccccgcagccactgaagaagttgcccacgtggcggtggggccagagaaacaccgcgatttcgacgacagccgtagggataccacagagaaacatgcgcggccacagaagtacatccagctccgcgcaatcagtggttctgcgatccagaaaccgccagctgggctagactagaaacttctaaaaaactgtcgtcccatagcagctttcctaaccacgacagacagtcgcctttagggagcacctaacggtgctgagaccggcctgggccagcaaaagcgcagagcggtgccagtgccaagaaacgcccgacttggtgaaaccaaccttgtgaccaccgattccactggcttcgcaggacgcaacgggcgaaggcgcggcggagaaaccgcaggctcccttcaccgattatgctgcgagctggggatggtggggggcacccgcgaaattgtgaaaccagcggcgctgggacccagcgatcagctgcccgtagcaaatgtctgtgcagttgcaaaagataatttttggccgtgagaaggttgccgccagagagcgtccgataacgctgacaaaggcgtggcgttgccagtgagaaacagccggcgctgggaaaggaacggtgcagcgaccgaccaactgcgcgctcggtgccaccaaagtgctactggctctacccactctgtcccccacgggcttagggaagtctgatgtctttttcttttcttttttcctctgtcgcctaggctggtgcagtggtgtcatcttggctcagtgcagcctcgacttcctgggatccagcgatcctcccgcttcagcctctagagtagccgagaccacaggtcacccctcgctgccaggctctcttcccggtccagagcccacaggatcctacaggaggggccaacaactgcttgcctttgaaacttgaaactctcggtctaaggttccttaggagcgtaaaaggcacagcgttttctgatcgcagcttcaggcctcccgcccctgtcccggtacctctcctgcaggacggaactctgtgggaaccgctcgttgattctgatggttaactgtcagatatccttgatattggacataggatttggaagagggcaggagagaaaaatgaactgcaagactccagcacaagaggtgggattgctggcagatgtctgctccctctccaaacctaatgaacatctcaaagtgccatccactttcctatacccttgatctgtgaaatggatcactgacgctttctctgtctttccggaaatgcaaaacaggtgaattttcaagcgcttgaattgtctctcacacttttcagtcaagagtggggctataaactccttcctcataggaaataaggaactgccactgcttggaagtaaaacgtatttttcccataagctttcacatttcccaaaaaaaaattatacatccagatgtaatccccctaagaggcttacagaccctaccaggagcgttcccacgcgaacgcatcatctcccaatcggatcctgaaaacaccatgcaaccaattccatccttttctggatcaacctgggcagaggacaggtgcagaggagcccagagaagggccttgacaagtcaggagacccaatttggggtcgcaattgtcactcactccccaggcgtttgctttgatcttcccctcccaccatactacttcttctgctacctggtttctccctggtatttgaggatcctccaattgccttctggtcttacagacgggagaataaaggaaaaatggcatcgtttccacctt

SEQ ID NO: 31628 - DNA, 3258 bp, Homo Sapiens
agcggcttggggtagcggcggcggcggcggcggctgcggctcgggagcgcggctgctttgagggctcgggaaccttacagagtggggacgtggggaggctagagggtgagaaagctggcgggagagtagggcggcgctggaggagggcggtgcgtggctgactcatcctctggaagatcagactgacagagacacacactagcccgccccgcccgcccgcgccgctcctcctcagcagggaggcgcccgcccgcaccgaccgcccgccctctccgggcgctgtccgggcccggccgtctcagagaaagtttttcccatcggaggggcgggagccgccgcgggccttttggaaaggaagtggggacggaacaggaggcgagagccgcgcgggcccgcggagtgcatggtgcccggcgcctcggctgcctggcaggaggacctcggggcggggtcgagctgagcccagctccttctcgcctcagccgcgccagaaaccgccttcccggacggccgcgggggtcccagctcctcagctcgccatgtcccggctgctgcggctgctgaggagccggaccgcgcgcagcctgaggccgggcccggccgccgccgccgcgccccgcccgccgtcctggtgctgctgcgggcgggggctgctggcgctcgcgccccccggcggcttgccgggcggccccaggcggctgggcacgcaccccaagaaggagcccatggaggcgctgaacacggcgcagggcgcgcgcgacttcatctacagcctgcactccacggagaggagctgcctgctcaaagagctgcaccgcttcgagtctgttgccattgcccaagaaaaattggaagctccaccacccaccccaggacagctgagatatgtattcatccacaatgcgatacctttcatagggtttggctttttggataatgcaattatgattgttgctggaacccatattgaaatgtctattggaattattttgggaatttcaactatggcagctgctgctttgggaaatcttgtgtcagatctagctggacttggacttgcaggctacgttgaagcattggcttccaggttaggcctgtcaattcctgatctcacaccaaagcaagttgacatgtggcaaacacgtcttagtacacatttgggcaaagctgttggggtgactattggctgcattctaggaatgtttcctttaattttctttggaggaggtgaagaagatgaaaaactggaaacgaaaagttaatcctcttagaatacctataaaaagatgtaaactaatgtacctcagtaattaaatatgctgtcacaacatttaggaattaagacagtaacagtatagatatgggatcaaataatttagcatgtattatggaaaacactaacttattgtggcttgatcttcttaggacatcttttttaaaaagctgtttagtatcattttgtgtatattgttgaaatgctttttcatcaatagcagtcaacattttatcctttctttttatattcataatgttatttaagtgtcattgatgtactgtattgacttggggtttgcttatttgttacttaacatgtgtacatgcatgaaagcatttttcgttgttccctgatagttacatttcaaccttgggatttttccaaattacttaagatgtttaatgtcagttaaagatttttttaccctctttttgggaacatcaattttgtactgttatgcagtaaacatttataataatataatttcagtcatttcttaactgtcacatctattgaaaatggatatagatacaggttttaagtattttaagtatatattacttattttaattttctgactttactattttaagggccagagggttaatcacaaagagcaattatgtggtctccctgctacatgaaaccgtgtatactaacaagcgtacaatttttagttgattttttttaaccttttagtttcccagttttgaataattacatggtggattctgacttttgaggggaagcaaatgattattttagagtctttgaaatggggattgtggaattagattgaactaagggatttaacatgatgcttggaaattaagagactaaagctttttttaaaaaaaggtggaaaataggaactgtcaagaaggtttatggtataaatgatgaagttgaagtgatgtttgaaagattaatgagatacaatttatattatttggtaaggtttttttttttccctccaaagatgtcatcttctcatctgaatggaataagtctgaataccccatattcatactcctaatctcattatatcttatttagtgaattttatttatgaataatttctgttgaagtgaaaactagatatttaatattttgcttttttgctacatagtctactcaaaaattacatgaggagaaatcctttttccctttgtttttcttttttcttcttttgtggtatttaaagcatattttaggttgaagttacttatttctagtcttgtacttctggcttaagtataaccatgtaagaattataaattttagttttctgaacccttaaacttttttagcatgtggtctgttacacatgctaaaaaattagtcttacttgtaacagcgtaattaaacacatcatggaggagagaaacttaaaatagtattttggcttttgaagttatttgtgttgctaaatagatgcagaggttttacagcagtttattttaaggttttatttatacataattactttgaactcttcagagtagatattttttcacaaggcagtttgtcataaattctctcatgcgcttcagaatgcataagtgccatcctttaatcatagactttgaggagagaaagcataaaaatatagcatataatctaaaaataaatatataacatgcacaaataatgtgacattcttactgaatcaaatcatgattctagaacttgagatcttaaatagaatttcggtttgtatcttccatataataaccacacacagataaccacacaaaaaatcctttgtaaaatttctgattgataggattagagtgcttaaatttttggggggggaagggtggggtaaagtgtaagtgctttcttttgtccctaacttgtgtattgatggcagtccactctgttttctaaaaatgtattttactgtggtgcttaacttcttattaattaaatcccgtatcagaaaccttgaaaaaaaaaaaaaaaagaaaaaaaaaaaaaaa

SEQ ID NO: 31629 - DNA, 3013 bp, Homo Sapiens
cattgccctctgccccgcagcctgcccgttcccaggccagcgagggcgctcccaggccggtctgcagccagaacacagcccgttccatgtgcttgtcctcgggacacattaggaatgaacccaggcctcagtcctggcctcctcctcaaggctgggtgctcagacgtccccctcagcccctttctctagaccttccggctgaacaaacgagaacatctcacagccctgcaacagccaggagctgctcgtggagctccacgcccggctggagagagaggaggcaccctgggcagcccgccagcacccaggctctcacagtggaagcccacgtcttcttgggctctattttgaaagctgttctttccacgacggctttgacaagaatcgatttgagtgagccggcgtgtcaatacaggccagcacaggactggcctcagggccacattggggagggtggcgaccaggccctggctgcagcccacgtgggcaaaagcatggccaggcaggaggtggggcctgtgagcttggctacagcgaccgtgggcgctgggcccggggctcctcagccctgaggggagacccaggcccaggcaggctcccaggcgggctcccgggctcccagccttccgatcttctccctttgagaccttgccttctgcacagtgacaggaaagagccctgagtcccactttgcagggatgtattgcatttccagaaagttccttccgggtgcagagtgatacatgaaccctggggactcactccaacttggtattgattttctccacggaggacccagcagtcacggcccgtgtctgcacagccccttggatcctgcggaggaattcagccggcccctccccctgtgccgaaaaccacggaggcaaagccaggccagggtacagtgagaacacgggagaggactgagagaccgctggctgccgagggaggaagagcaggattcgcacccccgtcatcgctgggcccacacgccgccgacagcttccgcgtgtggccatctgtctttcagaaactctctggcagagggacccagcagatgacacgggggccgttcacactctgaaacctgcctggagtcaaaacactgctggcgagcctccaccgcaaacccaatccagatggtcttccctggtggccctcggggtggcgggcaccctgcccactccctgccagcccctgcccgctggactccaggcccggtcgagcccccgaccggtctcctgacccagcatgctgctctcccctgggcccggcttcctcgcccgctgggactcccaggcccctccagcccagccccgagagcaggagccccaagggaggcttggcggctgtggaggcgagtgggccacgtgtagctgggaggccggcaggaccaggagcccctcacagcgcagcacccacagcatcacgagccacttccactcctgggtggcctgggggcccccaccctgctctgagctgccccttgttgtgacctggggtcccccgtggtgggcccgccccttgagcctgggatccagcctcagcgaggctccagaagtgtcgtctccgccggccaggcgtcagcgcctccacccaggatcacacactcctatctctgcacttctgccctccatcctgctccacgccgcctctgcttgttattccagcacattccagggtgatgcctgctgaagccacgcagccagtgcctccaccctaccccccatctgacccaccggccccttccgcacgctggaagcctgcccggcctgaagtgtcctcacctgtcgccctatcctcccctccactccagcccaccggtgactcagccctcacagctctctcctccccgagggagccggtgacttggctctgatggtgccgggacccagccccggcatgttcagaatccttgtcctttaacctgcgtccacatgtagtcgcctccacctccctgcctgaacctccaggccctgcagagcaaacactgctgcctgcaggagacccctggggccttctccgtcccctcatcctcctaaggagcctcccctgccaccgtgccagaatgtgccggaggaacagaggcccgagcctcccgtggccccagcgaggcttcctctggggaagacagtgagcccaacgccctggctctcgaggggtggacggagtccagctggcatcaaccgggtgcccctcttcaccggtgtccacagtccttgagagcaaagggttcccagaggcgacctccctcctgcacaggcatttgtcatccttaccctctaggacagctttgccatgtgcagtgaacccctggacagtgttgcgtgccactttgccggatttggactgtatacagaccgaagcatgtggcatgaagccttctgctgtcagcaagttccttgtccctcgacagtatgtgcccaggctgcccttcaaggtggcagtgatggcagttgtctcttgcacgctgcgtacagttctgtcactgactcttacacacagccctggagacgggagagtgccgggagcattctatgcaagtgtcctggcctttgcgggcgtctccacagcacaaacacgagtcagggaccacccctcttctgcttccatgattccaccaactgggtggggcagagcagtgccagggccggaggcacgccccaggtgagggcaggtggccatgccagtgagtgcactgcgttctcagttaattcatccgaaatatttctaagtttcttgattattgcagttgcatccccaagataatgccgccctcaccaagtagaaggcacatgtgctctgatggcccctcccacactggggtcagggcacagcaacttagcgaggcgacgtgggggctcagaggacctcggaccaggctcggcacatggggcttctccagccagccagggggaagcaccctgcagactgctaacttttgcaaaatagagtaaaaaagatcagctagaaaaataaaacaaaaaaggaaagatatacaaaatacaaggcc

SEQ ID NO: 31630 - DNA, 3183 bp, Homo Sapiens
agtcaccagcggaaccctctccaccaggctccgcgtcgaggccctacggggcgtcaatacgcacgcgtactttgtgtcccaggtactctgcatttccaggacctggtcactattcaggacacggttccagcgcagtgcgcgttagccatgtctcagctccagactgagaggacgcagcatagaaaatgcttatgagtggttcagactcagtaatgggatgagtgacattccaagatgtggccattgacttctccaaggaagagtggggattcctgaaccctgctcagagagatttgtacacaactgtgatgctggagaattatcagaacctggtctggctgggactttccatttctaaatctgtgatttcactgttggagaaaaggaaactgccttggataatggcaaaagaagagataagaggcccattgccaggatatttcaaggtgtcagagatgaccatctcccaggagccaaaggcaaagactagaactctctttggaaaagatgtgccaggtgcagagattagggagttatctgcaaagagggctattaatgaagtattatcgcagtttgacacagtgataaaatgtacaagaaacgtatgtaaggaatgtggaaatctatactgccacaatatgcagcttactctccataagagaaatcatacacaaaagaaatgcaatcagtgtttagattgtgggaaatacttcactcgtcaatcaactctcattcagcatcaaagaatccacacgggagagagaccctataaatgtaacgaatgtattaaaaccttcaaccagagggcacaccttacctagcatgagagaattcacaccggtgagaaaccttacaaatgtaaggaatgcaggaaaaccttcagccagatgactcatctcacacagcatcagactacacatacgagagaaaagttccatgaatgcagtgaatgtggaaaggccttcagccgtgtctcagctcttatagatcaccagcgaattcatagtggagaaaagccgtatgaatgtaaggagtgtggaagagccttcactcaaagtgcccagctcattagacatcagaaaactcattctggagaaaaaccctatgagtgtagtaagtgtaagaaatcttttgtgcacctgtcttccctgattgaacattggagaattcacactggagaaaaaccatatcaatgtaaggactgcaaaaagaccttttgtcgtgtgatgcagttcactctgcacaggagaattcatactggtgaaaaaccctatgaatgcaaggaatttggaaagtccttcagcgcccattcttctcttgttactcataagagaacacacagtggagaaaaaccgtataaatgcaaggaatgtggaaaagccttcagtgcgcactcttcccttgttactcataagagaacacacagtggagagaaaccctatacatgccatgcctgtgggaaggcctttaatacttcctccacactttgtcaacataatagaattcatactggtgaaaaaccctttcagtgcagtcaatgcgggaagtcctttagctgcagctctcaccttactcgacactgtagaatgtgtaatggaaaatttagcaaataaccaaaactcaaaatgttaattctgattattctgtatcatcaccagtactttgtactttgagtctttttaaatatgctctgttagtttgtatggaatgatatttcattgcacttttaatttaacttaaaaatgccttcccttgactgttgatatgtattttttgtgaagtgtgtgttgaagccttgcagattattttttaaattagaggtttatcactaggtatatctcctaatgctatccctcccccctccccctaatgtaaatgacgagttaatggtgcagcacaccaacatggcacatgtatacatatgtaacaaacctgcacgttgtgcacatggtaccctaaaacttaaagtataattaaaaaaaaaaaaattagaggtttttcttcgggtgcatttatgagagttcaccagattttggaaatattttctattctgtaacctaccttttcatttacataacagtgataaaagctttaagtttgatcacatccaattaatcacattttttaatagttatgcttttatttgtttttcagacagggtcttactctgtcacccaggctggagtgcagtggcacaatcatggctcactgcagtctctgcctcccaggctcaagtgatcctcccacctcagcctctcaagtagctgggactacaggcatgtgccaccacacctaatttctatattttttgtagagactaggtttcaccatgttgtccaggcttgtcttgacctcctgggctcaggcagtccatctgcctcagcctcccaaagtgctgggactacagacatgagccattgtgcctgacctagttctgctttttatgttctaagaagtattatttattctatgctgagcttacatagaatttcttccatgttttctatagctatagtgtatttttaccttttactgttagatctatttcatgtttttattatggataatggaggaggtaaaggttgaattatattttcccccatattattgacccatagtgacaccagttttgggagatgtctttcattttcgcccttacgttgttattggcaccttttgcaaaaatcaattatttatcatgagtatacttctgaaatgatctgtttcatcaatctatttgtcttctcagtagttccacattgtcttaattatagctttagaggaagtcttgaaatttggtagtaagtcttccagttttgttattttaacaaatttctctaggctgggcatggtggctcatgcctataatcccagcactttaggagccccagacaggaggatcacttaagcgcagaagatcaagaccagcctgggaaatatagcaagaccttatctctacaaaaaaatttagaaattagctgggcatggtggcacccatctgtagtcctaactgctcaggaggctgaggtggggggattgcttgagtccaggagttcaaggctgcagtgagttgtgatcacaccattgcagtccagccaggttgacagaatgagaccctgtctcttaaaaaaaaaaaaaaaaatcctggtgatgcttttctggattaaaaaaaaaaaaaaaaaa

SEQ ID NO: 31631 - DNA, 4479 bp, Homo Sapiens
cttccccctcggggtggaaacaaagggggttcggcgcgcggtgcggagcctgggggaaaagggaggagcgctccggtggtctggcgcgctgggctcgctagatatctcccggggccaattcagcatctctacctggccatcctaacaaggtgatttgtgaaagggtgagacttcagagcctgttccctctcctcccaagtgatcagaacactaccgttcaagaggatgctcacttcaaagctttcttccagagtgaagatagtccaagtcctaagagacagcgcctctctcattcagtctttgattatacatcagcatcaccagctccctcaccaccaatgcgaccatgggagatgacatcaaataggcagcccccttcagttcgaccaagccaacatcacttctcaggggaacgatgcaacacacctgcacgcaacagaagaagtcctcctgtcaggcgccagagaggaagaagggatcgtctgtctcgacataattccattagtcaagatgaaaactatcaccatctcccttacgcacagcagcaagcaatagaggagcctcgagccttccaccctccgaatgtatctccccgtctgctacatcctgctgctcatccaccccagcagaatgcagtcatggttgacatacatgatcagctccatcaaggaacagtccctgtttcttacacagtaacaacagtggcaccacatgggattccactctgcacaggccagcacatccctgcttgtagtacacagcaggtcccaggatgctctgtggttttcagtggacagcacctccctgtctgtagtgtgcctcctccaatgcttcaggcatgttcagttcagcacttaccagtaccatatgctgcattcccaccccttatttctagtgatccatttcttatacatcctcctcacctttctccccatcatcctcctcatttgccaccaccaggccagtttgtccctttccaaacacagcaatcacgatcgcctctgcaaaggatagaaaatgaagtggaactcttaggagaacatcttccagtaggaggttttacttaccctccatcagcccaccccccaacattacctccatcagctcccttgcagttcttaacacatgatcctttgcatcaggaggtgtcctttggagtaccttatcctccatttatgcctcggaggcttacaggacgtagtagataccgatcccagcagccaataccacctcccccttatcatcccagcttactgccatatgtgttatcaatgcttccagtgccacctgcagtgggcccaactttcagctttgaattagatgtagaagatggagaagtagaaaattacgaggccctgttaaacctggcagagcgactgggagaggcaaagcctcgtggactgactaaagcagatattgaacaacttccttcttatcggttcaatcctaacaaccaccagtcagaacagactttgtgtgtagtatgcatgtgtgattttgagtcaaggcagctacttagagtcttaccctgtaaccacgagttccatgccaagtgtgttgacaaatggcttaaggcaaatcgtacttgcccaatttgccgagctgatgcttcagaagtgcatcgggattcagaatgaccaacctaagaagcacaaatttagtttgggtgttcctcatcacatgtatatacggactatccattgaacttaatctgtgtggcttccagccctccctttaccaaaagggtcaatggacctttctttgcactgtgtgacttaatcaactataaaagcttacaattagtcttcacagttatgggattgttatactaaccgtgtgattggaactccaaagactttttctttagcttaattttgtgtgtgcactaacattccctggtttttgtgtgatcattccgagtgttgctgcaagattacagtggacgtgatcttttagcatgtgcttttataaaaagtggtagctacagatgatatagcaatctaccttatatagagccttcagaaactgtgagtggaaatgaatgcgcagcgtatgactgttggtgataagtgtatctgtgtgagtgtgtgcaactacttgtgtgagggcatggtagctaacgtgtgtatgagatcctatataccagcatgtaccaagaatgtgtgtgtagttttaattatgctgcaatgtataatctggtgtgttatttaaacagcactagtactgtacactggtttttttcccttgtgtttgctgttgcacactgattgctgagggtgcatcaattacaagcattgaatactccatccccttccctcccagtgaatggaatgagaaaagccttcttcctttgcttcaggcagctgtcaccttctctttattggtggtcctaagtgggtcacttaagaaaaaaaagtgtaacaaattctcgctccatgaacctggtttttttttattctgttgtggaaatttttaaatctccaacttgctgtttccaaaaagaaggtgcaatatcatatatcatcagttagcaatattagcatttcaatcagtgatttgaatgttgatacttttttttcctttacatttccagtaagtttcttacagaaagtacctgtgattttttttaatgtttagatttgtagtctagtctattctgaagatatttgattaatatatttctaagaagaccactagtcccatgaagtctcaccttgttgacttccaccagaacaaaacctgttaattcagcttgacttctcatatgtgttctgtgttcaagctcctgtgggcaactcaattgttttaagaaaactctatttctgttcatattaattcacttgccagactccaattctgaaagttgtctagttcttccttcatcacacgtgcttctcatcgaaaccctggtttcaggatggatcaagtgctgttacagctcatgttccttagacctgatttgttttgatattttactgcctttccttttaatttttgtttgaatgagaaaagtttaatacaacaggtgtccagaatacttgcagtataaatgaagatttggtttttgtataaaaaaataatgctgttaaacaggagttgaccttcatttagttgatgtaatacatagctgtatggggttttttttagtaagttctttgagcataattcactttaaagtcatttttccagcaatgtttaaattactttctcattcttttagtgtattcaacattgtctgcctcttcctgcagttgatgtaattgctttgtttgcaatagcacaagctgcattattccagtcaggactgtgataacttgctgccagccccactcaactttcagttggctctgtgtcagttttccattcagtgttaactacttgttactgccatgctgcttgccctcccttgaagtgtctataagctcatcacagcctagagttaagtaaagtcaattcacagaagcacaattttgccctttgcgagacattgttgcctctatctagtcctacaagtagggttttgcatactgtgtttgcccctagggttgtcagtgcatcagaaatacttctaaatagtggtaaaaatgcacatggttaatgcacatgttacttttaaatcattaggatatccctcacctgttcctgatgaataaaaagtgtgttaaagaccaaaattcttggcataataatcagctacatacaaatcacatatagtttaatcttttttaatgaaaaaaaatcatgtttaaaatggcaaaagcccatcttatacacttttatatagctgcaaaaaaatcttaactcagctgtgggttttttgtgggttcttgtttgttttttggcatgaattgtcatctttggtgtttttttaacccccagcccctcaaaaaaataaggcctccaggtatcaagatctcatattaggattttctgtccttaattttttgagcaaaatctggaaaatgtgaaagcatatttagattttatatactatctgaaatgtgatttgttaagattcttaaatttgggcctcttagaataattttgaatgagatctaccgactcacttgtgagaatatttttcacagattatctttgggccttttcattagaaagctgtttgtttgtccccctgttggtacatttggttacctcattttgccgtttcagattgtgaaagctcacaggggtgttttttggaatcatttgctgagtcattttctcaaatcatattccattgtatcagttaacatatagttttaaatgtatgtattataaatatctgtaaccaaatcatttgaaggcttgataaatttttaacaaagtttgtacattttttatgaaagttactagtaatgctttactaagtagtgcaatgaatttttatttttaatccctgtgcccaattttggagttgagagggttgttggtaataaatgtatgatgtacacttaaaacatcaaaaaaaaaaaaaaaaaa

SEQ ID NO: 31632 - DNA, 4461 bp, Homo Sapiens
gctgtgtgcgcaggcgcaagactagcgctcttgggaccggaagttaaggcgttcgcggcgtgtgaatccagggcctgaaaacccagaatgaacttgtgtccatcccagagatcactgcagatgtcatgaggtaccctttgtgtcaccagctcaagcaggcctctggccactttatcatctgtggtggtcctgtgccgtgaccaggaggaaaaattagctctttgaagagaaagtagttctctattgcaggcactggcctcttaaattgttgcaggtggggaatggatgagaatatttgttttgggtgatcagaactgagactcctattgtggattagtaacatgcctcctcctagaacaagggagggcagggatcgccgagaccaccaccgggctcccagcgaggaagaggccttggagaaatgggactggaattgtccagagacgcgtcgcctcttggaagatgccttcttccgtgaagaggattacatccgtcagggttctgaggaatgtcagaagttttggaccttctttgaacgcctgcagagattccagaatctcaagacctccaggaaggaggagaaagaccctggacagcccaagcacagcatcccagcgctggccgacctacctcgcacttacgacccacgttaccgcatcaacctctctgttcttggccctgccacgcggggctctcagggactgggcaggcacttgcccgcggagagagtggctgagttccgccgagccctgttgcactacctggactttggccagaagcaggcatttgggcgtctggccaagctgcagcgtgagcgggcagccctccccatcgcccagtatgggaaccgcatcctgcagacgctgaaggagcaccaggtggtggtagtggccggtgacaccggctgtggcaagtccactcaggtgccccagtacctgctggctgctggcttcagtcatgtggcgtgcacccagccccggcggatcgcctgcatctcactggccaagcgtgtgggctttgagagcctcagtcagtatggctcacaggtcggctaccagatccgctttgagagcacacgttcggcggccaccaagattgtattcctgacagtggggctgctcctgcgacaaatccagcgggaacccagcctgccccagtatgaggtcctgattgtggatgaagtccatgagcggcatctccacaacgatttcctcctgggcgtcctccagcgcctgttgcccacgcggcctgacctcaaggtcatcctcatgtcggccaccatcaacatctcgctcttctccagctatttcagcaatgcccctgtggtacaggtgcctgggaggctgttccccatcacggttgtgtaccagccgcaggaggcggagccgaccacgtccaagtcagagaagctggacccgcggcctttcctgagggtgctggagtccattgaccacaagtacccgcctgaggagcggggtgacctcctcgtcttcctcagcggcatggcggagatcagcgccgtgctggaggctgcccagacctatgccagccacacccagcgctgggtggtactgccactgcacagcgccctgtctgtggccgaccaggacaaggtatttgatgtggcaccccctggagtccggaaatgcatcctctccaccaacattgctgagacctcagtcaccattgacgggatccgcttcgtagtagattccggaaaggtgaaggagatgagctacgatccgcaggccaagctgcaacggctgcaggagttctggattagtcaggccagcgcagagcagcggaagggccgggcgggccgcacgggccccggagtctgcttccgcctctatgccgaatcggactatgatgccttcgccccctaccccgtcccagaaattcggagggtggccctggactcgttggtgctgcagatgaagagcatgagtgtgggggacccccgaaccttccccttcatcgagcccccaccaccagccagcctggaaaccgccatcctctacctccgggaccagggggccctggacagctcagaggccctcacacccattgggtccctgctagcccagctgcctgtggacgttgtgattgggaagatgctgatcctgggctccatgttcagcctggtggagcctgtgctcaccatcgcagccgcacttagcgtccagtcgcccttcacccgcagcgcccagagcagcccagagtgcgcggcagcacggcggccgctggagagcgaccagggtgaccccttcacgctcttcaacgtcttcaacgcctgggtgcaggtgaaatctgaacggagcagaaactctcgcaagtggtgccgccgccggggcatagaggagcatcgactgtacgaaatggccaaccttcggcgccagttcaaggagctgttggaggaccacgggctgctggctggggcccaggccgcgcaggtaggggacagctacagtcggttgcagcagcgccgggagcgccgggccctgcaccagctgaaacgccagcacgaggagggcgcggggcgcaggcgcaaggtgctgcggctgcaggaggagcaggacggcggctccagtgacgaggacagggctggcccagcccccccaggggccagtgatggcgtggacatccaggatgtgaagttcaagcttcggcatgacctggcgcagctgcaggccgctgccagctcagcccaggacctgagccgcgagcagctggctctgctgaagctggtgctgggccggggcctgtacccacagctggccgtccccgacgccttcaacagcagccgaaaggactcagaccagattttccacacgcaggccaagcagggcgccgtgctgcaccccacctgcgtcttcgctggcagccccgaggtgctgcacgcacaggagctggaggccagcaactgcgacggaagccgaggcatggctgcgtgctgggagtcacattcagatttggctgaccttcttgtctgagccaggccaccaaagccatgccacgacaaggacaagatgagcagcaaacaccagctcctcagcttcgtgtccctgctggagaccaacaagccgtacctggtgaactgcgtccgcatccctgccctccagtccctcctgctttttagccggtctttggacaccaatggtgactgctcccgcctggtggccgatggctggctggagctgcagctagcagacagtgaaagtgccatccgactcctggcggcttccctgcggctccgtgcccgctgggaaagtgccctggaccggcagctggcgcaccaggcccagcagcagctggaggaggaggaggaggatacgccagtcagccccaaggaggtggccaccctgagcaaggaactcctgcaattcacggcatccaagattccttacagcctccggcggctcacagggctagaagtccagaacatgtatgtgggaccccagaccatcccagccaccccccatcttcctggcctctttggcagctccaccctgtccccccaccccacaaaggggggctacgcagtcactgacttcctcacctacaactgcctcacgaatgacacagacctgtacagcgactgtctccgaaccttctggacctgcccccactgtggcctgcatgcgcccctcacgcccctggagcgcatcgcccatgagaacacctgcccccaggccccacaggatgggcccccaggggctgaggaagctgccctcgaaaccctccagaagacatctgtcctgcagaggccctaccactgcgaggcctgcgggaaggacttcctctttacacccacagaggtgctgcgccaccggaagcagcacgtgtgagctgggccaggagccctgcccacctccgtgcagctgacctgccctccagcccaggactaggggcaggactcttgcctgaacccccagcctgggcttagccctgtggtcctgtcccagtgcagagggcctggagcacggattgtgaataaagcctcacatgctgatacacactgttgttaggcctgcacctgcccatccagaaagcagcagctgccttgttagtcctccccagggtctagctttccttcttcctgctgcagggtgctgcctgaggggtcctgggtaggaggggcgttagagccagcagggacctcccatgtctccagattccaggtgcaggttcttagcacctccgcagccgctctctcttgagtccatcctcagtctctcctaccccttgaagtagggggaccctgaatttgcccatccacctgggtcactttgagagttgtgcaggggggctgggagcactggtgttcacgtgggaccacaggctgcaccataagacccactcacaataaaaaaataaaaggccgagccgggcatggttgctcactcccgtaataaaaaaataaaagaacaggctgagccgggaaaaaaaaaaaaaaaaaaa

SEQ ID NO: 31633 - DNA, 1842 bp, Homo Sapiens
cggccgcgtagcccgcgcgcggagcgtaccctgctgcggccgttggccgttagcgcggcttcggcggttgtcttggagaagcaagatggcggcgacggcggccgcagtggtggccgaggaggacacggagctgcgggacctgctggtgcagacgctggagaacagcggggtcctgaaccgcatcaaggctgaactccgagcagctgtgtttttagcactagaggagcaagaaaaagtagagaacaaaactcctttagttaatgagagcctgaaaaagtttttaaataccaaagacggtcgtttagtggctagtcttgttgcagaatttcttcagttttttaaccttgactttactttggctgtttttcaacctgaaactagcacactgcaaggtctcgaaggtcgagagaatttagcccgagatttaggtataattgaagcagaaggtactgtgggtggacccttattattagaagtgatcaggcgctgtcaacagaaagaaaaagggccaaccactggggaaggtgcacttgatctatctgatgtacattctccaccaaagtcaccagagggaaaaacaagtgcacagacaacaccaagtaagaaggccaatgatgaggccaatcagagtgatacaagtgtctccttgtcagaacccaagagcaaaagcagccttcacttactgtcccatgaaacaaaaattggatcttttctaagcaacagaactttagatggcaaagacaaagctggcctttgtccagatgaagatgatatggaaggagattctttctttgatgatcccattcctaagccagagaaaacttacggtttgaggaaggaacctaggaagcaagcaggaagtctggcctcgctctcggatgcaccccccttaaaaagtggactcagctccctggcgggagccccttctttaaaagactctgagagtaaaaggggaaatacagttttgaaagatctgaaattgatcagtgataaaattggatcacttggattaggaactggagaagatgatgactatgttgatgattttaatagtaccagccatcgctcagagaaaagtgagataagtattggtgaagagatagaagaagacctttctgtggaaatagatgacatcaataccagtgataagcttgatgacctcacacaagatctgactgtatcccagctcagtgatgttgcggattatctggaagatgttgcatagacacgaagaaggaagtattctaattaacaaggacagaggactgaccggttccattttttttttttccagacaatcactcagctggaatgtctgctctctattggtgccttgcatttcaaaaacactgcagatattttttaaaagtaattttcattttactaaacaaaatacttcctatttgagcccatgtgtggaagatttaatattcttaatttaactgtacatttctttatggaaattgattatctacactcagtttcattacagggaaggaacccatgaaaacatcagtgttaagagcatgatgaaaggtgtcaataaagccgtaggatcgcgcaaccctttgtgtgtgtggctgctggtacgtgtgatctttgaaaaccttggctttagccctctggaatcagagcttacccaccatagtatattttgatattaggtggttctacacatagttggcaaaatgacttggtaaatttgtaatgctgaagtatattagtataagttaaatttgatgtgtcaactttattttgtatttccttccatttggaaggtttgttagaccattaaggttatattaaagtactcttgtgtgtgctaaaaaaaaaaaaaaaaaa

SEQ ID NO: 31634 - DNA, 1171 bp, Homo Sapiens
ctgtgattctcactatactggtcctgaggaaagggcttctgtgaactgcggtttttagtttttattgtggttcttagttctcatgagacccctcttgaggatatgtgcctatctggtgcctctgctctccactagttgagtgaaaggaaggaggtaatttaccaccatgtttggttcctgtttataagatgttttaagaaagatttgaaacagattttctgaagaaagcagaagctctcttcccattatgacttcggaaatcacttatgctgaagtgaggttcaaaaatgaattcaagtcctcaggcatcaacacagcctcttctgcagtctttcaaaaatattctcagcttcttgaaaaaaagactacaaaagagctggttcatacaacattggagtgtgtgaaaaaaaatatgcccgtggaagagacagcctggagctgttgcccaaagaattggaagtcatttagttccaactgctactttatttctactgaatcagcatcttggcaagacagtgagaaggactgtgctagaatggaggctcacctgctggtgataaacactcaagaagagcaggatttcatcttccagaatctgcaagaagaatctgcttattttgtggggctctcagatccagaaggtcagcgacattggcaatgggttgatcagacaccatacaatgaaagttccacattctggcatccacgtgagcccagtgatcccaatgagcgctgcgttgtgctaaattttcgtaaatcacccaaaagatggggctggaatgatgttaattgtcttggtcctcaaaggtcagtttgtgagatgatgaagatccacttatgaactgaacattctccatgaacaggtggttggattggtatctgtcattgtagggatagataataagctcttcttattcatgtgtaagggaggtccatagaatttaggtggtctgtcaactattctacttatgagagaattggtctgtacattgactgattcactttttcataaagtgagcatttattgagcattttttcatgtgccagagcctgtactggaggcccccattgtgcacacatggagagaacatgagtctctcttaatttttatctggttgctaaagaattatttaccaataaaattatatgatgtggtgtctcaaaaaaaaaa

SEQ ID NO: 31635 - DNA, 3568 bp, Homo Sapiens
atactctaggacattttgccagtaagttgtttgactatgtttaagacccctaagtttaggaaaacataaaaaatggttgcagaaggtgatcagcaagagccctgggtcagtgcaagcaataaaaaagactaactgctcaccactgtcatggaagctacaggatttaagtgtcatgagcttggtggatttaatagtttgccctgtcagtctttaaatttaaagggcttagttaaaggtgtccaaagacaggaggtggtctgtaaaaggttggatgacaactccattgtccagaacaattactgtgatcctgacagtaagccacctgaaaatcaaagagcctgcaacactgagccctgcccacctgagtggttcattggggattggttggaatgcagcaagacttgtgatggtgggatgcgcacaagggcagtgctctgcatcaggaagatcggaccttctgaggaggagacgctggactacagtggttgtttaacacaccggcctgtcgaaaaagagccctgcaacaaccagtcatgtccaccacagtgggtggctttggactggtctgagtgtactccaaaatgtggtccaggattcaagcatcggattgttctgtgcaagagcagtgacctttctaagacattcccagctgcacaatgtccagaggaaagcaaacctcctgtccgcatccgctgcagtttgggccgctgccctcctcctcgctgggtcacaggagactggggccagtgttctgctcagtgtggccttggacagcagatgagaactgtgcagtgtctctcctacaccggacaggcatctagtgactgtctagaaactgttcggcctccatcaatgcagcagtgtgaaagcaaatgtgacagtacccccatttctaatactgaagagtgcaaagatgtgaataaagtggcttattgcccactggtgctgaagttcaagttctgcagtcgagcatacttcagacagatgtgttgtaagacctgccaaggacactgacccacagaaagccagagagagtgccttgtcatttcatcatggaaatgcatccatcaaagagagccacccagaggaagaggattgatgtccttgcaaatgcattaccctgtggaaaacgtaaccactggtcagccctagctgacaaaatttcaatattattttagcttctgtgaagtgggatttattgatccaaagtgctggacacggtattaggagggaatgccagattggagagatccaaacaacacagggagacttgcttactgtggagcgtttgtgttctttcgagtaaatccaatagcctgtttacctccttggaccattaagataatttttattatggacttagcaatgacactgaatccatttgtatttaaaactgtttaaaatgtagctgttatgacttggtcaactatggaagtgaagaaggttcagaattcttaagtcatagcttaaaaatatttactgtactttatctcactacaacagcaccacaaccttctttgatatggtagaagggcatttatttatatgagagcaaatgtgtgtgtgtgtttgcgggcgcttttaagtgtgtggatagatgagtgtgcttgcacataatgtgctatttctgtgagttttaaagtaggcaagggataataaccaaagaagaaaatttcatgaagactagacatcataaagcataattttaatagtcactcaaccaagtattttttattttttatggatactctgaatggcaattaaatgtgaaacccagtttcttgggcaagtcaaattctggaatcacatccacctaaattaaaatgactagctcgtattttccccatcttcaagtttcacatcctggtcatcaaaagactcgacagcaagacttagaatgaaaaagggtacttgtttatattaatattttttacttgaacacgtgtagcttgcagcaggttcttgatgaatgtgctttgtgtccaaaatgcctccccattgtacacaggtgtacaccatgcatgcaccaacacctaaaactcaaaactaaatggctattttgtaaggttaatactttcagttaaacagcatgtttgacttgattccatcatggtgctcttaaattacatgtcagtgcatcacatatatcatgatctaatgcagatgactaggctttttccaaaaggaagacagaccctcagacaccaaaagccaatctaaacaactcccaggtttgctgtggacaatcagcatggaatgttttctgcactctcagtcatgaccatctgtatcttgttacctgctttctctctcaacaccacagttctcaaccctgagccttccagagagagctattgatgatacaagaggaatcaccagggcccggatctaagatgcccttagaagaccagcccaagtgccgtcttagccattcagtgaagggcaaacagcccatgggtagtatggcccgagcactgaattcccttgcgccttttcaaagaacagttaacttggtgctaatgtgccctggtgaaataaataaaagatgggcagtttctgtggcattttaggcataggtttgcaatccagatctgattttctccaacataaatatcagctcatgttcttatttcaaaaagatttcttattaccgactaaaagctattttttacctcacctggaaactaccattgtgagggccatcccccaggcactgcacagcaccttggctgatgctggaagaggagggcagtcagtgtcacttctgggatgtgccccagcactgagaacaaaatgcaggcatcccccggggcagcatcagagtgcctttctagagggagccacgcacagaatgtaacaggatgaaacagtttcaagtaagccttgaattgaaacctgagtaggttaaaacaattctatttcatagcacatcacaatactgctgctactctgtagccacccccatggctacatgatgccctattcctaaataataacaatagcattgtcagtggaggctgggccaccatggcagaccttccaaaagtagtgagctacatagactacttagggaaccccagggaaactggtaccctacacctgggagcagtatctgccactgggataaagtcctactaaaaaaggaacggtaaatgtaccctaatgattaaaccccgtgagatacatatgatttccaaatagtccatttcattaggaacttttttgtttgaatgaatgtcacataggtatcctcagtaacacagaacgaaattacctttgtattattgtgattagttgttgcttattattttatactcagtaataatgtggtacactgttaatttttttgcttttgtaaattatattctaatttattgccatgtttcctaacacttgtcctacattcattctcctgcttgtaatgaaaatgaaaaaatcattgtaacacttgatggagtgaaattccacgccaggcacagaatttttttgacatagataatttagtaaaataaaaattcagcttataataatgaaaaaaaaaaaaaaaaaaaaaaaaaaaaaaaaaaaa

SEQ ID NO: 31636 - DNA, 1119 bp, Homo Sapiens
atggtgtatactgaccccattacagtccctcagagtggccaccaatgcaattctttacctctggctgggagagcaggacagttggcttccttcaaagccaacacccttgctgctgcatggactgagaagcagtccaatgtggaacagataagacggcagcgatccagtgtccaaagacaggaggtggtctgtaaaaggttggatgacaactccattgtccagaacaattactgtgatcctgacagtaagccacctgaaaatcaaagagcctgcaacactgagccctgcccacctgagtggttcattggggattggttggaatgcagcaagacttgtgatggtgggatgcgcacaagggcagtgctctgcatcaggaagatcggaccttctgaggaggagacgctggactacagtggttgtttaacacaccggcctgtcgaaaaagagccctgcaacaaccagtcatgtccaccacagtgggtggctttggactggtctgagtgtactccaaaatgtggtccaggattcaagcatcggattgttctgtgcaagagcagtgacctttctaagacattcccagctgcacaatgtccagaggaaagcaaacctcctgtccgcatccgctgcagtttgggccgctgccctcctcctcgctgggtcacaggagactggggccagtgttctgctcagtgtggccttggacagcagatgagaactgtgcagtgtctctcctacaccggacaggcatctagtgactgtctagaaactgttcggcctccatcaatgcagcagtgtgaaagcaaatgtgacagtacccccatttctaatactgaagagtgcaaagatgtgaataaagtggcttattgcccactggtgctgaagttcaagttctgcagtcgagcatacttcagacagatgtgttgtaagacctgccaaggacactgacccacagaaagccagagagagtgccttgtcatttcatcatggaaatgcatccatcaaagagagccacccagaggaagaggattgatgtccttgcaaatgcattaccctgtggaaaacgtaaccactggtcagccctagctgacaaaatttcaatattattttagcttctgtgaa

SEQ ID NO: 31637 - DNA, 2966 bp, Homo Sapiens
gcagaagacccccatcagggtgcggggtgcagttgcggctccagggccatggcggaggagcagggccgggaacgggactcggttcccaagccgtcggtgctgttcctccacccagacctgggcgtgggcggcgctgagcggctggtgttggacgcggcgctggcgctgcaggcgtgcgggtgtagcgtgaagatctggacagcgcactacgacccgggccactgtttcgccgagagccgcgagctaccggtgcgctgtgccggggactggctgccgcgaggcctgggctggggcggccgcggcgccgccgtctgcgcctacgtgcgcatggttttcctggcgctctacgtgctgttcctcgccgacgaggagttcgacgtggtagtgtgcgaccaggccatttgcatcccactgtccttgtgttcggagccaggccacaccgtcctcagcagtgtcatgtgttaaaaacgccaagctgaatatatcatgcccctattaaaacttgtacatggctccccattggtttttggagaaaagttcaagctttttaccttggtgtctgcctgtatcccagtgttcaggctggctagacggcggaagaagatcctattttactgtcacttcccagatctgcttctcaccaagagagattcttttcttaaacgactatacagggccccaattgactggatagaggaatacaccacaggcatggcagactgcatcttagtcaacagccagttcacagctgctgtttttaaggaaacattcaagtccctgtctcacatagaccctgatgtcctctatccatctctaaatgtcaccagctttgactcagttgttcctgaaaagctggatgacctagtccccaaggggaaaaaattcctgctgctctccatcaacagatacgaaaggaagaaaaatctgactttggcactggaagccctagtacagctgcgtggaagattgacatcccaagattgggagagggttcatctgatcgtggcaggtggttatgacgagagagtcctggagaatgtggaacattatcaggaattgaagaaaatggtccaacagtccgaccttggccagtatgtgaccttcttgaggtctttctcagacaaacagaaaatctccctcctccacagctgcacgtgtgtgctttacacaccaagcaatgagcactttggcattgtccctctggaagccatgtacatgcagtgcccagtcattgctgttaattcgggtggacccttggagtccattgaccacagtgtcacagggtttctgtgtgagcctgacccggtgcacttctcagaagcaatagaaaagttcatccgtgaaccttccttaaaagccaccatgggcctggctggaagagccagagtgaaggaaaaattttcccctgaagcatttacagaacagctctaccgatatgttaccaaactgctggtataatcagattgtttttaagatctccattaatgtcatttttatggattgtagacccagttttgaaaccaaaaaagaaacctagaatctaatgcagaagagatcttttaaaaaataaacttgagtcttgaatgtgagccactttcctatataccacacctccctgtccacttttcagaaaaaccatgtcttttatgctataatcattccaaattttgccagtgttaagttacaaatgtggtgtcattccatgttcagcagagtattttaattatattttctcgggattattgctcttctgtctataaattttgaatgatactgtgccttaattggttttcatagtttaagtgtgtatcattatcaaagttgattaatttggcttcatagtataatgagagcagggctattgtagttcccagattcaatccaccgaagtgttcactgtcatctgttagggaatttttgtttgtcctgtctttgcctggatccatagcgagagtgctctgtattttttttaagataatttgtatttttgcacactgagatataataaaaggtgtttatcataaaaaagaaacagtattagattttggtctccataatctattttggtattgttacgaacatggatatgacaaccaaactggaaatcagaacactagggtaaagtggatattgaaatgaagcaagaatattgtcacacatgtgttgtgcatcttgtttagggtatatttcttaatgtcatctaggtcattagttttgttaatatttgtgttgtcttgaccaagctcctactaagtataggacacaaatgttttttatcttccaaggcctggctcaaatgccactgctgcaaagctttctttgaccctctggccacctcccaagccagaagttatcttccccctccatgtactctagccttttcatgacactgatattttcgtgacactgacttatagttcactgtttacctgttggtctaacagcaaatcataaacagtagttttcaacatacttctaaggctaaattcatttccagaagtagcaaagcttactagccaaaggctccacatttatcaactcttaagagctagacttgagagcctaacagcctatatgattttgtgtaaattgatctctatacctcagcttcttcatctgcaaagtgagataattgtactattctactttcctcatagtgcggttataacagattatgataatattacaaagtacttaatacttggcatatagtatatatattagctattagtattttgcaatttggggatattgaaaattagaaattgcatgttagttcatgctgcactaccatattgttcttttggggctcttcaatgggtgaaattccattttacagtttatcatgtgcatctgtatcacaggagtattttggcaaaatgattctgtaccaaaaaggagtactataaaatgagggtgccaaatatattgagtcttttatgggattaaaagttctgttgcattcc

SEQ ID NO: 31638 - DNA, 3280 bp, Homo Sapiens
ggaactggcagcggggaggaggctctagcgaggcctgaaaggctgcgtaaccaggcaggagtaggggttggggttcggggttgggggacagccagggatcgcgtctgatatgctgttggggtcgtgaccgtctgggggccgaggcaggcactggccagacccagccagggatcctcgtattcgtcgagcctaatttccagcagccgggtaggcctcaccagaggctcctttccgtgaggccgcccccaattcctgcccctattctctgcctgggagatggcttccccgagccccccgccggagtcgaagagagacttgataaatcggcctgagaaaataagtaatgctccagactagctctctcatttgtgagttctccaggtgaagcaccatttttgaccttcccttgtgtcttctgttcctggcacagtgcctggaccccaaggaggagtgggattatctggacccagctcagagaagcctgtataaagatgtcatgatggagaattatggaaacctggtctcactggatgttttgaacagagataaggatgaggagccaactgtaaaacaagagattgaagaaattgaggaagaagtggaaccacagggtgtaatagttacaagaatcaaaagtgaaattgaccaggatcctatgggtagagaaacatttgaacttgttggtaggttagataaacaaagagggatcttcctatgggaaataccaagggaatctttgacccaggaacagagaatgttcagagaaaacactaacattatccgtaaaagaccaaactcagaagagaaatgccataaatgtgaagaatgtggaaagggttttgtccgcaaggcccatttcattcaacatcaaagggtccatactggtgagaaaccttttcagtgcaatgaatgtgggaaaagttttagtcgcagttcatttgttattgaacatcagagaattcacactggggaaaggccctatgagtgtaattactgtggaaaaacctttagtgtgagctcaacccttattagacatcagagaatccacactggagaaagaccctatcagtgtaatcagtgtaaacagagcttcagccagagaaggagccttgttaaacatcaaaggattcatacaggtgagaaaccccataaatgtagtgactgtgggaaagccttcagttggaaatcacaccttattgagcatcaaagaactcacactggtgagaaaccttatcactgtaccaaatgtaagaagagctttagtcgaaattcattgcttgttgagcatcaaagaattcacactggggaaagaccccataaatgtggtgaatgtgggaaagcctttcgattaagcacataccttatacaacaccaaaaaattcacactggcgagaagccttttctttgtattgagtgtggaaaaagtttcagtcggagctcattccttattgaacatcagaggatccatactggtgaaagaccttatcagtgcaaagagtgtgggaaaagtttcagtcagctttgcaaccttactcgtcatcagagaattcacacaggagacaagccccataaatgtgaggaatgtggaaaagcctttagtagaagctcaggtcttattcagcatcagagaattcacaccagggagaagacttatccatacaatgaaactaaggaaagttttgatccaaattgcagtcttgttatacagcaggaagtctaccctaaggagaaatcttataaatgtgatgaatgtgggaaaacttttagtgttagtgctcatcttgtacaacatcaaagaatccacactggtgaaaagccctatctatgtactgtctgtgggaaaagcttcagccggagctcatttcttattgaacatcagagaatccacactggtgagagaccctatctgtgcagacagtgtggaaaaagctttagtcagctttgtaatcttattcgacatcagggtgttcacacaggtaataaaccccataaatgtgatgaatgtggaaaggcctttagccggaactcgggtcttattcagcatcagagaatacacacaggagagaaaccttataagtgtgagaagtgcgacaaaagtttcagtcaacagcgcagtcttgtcaaccatcagaagatccatgcagaggtgaaaacccaagaaacccatgaatgtgacgcttgtggtgaagcctttaattgccgtatttctcttattcagcatcagaaattgcacacagcatggatgcaataaatgtagagcaatacataagctcaatttgatttgagactagtacccaagtgcagttttagtatggctcaacatgggtcagatttagtgataaagcaaattctccttggcctcaggcaaatagtttctaaagattctgtgaatagtggacaactgcccatgagcatttgacttcccttactctttgatgatcgtagagaaagacttggtaatttatctaagtatctttaataaatctttcagcagagagattaaacctaggttcagagcatgggtgctctgagggacaaagttggattagtataagggagctggagcagctgatagtggaaaacagaataatgattcaaagagtcttctgtcaccatgtcatattgtggttctttcagttccatgatatgtttggctctgcatgccaaagtccagtgattaagcatatataagttgtcaaggaaacaaagcccaaatgtttttaaaacaagtatacagtttttgtcattgtttaagaaagccagttgtttggcatgtgagttaaaggcagttccaatgcctgatggttcccagatctatgaaatgagtggaccattaaccttacatgtaaagattatgttagtaattaagaaacctaacaaaggtgttaccaaggaacctttgggagtgccttttttgtttttcaagatggacccaaaaaagtggaggaagatattgttcttttgtgccctcctacctgtgagagatatttgtagtcctatgtgaatgagcttatccctccacaaccaggtgcatatgaaagtgtacatattatgactgccaagtattggaaatgaaaagacctggagtctatgctaggaagctgagatattttggtattgcattggtttttatggtaactaggttttgcatgcaattaaaaatccttatttcttgttctagggcttcccttagttaatggttattataaacctattaattcatctgttttaaccattaaaacctgttttgtttttagctttgaaaaaaaaaaaaaaaaaa

SEQ ID NO: 31639 - DNA, 1379 bp, Homo Sapiens
cgtaaagcgccattacgcagagagaaagttacgaggttcgtggccgcggtttccccaggcagctggcgctggaggcttcggcgtcacgtgctgaaactcgttttcatcttcttggtttcatcttaataccaacgtcatgtctggttctaatggttccaaagaaaattctcacaataaggctcggacgtctccttacccaggttcaaaagttgaacgaagccaggttcctaatgagaaagtgggctggcttgttgagtggcaagactataagcctgtggaatacactgcagtctctgtcttggctggacccaggtgggcagatcctcagatcagtgaaagtaatttttctcccaagtttaacgaaaaggatgggcatgttgagagaaagagcaagaatggcctgtatgagattgaaaatggaagaccgagaaatcctgcaggacggactggactggtgggccgggggcttttggggcgatggggcccaaatcacgctgcagatcccattataaccagatggaaaagggatagcagtggaaataaaatcatgcatcctgtttctgggaagcatatcttacaatttgttgcaataaaaaggaaagactgtggagaatgggcaatcccaggggggatggtggatccaggagagaagattagtgccacactgaaaagagaatttggtgaggaagctctcaactccttacagaaaaccagtgctgagaagagagaaatagaggaaaagttgcacaaactcttcagccaagaccacctagtgatatataagggatatgttgatgatcctcgaaacactgataatgcatggatggagacagaagctgtgaactaccatgacgaaacaggtgagataatggataatcttatgctagaagctggagatgatgctggaaaagtgaaatgggtggacatcaatgataaactgaagctttatgccagtcactctcaattcatcaaacttgtggctgagaaacgagatgcacactggagcgaggactctgaagctgactgccatgcgttgtagctgatggtctccgtgtaagccaaaggcccacagaggagcatatactgaaaagaaggcagtatcacagaatttatactataaaaagggcagggtaggccacttggcctatttactttcaaaacaatttgcatttagagtgtttcgcatcagaataacatgagtaagatgaactggaacacaaaattttcagctctttggtcaaaaggaatataagtaatcatattttgtatgtattcgatttaagcatggcttaaattaaatttaaacaactaatgctctttgaagaatcataatcagaataaagataaattcttgatcagctataaaaaaaaaaaaaaaa

SEQ ID NO: 31640 - DNA, 3942 bp, Homo Sapiens
cgggtggcgccttggcctccgcctccgctcgcctgcgcgcggccctgcgtgagggggcagaggcgaggtggaggcgttggcgctgccacgtctgggccgcggttcccaactgtggcgcgggcggtggaggaggaggtggggctggcgctgaagccggatccggatccggtgctgtgcacactggtgggggagagtccgacgcgcctggctaggagcgccgaccgcagggcctctacggaccttactagaaaaatgaaacctgatgaaactcctatgtttgacccaagtctactcaaagaagtggactggagtcagaatacagctacattttctccagccatttccccaacacatcctggagaaggcttggttttgaggcctctttgtactgctgacttaaatagaggtttttttaaggtattgggtcagctaacagagactggagttgtcagccctgaacaatttatgaaatcttttgagcatatgaagaaatctggggattattatgttacagttgtagaagatgtgactctaggacagattgttgctacggcaactctgattatagaacataaattcatccattcctgtgctaagagaggaagagtagaagatgttgttgttagtgatgaatgcagaggaaagcagcttggcaaattgttattatcaacccttactttgctaagcaagaaactgaactgttacaagattacccttgaatgtctaccacaaaatgttggtttctataaaaagtttggatatactgtatctgaagaaaactacatgtgtcggaggtttctaaagtaaaaatcttgtaagaaaattgtcaaaggggctaatgctacaaggctacactcttcctagagttgaaatattttgttgctgcagccgagtgacctccataaatactggactgaaaaaacattgtaatactacaagtataatgacatttagaagattactttgggctggtgggacatgctgtgaatttagattacaaatgaatattataaaggggatgatttttaaccaaaggaatatatttttaacttgaatcttttcttgcattgtatttttctaaaagtttggcttcctttcttggtagtcaagagtatgggtaataaggagttatatgtctgctatctgtgttgctcatttaaaaaaagtatacattgaataaggctgtttatcacatgcataaaattaaatatttttgtttcaaagaaacatctcaatacacttaggggtgtattgtttcccacatattaagtcagggtggataaattagttattataactaaacatagtatagtccaacattcgttgatcccaatacaggcaaacaacctggtcaaccttttgaagtagaagaaatgaaaattacttgacaagattaaaagtaaaacaatttaaatgttttactgaaagtttatatagtatagtctatgtagataaaaagtaccacttgtcttttctgtgaattatgactattcatttgttaaaaatacctaagagcaattatagtgggacatctaaggtcctctgtaaacagtgaattagcaaacctcagcctatgtgtttctaccctgatttttttcttttcatgggtatctgaagcctctaagttttttcaaaaatggagtatcacaaaattgagtgaaacacaatacttaatgtattgtactagattgccaaattcataaaatgttaatggaagctttttgatgtgattataatggcactattctggtcattatcctattttgattttatttaattttttaaagttgaagaattaaatattttaatggttctaatcttttgcattccatgttgcattaaacctgtttatatgagtagtcttctgttagaatcacatctgtgcttttcttgagtctgctgttgaactattagattaagtcataattcataaaattttagtttaatgtgctctttgtaaaatgaaattgtaaagaaaataccagtgtttctcatcccattgactcacaccacgtcatctggattttggatttccctccatgcagccagctatagttggctttccaaaacaacagaaatccttcaccaatagagtgcactacttacctgcttatagcctatacagacgaactgatctgtccttcgtgaaacgcaacaaagctagttctgtcttttcagaagtcctacaaccttgacaaagagtagttttatcaggtaaatcctggtaattaaaaacgcatgtttttaaaaattagcctggtaaggccgggtgcagtggctcacgcctgtaatcccagcactttgggaggctgaggtgggcagatcacaaggtcaggagtttgagaccagcctgaccaaaatggtgaaaccctgtctctactaaaaaaaagaaaaattagccagacgtggtggcatgcgcctgtgatcccggctactcaggaggctgaggcgagagaatcgcttgaacccgggaggcaaaggttgcagtgagctgagatcacaccactgcactccagcctggcgacagagagagactccatctcaaaacaaaacaaaaaaaattagcctacttaaaggcacaactaaatgctttattacctttcttaccactggacaatttgaggtaaaatcattcacaaggttggcacttcagtaaatccctttaaatagtgttcctaagatatctcttaaatcctcccataggaaatagaattacaggtaaggtacaccatacaaaaattgtgtcattgaggacaatggtgatctgtaattttagttgagtatgtttatgatttttgaagccatatggtgagtaaatgtaaatatgaaaaaagtgctacataaaacacttcttaaactttttttttttaaaaactgctccttgtggagcaggactaccccataggcagtgtacccacaatagatagccttttgttgttgttgttgttgagacaaggtctcgctgttgcccaggctagagcgcaggagcacaatcaccacacactgccgcttcaatctcctgggctcaaatgatccttccacctcagcctcccatgtggctgggactataggtgcatgccaccacacccagctaattaaaaaaattttttgtgtggagtctatgttgcccaggctggtctcttaactcctaggctcaagtgatcctcccacctcagcctcccaaagtgcttggatgacaggtgcgagccactgcacctggcccacattttttaaagagacactgtcccactccatcacccaggctggagtccagtggtgtgatcatagctcactgcatcctccagttcctgggttcaagccatccctcctgcctcagcctccccagtagctggaactacaggtgtgtgccatcacacctggctttacatttttctgtggggtcttactatattgcccaagccggtctcaaactcctgagctcaagtgatcctctgcctcagcctccagagtatctgggattacatatgtcggctaccgtgtctggccgttcacatctttggccactatttgcttgtgaaaaggtataatgaggtggtacttatcatttttactgtgtctcatgttttgtatatttttgtttcatcaactaagatgcactgtaacatctctgaaatctggatatattatcaatggtttatcatagttttgttagcaatacactgtcttttagtggtgcctaaaataatggtatagttgtgaggtgatcttagatttgatgaagcacagtatgcaggtaggcctaatgggggaagatggtaatataaaagcaagaagtattttttttttgtaatgactgaaagctgttctgtggatgacctaccctttcctttaaacacgattctctcacttccaactccaaacttgctcaactaatccttaaaaataaacttgagctggaatttgaaaaaaaaaaaaaaaaaa

SEQ ID NO: 31641 - DNA, 1328 bp, Homo Sapiens
gtaccaatcacaagtcttgttattttgtttcattatgagaaagataatctactaaatattaaaatactggaaggagcaagatagctttgatccagggagaccttttccatttatgtgctttagtaatctgccgccaacaagctatcttctttatgttcttctacaactgatgttgttttgttttctcatgtttgtctcttaatagacaaatggaggcatgagcttccttagaattaccccttcgacgcatagttctgtttcatctggacttttgaggcttagtatctttctactacttagctttcctgactcaaacggaaaagccatttggacagctcacctgaatataacatttcaggttggaaatgagatcacatcggaattaggagagagtggagtgttcgggaatcattctcctctggaaagggtgtctggtgtggtggcacttcctgaaggatggaatcagaatgcctgtcatcctttgaccaatttcagcaggcccaaacaggcagactcatggctggccctcatcgaacgtggaggctgtacttttacacataaaatcaacgtggcagcagagaagggagcaaatggggtgatcatctacaactatcaaggtacgggcagtaaagtatttcccatgtctcaccaggggacggaaaatatagtcgcggtgatgataagcaacctgaaaggcatggaaattttgcactcgattcagaaaggagtctatgtgacagtcatcattgaagtggggagaatgcacatgcagtgggtgagccattacatcatgtatctatttaccttcctggctgccacaattgcctacttttacttagattgcgtctggagacttacacctagagtgcccaattctttcaccaggaggcgaagtcaaataaagacagatgtgaagaaagctattgaccagcttcaactgcgagttctcaaagaaggggatgaggaattagacctaaatgaagacaactgtgttgtttgctttgacacatacaaaccccaagatgtagtacgcattttaacttgcaaacattttttccataaggcatgcattgacccctggcttttagcccataggacatgtcccatgtgcaagtgtgacatcctgaaaacttaagaaatctggagaattttctgaagatgtaaccagatctttccaaatacaaagattagataaattgtcttattgtactttatgtagagagaaaatttcagcttctctacccaagtatgaacaagggtgaaatttgtgttttaaaaataaaactccttatcatgcccagcaaaaaaaaaaaaaaaaaaaaaaaaaa

SEQ ID NO: 31642 - DNA, 3130 bp, Homo Sapiens
cagcccgtcgtggatgactagagccaaccacctgccttccgtcttccaggcagaaccacagagaggctacagccgtcctggcctccctccggccctgagagctcctctggcctgtctcaagtcttaacgtctcaagcgcagactgccggctccgaacggggagaccaggcttctgcaccggaaacaaggcaccggttgtgacgtcacagccgcagagcgcccgacttcccagaaggcaccgagtccctgccgttctcctcaactggcggcggcgcgaacgaatagtcgccggcgacctcttggctctctggcagatttcctctagtaagaggtggctctggaggccccgcgaaacgagtgtggtgtgtggttgcaaggcatgatggctgcaaaagtggttcctatgcccccaaagccaaagcagtcctttatactgagagttccgccagactccaagctgggccaagacctacttcgagatgccactaacgggcccaagaccatccaccagctagtgctggagcacttcctcaccttcttgcccaagccaagcctggtccagcccagtcagaaagtcaaggagaccttggttattatgaaagatgtgagctcaagccttcagaacagagtgcatcctcgtcccttggtgaagcttctgcccaaaggagtccaaaaggaacaagagacagtgtctctgtatttgaaagctaaccctgagctggtggtctttgaggatttgaatgtatttcactgccaggaagaatgtgtgagcttggatcctactcaacaactcacgtcagagaaggaagatgacagcagtgtcggggaaatgatgttactggcagtcaatggcagtaatcctgaaggtgaagatcctgagagggaacctgtagaaaatgaagattatagagaaaagtcttcagatgatgatgaaatggattcttccttggtctctcagcagcctcccgataaccaggaaaaggaacgactaaatacatccattccacaaaaaaggaaaatgagaaatctgttagttaccattgagaatgatactcctctagaggaactctcaaaatatgtagacatcagtattattgcccttactcgaaatcggaggacaaggagatggtacacttgtccactgtgtgggaaacagtttaatgaaagttcttacctcatttcccaccagaggacccacactggagaaaaaccctatgactgtaatcactgtgggaaaagcttcaatcataaaacaaacctcaataaacatgagcgaattcatacaggagagaaaccttattcctgttctcagtgtggaaaaaacttccgtcagaattctcatcggagtcgtcatgaaggaatccatataagggagaagatatttaagtgtccagaatgtgggaaaaccttcccaaagaatgaggagtttgtgcttcatctgcagagtcatgaggctgagagaccatatggttgcaaaaaatgtgggagaagatttggtcggctgtcaaactgtacccggcatgagaaaacccactcagcctgtaagacccgaaagcagaagtaatactgggaaccctttctgggtctgatggtgctgcctcaacctgagagctttcataagtagttctgaattcccaagctgcctaaaaaggtataaatgtgtaaaaatctcattattgccaaaattggataaatgcccatcttagctaaaacctcaaattgctagaaaattcacagggaagaaaacatttcaagggctatacctcagcatctaggctttttggactaaggagctttcctttttgaagttatatgataatgtacaggtcacagatcccctttcccaacactttgaagatgaatctggagtctgcttacttggaaggcaaagagtgacttgtgtctattgaaagtatatccgttttccccccacatggggattcatacttgagaaatagtgcaaagatgcttatctggaactgtgttctggtgaaagaaccaaattactggcttgttagccaacagcttctgatagcaattcatataaccctctaagaatacctgtttaagtcttgagtgttgaaaggaattgtttactttggaatataggaaaacagttgaatgtcagactctcatttgtatgtgatctaaatttgcaatcaatttcaataatatttacaatttgtgataaaactgacttttacagattccttttcacaacataatttaggtgtctactgttcttattgtattttgttctgctgttgatctctccagcagccgtctcatgcttctcccttgctaaaagaagtttggattactcaggcagggccatccagccccaccactagaaaagctcttcagaatcttgtccctctgttgagcccagatctcatgtgctacgaaggaaaccccaagacccagagaggaagggtcaacctggaggcaggaaaaagttggcttggatccatgtctcatcaataaccttaccatatgcttaggtcccctctatgctgtcatcagacctttggcaatggggtggtcactacctcacaaggcaaagtgttgtatgattagaaattacgtctccagtggttagctcacattgcctctcaagagacaggtttccaggtgtcttcattgtagtgggtattaattgtcttcagcctcttgatatccataccttcctgtcctctgcctagaagcaaggccagcggtgcctttacggactgatcgtgtggtgcgatttagggattcttcagttttgcttgctttaggtttccaaaagttatacattggtgttttgattggaataaagaaatcctataagctatttgggaaaaattatagtgtatgtttcccatccagaaacatgcctttctatttattagagtattatattcctgtgaaaatttttctaattttcttcacttgttttacacaattttgttattgtagttttttccattatatttttatagttgattattgcttttacatgggaaagttatttttaattatatatttgtatagtcatctcactgttgttaattttcaatagtttgttggtttagttctgttaacttttggtaaaatgacaccatctacaaagaaaaaaaaaaaaaaaaaa

SEQ ID NO: 31643 - DNA, 3258 bp, Homo Sapiens
cagcccgtcgtggatgactagagccaaccacctgccttccgtcttccaggcagaaccacagagaggctacagccgtcctggcctccctccggccctgagagctcctctggcctgtctcaagtcttaacgtctcaagcgcagactgccggctccgaacggggagaccaggcttctgcaccggaaacaaggcaccggttgtgacgtcacagccgcagagcgcccgacttcccagaaggcaccgagtccctgccgttctcctcaactggcggcggcgcgaacgaatagtcgccggcgacctgtgagggcactcggaagggcgaggggagggctcgaccgctcgcgcctagtttttctatctctcccggagcctgagtctctgagccgtccccagcaaacgctcaggggctgcagaggccccgagagcttggctctctggcagatttcctctagtaagaggtggctctggaggccccgcgaaacgagtgtggtgtgtggttgcaaggcatgatggctgcaaaagtggttcctatgcccccaaagccaaagcagtcctttatactgagagttccgccagactccaagctgggccaagacctacttcgagatgccactaacgggcccaagaccatccaccagctagtgctggagcacttcctcaccttcttgcccaagccaagcctggtccagcccagtcagaaagtcaaggagaccttggttattatgaaagatgtgagctcaagccttcagaacagagtgcatcctcgtcccttggtgaagcttctgcccaaaggagtccaaaaggaacaagagacagtgtctctgtatttgaaagctaaccctgaggagctggtggtctttgaggatttgaatgtatttcactgccaggaagaatgtgtgagcttggatcctactcaacaactcacgtcagagaaggaagatgacagcagtgtcggggaaatgatgttactggcagtcaatggcagtaatcctgaaggtgaagatcctgagagggaacctgtagaaaatgaagattatagagaaaagtcttcagatgatgatgaaatggattcttccttggtctctcagcagcctcccgataaccaggaaaaggaacgactaaatacatccattccacaaaaaaggaaaatgagaaatctgttagttaccattgagaatgatactcctctagaggaactctcaaaatatgtagacatcagtattattgcccttactcgaaatcggaggacaaggagatggtacacttgtccactgtgtgggaaacagtttaatgaaagttcttacctcatttcccaccagaggacccacactggagaaaaaccctatgactgtaatcactgtgggaaaagcttcaatcataaaacaaacctcaataaacatgagcgaattcatacaggagagaaaccttattcctgttctcagtgtggaaaaaacttccgtcagaattctcatcggagtcgtcatgaaggaatccatataagggagaagatatttaagtgtccagaatgtgggaaaaccttcccaaagaatgaggagtttgtgcttcatctgcagagtcatgaggctgagagaccatatggttgcaaaaaatgtgggagaagatttggtcggctgtcaaactgtacccggcatgagaaaacccactcagcctgtaagacccgaaagcagaagtaatactgggaaccctttctgggtctgatggtgctgcctcaacctgagagctttcataagtagttctgaattcccaagctgcctaaaaaggtataaatgtgtaaaaatctcattattgccaaaattggataaatgcccatcttagctaaaacctcaaattgctagaaaattcacagggaagaaaacatttcaagggctatacctcagcatctaggctttttggactaaggagctttcctttttgaagttatatgataatgtacaggtcacagatcccctttcccaacactttgaagatgaatctggagtctgcttacttggaaggcaaagagtgacttgtgtctattgaaagtatatccgttttccccccacatggggattcatacttgagaaatagtgcaaagatgcttatctggaactgtgttctggtgaaagaaccaaattactggcttgttagccaacagcttctgatagcaattcatataaccctctaagaatacctgtttaagtcttgagtgttgaaaggaattgtttactttggaatataggaaaacagttgaatgtcagactctcatttgtatgtgatctaaatttgcaatcaatttcaataatatttacaatttgtgataaaactgacttttacagattccttttcacaacataatttaggtgtctactgttcttattgtattttgttctgctgttgatctctccagcagccgtctcatgcttctcccttgctaaaagaagtttggattactcaggcagggccatccagccccaccactagaaaagctcttcagaatcttgtccctctgttgagcccagatctcatgtgctacgaaggaaaccccaagacccagagaggaagggtcaacctggaggcaggaaaaagttggcttggatccatgtctcatcaataaccttaccatatgcttaggtcccctctatgctgtcatcagacctttggcaatggggtggtcactacctcacaaggcaaagtgttgtatgattagaaattacgtctccagtggttagctcacattgcctctcaagagacaggtttccaggtgtcttcattgtagtgggtattaattgtcttcagcctcttgatatccataccttcctgtcctctgcctagaagcaaggccagcggtgcctttacggactgatcgtgtggtgcgatttagggattcttcagttttgcttgctttaggtttccaaaagttatacattggtgttttgattggaataaagaaatcctataagctatttgggaaaaattatagtgtatgtttcccatccagaaacatgcctttctatttattagagtattatattcctgtgaaaatttttctaattttcttcacttgttttacacaattttgttattgtagttttttccattatatttttatagttgattattgcttttacatgggaaagttatttttaattatatatttgtatagtcatctcactgttgttaattttcaatagtttgttggtttagttctgttaacttttggtaaaatgacaccatctacaaagaaaaaaaaaaaaaaaaaa

SEQ ID NO: 31644 - DNA, 2938 bp, Homo Sapiens
ctccgggttcatgtagggagtcgggccccgggccgccaccgtcacctcggccgctgccgctgtcgccatcgccttgtttccccatcccccgccatggccgaggacctctctgcggccacgtcctacaccgaagatgatttctactgccccgtctgtcaggaggtgctcaaaacgcccgtgcggaccacggcctgtcagcacgtcaataggagtgaaacatccacatctgataacacagaaacttaccaagagaatacaagttcttctggtcatcctacttttaagtgtcccctgtgtcaagaatcaaattttaccagacagcgtttactggatcactgtaacagtaatcacctatttcagatagttcctgtgacatgtcctatttgtgtgtctcttccttggggagatcctagccagattaccagaaatttcgttagtcatctaaatcagagacatcaatttgattatggagaatttgtgaatcttcagctagatgaagaaacccaataccaaactgctgttgaagaatcttttcaagtaaacatctgaaggctgtagacatctctgcatctttgtacctgcaagtgccatctttaagggggaaactacatgaagtcaccgttacagtaacttgatgtgtatattaataaaagtaattcagtcattttagtttttgattgaaaataaaggtagggcttctaaaaacttcatcatcttgataagttaaaaaatgaaagttatgacattagctttaaaggtgtaaaaaagatgtttcactaatgtaacggtgaaagagaatccctgttgtactttatctttttgtaatattatttttgaatttttcattattatgttgcttttgaaatttgatgcattcctcccatttactttattattgtacacatttaacacacagtagcaaattttgaacgatgtgattgatataacctaacaaatctgagccagttattattagagttgcagaatagaaacttgaagtgctaaatggaataatccaaaggaaattttttaaatgcaggttctagctgaaaaattcaactataagaaaattgtatttatataacatttactatttttgaagactagtgagatttctgtaataattttaattctttaaaaagtgaaagcttgttgtaaagatattttctttttgttattagaaggaaatacaaagagaaaaatttctttctttcatgggcatttgataatttcagtctttgactgatttgtaagcctagaatatactaagctgaataacagctctttggcctcagaattttcagtagccagtatttctgattaactaagttgaaactcttattagaaactttcagttggtgatattgtattctagaagatataaatgagaggtttggcttcatctcagtttagaaatttattcaaagctaaagatgtatatatacatatacttttgtgtgtatatatacacatatgtgtgtatgcagtttgtcaggttatatatagaatttctattaaggattttttaaatggacaagcaatagggggttgaagtgtttatctgatttgtttaaaattttgtatatcaccaaatttttaaaaagtgatagtcacagtgctaagttatctagttggctactattacaccttaaaaattgagtttacacacacacaattacctgtttatatggtgctcatttgttattctcaaatataatgtgtgaccgtgatatagtgagaaagattctaccaaccactgtttcactactttttagttaaaattgggtatgttcttaatattcattagtgagaatcacaaagtattttgtagaaggcccaaatcacagaataaaggactaagagtggatttgctgacattccatactaatatacattgtttatgctttctttaaaataactagaagaacataaaagaaagagaatctcagaagtagtttgctgctaatatatacatatattgtataaaaaggtatattttggttttgttaaaacccttgttgacttttctacactgaacattttttttaacttgatttaataaaaatgttaattttggaagtgcagttttgtaaaaacctttttcagtcaaacagtaaagactttatttatggattgtaataacaaccacaagaaaagccatacatcttaatgaacatacgcctttgttctgtcattttaaagagtggtgtttactatgtgtgtgcttgagcattttctttcagttacatgggtgtaatttaaaaaacagctcctttttaagacttttgaccatagtgttttccagtttaaagcaataactttcatagtttctttcaaagtttaatacatccaatatgtcaagttaaaccattctgggatttgcaaagtttaatacatccaatatgtcaagttaaaccattctgggatttgcaaagtttaatacatccaatatgtcaagttaaaccattctgggatttgggaacttctttaaaggaaaattgtagtagaggtcatcttgatggaattgtgttttaaagttttgtgaatgagttaaatatcattgatagtcttgtgtgtctcacatatcagctttttcataaggaaaatactttatttgcttttatctgagaatttctcagtatgaaaatgattgtttaaaatttcccctctttttgtcagtgcattgggaatagggatagactttacagatttatggaaattaaatttatggggaaaagtttatttttaatattacttatagctgagtcagaattaaaggagggaattgtattgatactccaatacctaaatttcacaataccacttaggaaagctatttcaacaaattacagttttattgttaaaacagagtcttatttgagatgtattgctttatttttcaattaaaagtggttttctcctaaaaaaaaaaaaaaaa

SEQ ID NO: 31645 - DNA, 2845 bp, Homo Sapiens
cctcgcctccgttacaacggcctacggtgctggaggatccttctgcgcacgcgcacagcctccggccggctatttccgcgagcgcgttccatcctctaccgagcgcgcgcgaagactacggaggtcgactcgggagcgcgcacgcagctccgccccgcgtccgacccgcggatcccgcggcgtccggcccgggtggtctggatcgcggagggaatgccccggagggcggagaactgggacgaggccgaggtaggcgcggaggaggcaggcgtcgaagagtacggccctgaagaagacggcggggaggagtcgggcgccgaggagtccggcccggaagagtccggcccggaggaactgggcgccgaggaggagatggaggccgggcggccgcggcccgtgctgcgctcggtgaactcgcgcgagccctcccaggtcatcttctgcaatcgcagtccgcgcgtcgtgctgcccgtatggctcaacttcgacggcgagccgcagccctacccaacgctgccgcctggcacgggccgccgcatccacagctaccgagtgtatactctgaaagagcgatgcctccaggttgtccggagcctagtcaagcctgagaattacaggagactggacatcgtcaggtcgctctacgaagatctggaagaccacccaaatgtgcagaaagacctggagcggctgacacaggagcgcattgcacatcaacggatgggagattgaagatttctgttgaaacttacactgtttcatctcagcttttgatggtactgatgagtcttgatctagatacaggactggttccttccttagtttcaaagtgtctcattctcagagtaaaataggcaccattgcttaaaagaaagttaactgacttcactaggcattgtgatgtttaggggcaaacatcacaaaatgtaatttaatgcctgcccattagagaagtatttatcaggagaaggtggtggcatttttgcttcctagtaagtcaggacagcttgtatgtaaggaggtttgtataagtaattcagtgggaattgcagcatatcgtttaattttaagaaggcattggcatctgcttttaatggatgtataatacatccattctacatccgtagcggttggtgacttgtctgcctcctgctttgggaagactgaggcatccgtgaggcagggacaagtctttctcctctttgagaccccagtgcctgcacatcatgagccttcagtcagggtttgtcagaggaacaaaccaggggacactttgttagaaagtgcttagaggttctgcctctatttttgttggggggtgggagaggggaccttaaaatgtgtacagtgaacaaatgtcttaaagggaatcatttttgtaggaagcattttttataattttctaagtcgtgcactttctcggtccactcttgttgaagtgctgttttattactgtttctaaactaggattgacattctacagttgtgataatagcatttttgtaacttgccatccgcacagaaaatacgagaaaatctgcatgtttgattatagtattaatggacaaataagtttttgctaaatgtgagtatttctgttcctttttgtaaatatgtgacattcctgattgatttgggtttttttgttgttgttgttttgttttgttttgtttttttgagatggagtctcactcttgtcacccaggctggagtgcagtggcgccatctcggctcactgcaacctctgcctcctgggttcacgtaatcctcctgagtagctgggattacaggcgcctgccaccacgctggccaatttttgtacttttagtagagacagtgtttcgccatgttggccaggctggtttcaaactcctgacctcaggtgatccgcccacctcagcctcccaaaatggtgggattacaggtgtgtgggccaccgtgcctggctgattcagcattttttatcaggcaggaccaggtggcacttccacctccagcctctggtcctaccaatggattcatggagtagcctggactgtttcatagttttctaaatgtacaaattcttataggctagacttagattcattaactcaaattcaatgcttctatcagactcagttttttgtaactaatagatttttttttccacttttgttctactccttccctaatagctttttaaaaaaatctccccagtagagaaacatttggaaaagacagaaaactaaaaaggaagaaaaaagatccctattagatacacttcttaaatacaatcacattaacattttgagctatttccttccagcctttttagggcagattttggttggtttttacatagttgagattgtactgttcatacagttttataccctttttcatttaactttataacttaaatattgctctatgttagtataagcttttcacaaacattagtatagtctcccttttataattaatgtttgtgggtatttcttggcatgcatctttaattccttatcctagcctttgggcacaattcctgtgctcaaaaatgagagtgacggctggcatggtggctcccgcctgtaatcccagtactttgggaagccaaggtaagaggattgcttgagcccagaacttcaagatgagcctgggctcatagtgagaacccatctatacaaaaaatttttaaaaattagcatggcggcacacatctgtaatcctagctacttggcaggctgaggtgagaagatcattggagtttaggaattggaggctgcagtgagccatgagtatgccactgcactccagcctgggggacagagcaagaccctgcctcaaaaaaaaaaaaaaaaaa

SEQ ID NO: 31646 - DNA, 2528 bp, Homo Sapiens
aggagatgtgccaaactgttaagagtggttatttctgagcagaagaatgtggatgaattccattcttcctatttttctggtcccaaggagaagcggatattgtcctccagcactgggggcaggaatgaccaaggaaagaggtactaccatggcatggaatatgagacggacctcactccccttgaaagccccacacacctcatgaaattcctgacagagaacgtgtctggaaccccagagtacccagatttgctcaagaagaataacctgatgagcttggagggggccttgcccacccctggcaaggcagctcccctccctgcaggccccagcaagctggaggccggctctgtggacagctacctgttacccaccactgatatgtatgataatggctccctcaactccttgtttgagagcattcatggggtgccgcccacacagcgctggcagccagacagcaccttcaaagatgacccacaggagtcgatgctcttcccagatatcctgaaaacctccccggaacccccatgtccagaggactaccccagcctcaaaagtgactttgaatacaccctgggctcccccaaagccatccacatcaagtcaggcgagtcacccatggcctacctcaacaaaggccagttctaccccgtcaccctgcggaccccagcaggtggcaaaggccttgccttgtcctccaacaaagtcaagagtgtggtgatggttgtcttcgacaatgagaaggtcccagtagagcagctgcgcttctggaagcactggcattcccggcaacccactgccaagcagcgggtcattgacgtggctgactgcaaagaaaacttcaacactgtggagcacattgaggaggtggcctataatgcactgtcctttgtgtggaacgtgaatgaagaggccaaggtgttcatcggcgtaaactgtctgagcacagacttttcctcacaaaagggggtgaagggtgtccccctgaacctgcagattgacacctatgactgtggcttgggcactgagcgcctggtacaccgtgctgtctgccagatcaagatcttctgtgacaagggagctgagaggaagatgcgcgatgacgagcggaagcagttccggaggaaggtcaagtgccctgactccagcaacagtggcgtcaagggctgcctgctgtcgggcttcaggggcaatgagacgacctaccttcggccagagactgacctggagacgccacccgtgctgttcatccccaatgtgcacttctccagcctgcagcgctctggaggggcagccccctcggcaggacccagcagctccaacaggctgcctctgaagcgtacctgctcgcccttcactgaggagtttgagcctctgccctccaagcaggccaaggaaggcgaccttcagagagttctgctgtatgtgcggagggagactgaggaggtgtttgacgcgctcatgttgaagaccccagacctgaaggggctgaggaatgcgatctctgagaagtatgggttccctgaagagaacatttacaaagtctacaagaaatgcaagcgaggaatcttagtcaacatggacaacaacatcattcagcattacagcaaccacgtcgccttcctgctggacatgggggagctggacggcaaaattcagatcatccttaaggagctgtaaggcctctcgagcatccaaaccctcacgacctgcaaggggccagcagggacgtggccccacgccacacacaacctctccacatgcctcagcgctgttacttgaatgccttccctgagggaagaggcccttgagtcacagacccacagacgtcagggccagggagagacctagggggtcccctggcctggatccccatggtatgcttgaatctgctccctgaacttcctgccagtgcctccccgtaccccaaaacaatgtcaccatggttaccacctacccagaagactgttccctcctcccaagacccttgtctgcagtggtgctcctgcaggctgcccgttaagatggtggcggcacacgctccctcccgcagcaccacgccagctggtgcggcccccactctctgtcttccttcaacttcagacaaaggatttctcaacctttggtcagttaacttgaaaactcttgattttcagtgcaaatgacttttaaaagacactatattggagtctctttctcagacttcctcagcgcaggatgtaaatagcactaacgatcgactggaacaaagtgaccgctgtgtaaaactactgccttgccactcactgttgtatacatttcttatttacgattttcatttgttatatatatatataaatatactgtatatatatgcaacattttatatttttcatggatatgtttttatcatttcaaaaaatgtgtatttcacatttcttggactttttttagctgttattcagtgatgcattttgtatactcacgtggtatttagtaataaaaatctatctatgtattacgtcacattaaaaaaaaaaaaaaaa

SEQ ID NO: 31647 - DNA, 4561 bp, Homo Sapiens
acacaaatttcagagaacaatttcaacattgttctgtcgaacgttatactcagtcctgaaccacattactttcctgtctacgtttcatttcctgggggcttgccaagtgataaacagacccaggcgtgtgtggtagagttcgggttttttagcacgaagtgggtggctggagtttgcttgaaaacatcaattgactttgtgatcattacagaaatgctggtgtaaggtgttcagaagacaatggagaaaaaatggaaatactgtgctgtctattacatcatccagatacattttgtcaagggagtttgggaaaaaacagtcaacacagaagaaaatgtttatgctacacttggctctgatgtcaacctgacctgccaaacacagacagtaggcttcttcgtgcagatgcaatggtccaaggtcaccaataagatagacctgattgctgtctatcatccccaatacggcttctactgtgcctatgggagaccctgtgagtcacttgtgactttcacagaaactcctgagaatgggtcaaaatggactctgcacttaaggaatatgtcttgttcagtcagtggaaggtacgagtgtatgcttgttctgtatccagagggcattcagactaaaatctacaaccttctcattcagacacacgttacagcagatgaatggaacagcaaccatacgatagaaatagagataaatcagactctggaaataccatgctttcaaaatagctcctcaaaaatttcatctgagttcacctatgcatggtcggtggaaaacagcagcacggattcttgggtccttctttctaagggtataaaggaggataatggaactcaggaaacacttatctcccaaaatcacctcatcagcaattccacattacttaaagatagagtcaagcttggtacagactacagactccacctctctccagtccaaatcttcgatgatgggcggaagttctcttgccacattagagtcggtcctaacaaaatcttgaggagctccaccacagtcaaggtttttgctaaaccagaaatccctgtgattgtggaaaataactccacggatgtcttggtagagagaagatttacctgcttactaaagaatgtatttcccaaagcaaatatcacatggtttatagatggaagttttcttcatgatgaaaaagaaggaatatatattactaatgaagagagaaaaggcaaagatggatttttggaactgaagtctgttttaacaagggtacatagtaataaaccagcccaatcagacaacttgaccatttggtgtatggctctgtctccagtcccaggaaataaagtgtggaacatctcatcagaaaagatcacttttctcttaggttctgaaatttcctcaacagaccctccactgagtgttacagaatctacccttgacacccaaccttctccagccagcagtgtatctcctgcaagatatccagctacatcttcagtgacccttgtagatgtgagtgccttgaggccaaacaccactcctcaacccagcaattccagtatgactacccgaggcttcaactatccctggacctccagtgggacagataccaaaaaatcagtttcacggatacctagtgaaacatacagttcatccccctcaggtgcaggctcaacacttcatgacaatgtctttaccagcacagccagagcattttcagaagtccccacaactgccaatggatctacgaaaactaatcacgtccatatcactggtattgtggtcaataagcccaaagatggaatgtcctggccagtgattgtagcagctttactcttttgctgcatgatattgtttggtcttggagtgagaaaatggtgtcagtaccaaaaagaaataatggaaagacctccacctttcaagccaccaccacctcccatcaagtacacttgcattcaagagcccaacgaaagtgatctgccttatcatgagatggagaccctctagtctcgtgagactttgccccatggcagaactctgctggaatcctattgagaaggtagacattgtgctttattaatatagtcgctcttcagccatgcctttgctgcagctgaaatggaagtcagaagtgagtgacctgttttcccagcaactcaccctcttccatctccaaacgcctgaagcttaaccaagagtgagaggatatgtcatgttcacactcaatgcaattcgtagtggttttcttgcttatgtaagaagtacatattagtctgccatctttaaaaaaaaatacagtattttcatttaaattctctgatggagggacaacaatggtttcaactgtatgcccatgcctgatcctcttatttgaacatctatcaacattgtaaactctttgccaaaatcctggggctttgctgcattccctaagataattacaggaaaaagaaaatgtaaaagtgctaacaaggctgccaagtaatggagaagtatggttagtcttcatattgaaattctgttgcttattttcatggaaggaaacagaatactttgcacaggaaccacattttcaatcctccttcactgtcttcctaccatgttcagcccagactcctgccacatggaccaggatgaagagggatcaaagagataattagccaaaaacccagtagcctagaagatacaaaactccactggcctctaaaattatattagccaagagtggtttcatttgagtgccttcgtgtgtatgtccatcaaactggaaccaaactgttttgtaagtaaacaggcagcctaagcccaaccctactttctaattccggttattctctttttcatctggggatttacctgttcatttaatctgcctgttttgatctgttttgaaaaagataaagagcctcaaatcagaccagcactgattaattaaccctgctcctaccaatcttttttaaagcagttgaagcagaatgtataggtgtcagagaagaaacctagtcagccagacgtgctctgtattcagcaatagtttgtgaatgaataaattactaatcctccttgtcgcttgaaaccttcccacactccctgctccaggagggaaaaacagatgttgttgacagatagagtgataggcaaattctgtgtggactttagtcccaaaaggaaactttagttcacttgcagtatgcttatccttgactgcacatgagaatgccttgtgcagagttatttggagattatgtctttttcttaaacaccatggctgtcacacttcagttcaattaaatcagaatgtctgaggagtgagacacaggcatcaacactctcaaatgattcacatgttcagccaaagttgagaaccatcgagcctgtggaagttctttctcatggctcagaatcttaggtaggtgcttaactcttgtggtggccagcctccaagatgagccccagtgttcttgcctcctactattcacatctttatgtggtcccctccaatgctgaatacagatgatttgtgtaacctgaggccaggattaaggggaggcaatcaatgtacctagggaaaaaatttaaggaggtattcacactcagggtcatgcacttgcacaatgttgagaatgagtaccactctcaccattggtatagccaaaaaagcttggaagtgaccaaggctaggtcacaaaatacactgtggcttcttctttgatctctctttgaccatactgacactgggaaaagcccattcccatgccatgaagacaccaaggcagccctattgagaaatctacctgtcgtggccgggcgcagtggctcacgcctgtaatcccagcactttgggaggccgaggtgggtggatcacgaggtcaggagatcgagaccatcctggctaacacagtgaaaccccgtctctactaaaaatacaaaaaattagccgggtgtggtgtcgggcacctgtagtcccagctactcaggaggctgaggcaggagaagggtgggaacccgggaggcagagcttgcagtgagccgagattgtgccactgcacactccaatctgggtgaaagaccgagactccgcctcaaaaaaaaaaaaaaaagaaagaaagaaagaaagaaagaaatctacctgtcaaggaactaaggtattttgctaacaagcaccaacttgccagccatgtaagggagccatcttggaagcagatcctccagcctccagtcaagtcttcagataattgcaacttcagttgatcttttgaccaagacctcaagagagccagaactacccagctaagccttttactaaatttctgaacttctaacactattagataataagtgcttattgtttaacaccattaattttgagtataatttgttacatagcgacagataactatacagctcaacaactagaaaaataaactgtttacctgccttaattatttatctttagttccttattagttctcaagaaacaaatgctagcttcatatgtatggctgttgctttgcttcatgtgtatggctatttgtatttaacaagacttaatcatcagtaatttgtatac

SEQ ID NO: 31648 - DNA, 6904 bp, Homo Sapiens
agcgaaatctccgtttcatggaggctgaggcaagagaaaatttcggagcctggatgtggaggagcccaacagcagaactaactcaggaaattgtctttcagaaaaaggccgaacgtaggctgggtctgagaatcaggctggggtaggtggaggaacctgcaagtttaaaggaaaaagaaaaggagagaatattttcagtgattatctctggtttgttatcattactaccatcttaaaggtaaaaagcattgcatttcaggtgttctttgatttttattttatttttttttttggtgcaattggctcatttaagaatttcaaaacatttaatgtaaaagcttttttttttttaaggaagtccataaattttggttcccagggttgcactggacttggaaggagtgctgttgtgtacatactattgtatggttttatttattattttactgtacaaatcagccgaaagaatttttccaagtgccatttcggatttattaatccttttttttttcctttcctcaaagatatttgctgttgtcatattaagcattggagactagaaaattactttccccctttgagctagagggtctcttgccaacagaaggacagctgagaaagctggatttaaaggatggttttatctgtactttgcagttaacagtgatattttgaaggcacatttttctgtgattcatttttttttggccatagtgctaaccttgaagagattcgtggctgggtttttggtttctgagaaggtcgtagtttttcctcttttcctttttttttcttttttcttttcttttctttttttttaaagcgggggaggggaagaggggctgagaaaggaaatcatgttcactggtagaagtagagtggagcatcagttaccagggtcctgagagctggaggagaaaggattctatcttcaagttgggaggccctcctctcaccttgctcaaaaattgcaagcgattcaatcctgatcaagacaccaaagctacaggattctggaaccgtggagacaccgagaaaccatgagtgtaaggttaccccagagtatagacaggttaagtagcctgtcttctctgggagattctgcaccagagcgcaagtccccttcccaccatcgccagccttcggatgcctctgagacaacaggtctcgttcaacgctgtgtcattatccaaaaggaccagcatggcttcggcttcacagtcagtggggatcgcattgttctggtgcagtctgtgcggcctggaggtgcagccatgaaggccggtgtgaaagagggcgaccggatcatcaaagtcaacggcaccatggtgaccaatagctcacacctggaagtggtaaagctgatcaaatctggcgcctatgtcgcactcaccctcctgggctcttcaccttcatccatgggcatctctgggctccagcaggacccatccccagcaggagctccccgaatcacgtcagtgatcccctcaccaccacctcctccacctctaccacctccacaacgcatcacaggacccaaacctctgcaggatcccgaagttcaaaaacatgccacccagatcctcaggaatatgctgaggcaggaagaaaaagaattacagcgtatctgtgaggtctatagccggaaccccgccagcctactggaagagcagatcgaaggtgcccggcggcgagtcactcagttacagctgaagatccagcaggagactggtggctcagtggacatacttccactatatggtgacaccagccagagaccatcagaaggccggctctctctggattcccaggagggggacagtggcttggactctgggacagaacgctttccttccctcagtgagtcattgatgaatcggaactcggtactgtcagaccctgggctagacagtcctcgaacctcccctgtgatcatggccagggtggcccagcaccacaggcggcagggctcggatgcagcagtcccctcaaccggtgaccagggtgtagatcaaagcccaaagcctttaattattggcccagaggaagactatgacccgggttatttcaacaacgagagcgacatcatattccaggatctggagaaactgaagtctcggccagctcacctgggggtttttctacgttacatcttctctcaggcggaccccagtccactgcttttttacctgtgtgcagaagtttatcagcaggcaagccccaaggattcccgaagcttggggaaagacatctggaatattttcctggagaaaaatgcgcctctgagagtgaagatccctgagatgctacaggctgaaattgactcgcgcctgcggaacagcgaagatgcccgtggtgttctctgtgaagctcaagaggcagccatgcctgagatccaagagcagatccacgactacagaacgaagcgcacactggggctgggcagcctgtatggtgaaaatgacctgctggacctggatggggaccctctccgagagcgccaagtggctgagaagcagctggctgcccttggagatattttgtccaagtatgaggaagacaggagcgcccccatggacttcgccctcaatacctacatgagccatgctgggatccgtcttcgagaggcacgaccttccaacacagctgaaaaggcccagtctgctcctgacaaggacaagtggctaccgttcttccctaagaccaagaagagcagcaattccaagaaagaaaaggatgccttggaggacaagaagcgaaaccctatcctcaaatacattgggaagcccaaaagctcttctcaaagcacatttcatattcccttgtcccctgtggaagtcaaaccaggcaatgtgaggaacatcattcagcactttgagaacaaccagcagtatgatgccccagaacctgggacacaacgactctcgaccggaagctttcctgaggacctgctggagagtgacagttcacgctcagagattcgcctgggccgctctgaaagcctcaagggccgggaagagatgaaacggtctcgaaaggcagagaacgtgccccgctctcgcagtgatgttgacatggatgctgctgcggaggctactcgcctgcaccagtcagcctcgtcctctacctccagcctctccaccaggtctcttgagaacccaacccctccattcactcccaaaatgggccgcaggagcattgagtcccccagtttggggttctgcacagataccctccttccccacctcctagaggatgatctgggccagctgtctgacctggagccagagccagatgcccaaaattggcagcatacagtgggcaaggatgtggtggctgggctaacccagcgggagattgaccggcaagaggtcatcaatgagctgtttgtgactgaagcttcccacctgcgcacactccgggtcctggacctgatcttctaccagcgaatgaagaaggagaacctgatgccccgggaggagctggcccggctcttcccgaacctgcctgaactcatagagattcacaattcctggtgtgaagccatgaagaagctccgggaggaaggccccatcatcaaagagatcagtgacctcatgctggcccggtttgatggccctgcccgagaggaactccagcaagtggctgcacagttctgttcctatcagtcaatagccctagagctaatcaagaccaagcaacgcaaggagagtcgattccagctcttcatgcaggaggctgagagccaccctcagtgtcggcggctgcagctgagagacctcatcatctctgagatgcagcggctcaccaagtacccgctgctgctggagagcatcatcaagcacacagagggtggcacctctgagcatgagaagctgtgccgggcccgggaccagtgccgggagattctcaagtatgtgaatgaagcggtaaaacaaacagagaaccgccaccgtttagagggctaccagaaacgcctggatgccaccgccctggagagggccagcaaccccctggcagcagagttcaagagcctggatcttacaaccagaaaaatgatccatgagggacccctgacctggaggatcagcaaggataagaccttggacctccacgtgctgctgctggaggacctcctagtgctgctacagaaacaggatgagaagctattgctgaagtgccacagcaagactgctgtgggctcctcagacagcaagcagaccttcagccccgtgctcaagctcaatgctgtgctcatccgctctgtggccacagataaacgggccttcttcatcatctgcacctccaagctgggcccaccccagatctatgagctggttgcattgacgtcatcagacaagaacacatggatggagctcttagaagaggccgtgcggaatgccaccaggcaccccggagctgccccaatgcccgtccatcctccacccccaggtccccgggagccagcccagcagggccccacacccagcagggtagaactggatgactcagacgtgttccatggtgaacctgaacctgaggagctgcctggaggcactgggtcccagcagagggtccaagggaagcaccaggtcctgctagaggaccctgagcaggagggcagtgcagaggaagaggaactgggtgtcctgccttgcccttccacatccctggatggagagaacaggggcatcaggacaaggaaccccatccacttggccttcccaggccctctgttcatggaagggctcgctgactccgctctggaagatgtggagaacctgcgacatctgatcctgtggagcctgctgccaggtcacaccatggaaactcaggctgcccaggagcccgaggacgacctgacacccacaccttctgtcatcagcgtcacctctcacccctgggacccaggctccccagggcaagcaccccctgggggtgaaggggacaacacccagcttgcagggctggagggggaacggccagagcaggaagacatgggtctctgttctctggaacacctacccccaaggaccagaaattctgggatatgggagtctccagaactggacaggaatctggctgaagatgcttcaagcacagaggcagcaggaggttacaaagttgtgagaaaagctgaggtggcaggcagcaaggttgtccctgcactaccagagagtggccagtcagagcctgggccacctgaagtggaaggcggaacaaaggctacggggaactgcttttatgtcagcatgccatcaggacccccggactcaagcaccgaccactcagaggcacccatgagcccccctcagcctgacagcctccctgcagggcagacagagcctcagcctcagctgcagggaggcaacgatgatccaagacgccccagccgctctcctccaagcctggccctcagggacgtgggcatgatcttccataccattgagcagctcactctcaagctcaacaggctcaaggatatggagctggcccacagagagctgctcaagtcccttgggggagagtcatctggtggcaccacgcctgtgggcagtttccacacagaagcagctagatggacagatggctccctctcacctcccgctaaggagcccctagcttctgactccaggaacagccatgaactggggccctgccctgaggatggctctgacgcccccctggaagacagcacagcagacgcagccgcgtcaccaggaccataaccgtacaaaccaccaaatcctctgcgtccccactcctccttcagggactggcctgagaccggggcacagggtaggggggatcccaacactcctccctgtggaggaggcagttagggaaactaggatccagccaaggcccggggggagacccgcatgttgcttggtctgctcaagtcggagtcaggtttcagtgtcttttccctcccttagcccaaccctccaaggcctcatgtctcctaagcatgctgactgcatccgaaaggcccccactcaccatggtctgccctcaccccacatatgtgtgtacacgcgcacgcctgtatgtgcgctgccctcagacatgcaagtgaaaggaggaggcttctgtgtaaatgcactttcttcctcccctctttctccataagaccccaggcagaggtgggtgcctcccctcccctctttgtcactttggtttcctataaatatgtatgtatcgtatgtgcatctttgctattgtaaataactttgaccttttttgttcctgttcctgaagtgctggaggcagttatggaaggagctgcttagggaagaggggtttcacttgtatctccttagttaacaacccagttccaggatcgagcctaaagcgggagccaggcctgagtgttcctgtccctgtgagtgggaaggtcttctggctccccatcccacctggctccagagcctgccctccacagcttgctgccaagctactccctccctccctggacttctcatcttcacaagatggggatcatgggggtttcttaccccacctatgtccccctcttccccaccctgtccctgtagaaaaccagtgaagcaggtacggagctgaggactgggccccaggaggtggggacaggggtctgaatgccgagtccctgaattcacccaggaccatccaaggggccaccgcagcattggccccatcaccacgtcctcacccaactctccctgatgaatagaatatacacactgtgctaggtgtatatatacatatatatatatataaatatatatataatatataaaatatagatatggaaatgactgttctgctgttaagataatgtatactcttttattttcttcctttcatggttaagattttttttttaagaaaagttaaatatccttcaaaaaaaaaaaaaaaa

SEQ ID NO: 31649 - DNA, 5463 bp, Homo Sapiens
gaagcggtggccgccgagcgggatctgtgcggggagccggaaatggttgtggactacgtctgtgcggctgcgtggggctcggccgcgcggactgaaggagactgaaggccctcggatgcccagaacctgtaggccgcaccgtggacttgttcttaatcgagggggtgctggggggaccctgatgtggcaccaaatgaaatgaacaaagctccacagtccacaggccccccacccgccccatcccccggactcccacagccagcgtttcccccggggcagacagcgccggtggtgttcagtacgccacaagcgacacaaatgaacacgccttctcagccccgccagcacttctaccctagccgggcccagcccccgagcagtgcagcctcccgagtgcagagtgcagcccctgcccgccctggcccagctgcccatgtctaccctgctggatcccaagtaatgatgatcccttcccagatctcctacccagcctcccagggggcctactacatccctggacaggggcgttccacatacgttgtcccgacacagcagtaccctgtgcagccaggagccccaggcttctatccaggtgcaagccctacagaatttgggacctacgctggcgcctactatccagcccaaggggtgcagcagtttcccactggcgtggcccccgccccagttttgatgaaccagccaccccagattgctcccaagagggagcgtaagacgatccgaattcgagatccaaaccaaggaggaaaggatatcacagaggagatcatgtctggggcccgcactgcctccacacccacccctccccagacgggaggcggtctggagcctcaagctaatggggagacgccccaggttgctgtcattgtccggccagatgaccggtcacagggagcaatcattgctgaccggccagggctgcctggcccagagcatagcccttcagaatcccagccttcgtcgccttctccgaccccatcaccatccccagtcttggaaccggggtctgagcctaatctcgcagtcctctctattcctggggacactatgacaactatacaaatgtctgtagaagaatcaacccccatctcccgtgaaactggggagccatatcgcctctctccagaacccactcctctcgccgaacccatactggaagtagaagtgacacttagcaaaccggttccagaatctgagttttcttccagtcctctccaggctcccacccctttggcatctcacacagtggaaattcatgagcctaatggcatggtcccatctgaagatctggaaccagaggtggagtcaagcccagagcttgctcctcccccagcttgcccctccgaatcccctgtgcccattgctccaactgcccaacctgaggaactgctcaacggagccccctcgccaccagctgtggacttaagcccagtcagtgagccagaggagcaggccaaggaggtgacagcatcaatggcgccccccaccatcccctctgctactccagctacggctccttcagctacttccccagctcaggaggaggaaatggaagaagaagaagaagaggaagaaggagaagcaggagaagcaggagaagctgagagtgagaaaggaggagaggaactgctccccccagagagtacccctattccagccaacttgtctcagaatttggaggcagcagcagccactcaagtggcagtatctgtgccaaagaggagacggaaaattaaggagctaaataagaaggaggctgttggagaccttctggatgccttcaaggaggcgaacccggcagtaccagaggtggaaaatcagcctcctgcaggcagcaatccaggcccagagtctgagggcagtggtgtgcccccacgtcctgaggaagcagatgagacctgggactcaaaggaagacaaaattcacaatgctgagaacatccagcccggggaacagaagtatgaatataagtcagatcagtggaagcctctaaacctagaggagaaaaaacgttacgaccgtgagttcctgcttggttttcagttcatctttgccagtatgcagaagccagagggattgccacatatcagtgacgtggtgctggacaaggccaataaaacaccactgcggccactggatcccactagactacaaggcataaattgtggcccagacttcactccatcctttgccaaccttggccggacaacccttagcacccgtgggcccccaaggggtgggccaggtggggagctgccccgtgggccggctggcctgggaccccggcgctctcagcagggaccccgaaaagaaccacgcaagatcattgccacagtgttaatgaccgaagatataaaactgaacaaagcagagaaagcctggaaacccagcagcaagcggacggcggctgataaggatcgaggggaagaagatgctgatggcagcaaaacccaggacctattccgcagggtgcgctccatcctgaataaactgacaccccagatgttccagcagctgatgaagcaagtgacgcagctggccatcgacaccgaggaacgcctcaaaggggtcattgacctcatttttgagaaggccatttcagagcccaacttctctgtggcctatgccaacatgtgccgctgcctcatggcgctgaaagtgcccactacggaaaagccaacagtgactgtgaacttccgaaagctgttgttgaatcgatgtcagaaggagtttgagaaagacaaagatgatgatgaggtttttgagaagaagcaaaaagagatggatgaagctgctacggcagaggaacgaggacgcctgaaggaagagctggaagaggctcgggacatagcccggcggcgctctttagggaatatcaagtttattggagagttgttcaaactgaagatgttaacagaggcaataatgcatgactgtgtggtcaaactgcttaagaaccatgatgaagagtcccttgagtgcctttgtcgtctgctcaccaccattggcaaagacctggactttgaaaaagccaagccccgaatggatcagtatttcaaccagatggaaaaaatcattaaagaaaagaagacgtcatcccgcatccgctttatgctgcaggacgtgctggatctgcgagggagcaattgggtgccacgccgaggggatcagggtcccaagaccattgaccagatccataaggaggctgagatggaagaacatcgagagcacatcaaagtgcagcagctcatggccaagggcagtgacaagcgtcggggcggtcctccaggccctcccatcagccgtggacttccccttgtggatgatggtggctggaacacagttcccatcagcaaaggtagccgccccattgacacctcacgactcaccaagatcaccaagcctggctccatcgattctaacaaccagctctttgcacctggagggcgactgagctggggcaagggcagcagcggaggctcaggagccaagccctcagacgcagcatcagaagctgctcgcccagctactagtactttgaatcgcttctcagcccttcaacaagcggtacccacagaaagcacagataatagacgtgtggtgcagaggagtagcttgagccgagaacgaggcgagaaagctggagaccgaggagaccgcctagagcggagtgaacggggaggggaccgtggggaccggcttgatcgtgcgcggacacctgctaccaagcggagcttcagcaaggaagtggaggagcggagtagagaacggccctcccagcctgaggggctgcgcaaggcagctagcctcacggaggatcgggaccgtgggcgggatgccgtgaagcgagaagctgccctacccccagtgagccccctgaaggcggctctctctgaggaggagttagagaagaaatccaaggctatcattgaggaatatctccatctcaatgacatgaaagaggcagtccagtgcgtgcaggagctggcctcaccctccttgctcttcatctttgtacggcatggtgtcgagtctacgctggagcgcagtgccattgctcgtgagcatatggggcagctgctgcaccagctgctctgtgctgggcatctgtctactgctcagtactaccaagggttgtatgaaatcttggaattggctgaggacatggaaattgacatcccccacgtgtggctctacctagcggaactggtaacacccattctgcaggaaggtggggtgcccatgggggagctgttcagggagattacaaagcctctgagaccgttgggcaaagctgcttccctgttgctggagatcctgggcctcctgtgcaaaagcatgggtcctaaaaaggtggggacgctgtggcgagaagccgggcttagctggaaggaatttctacctgaaggccaggacattggtgcattcgtcgctgaacagaaggtggagtataccctgggagaggagtcggaagcccctggccagagggcactcccctccgaggagctgaacaggcagctggagaagctgctgaaggagggcagcagtaaccagcgggtgttcgactggatagaggccaacctgagtgagcagcagatagtatccaacacgttagttcgagccctcatgacggctgtctgctattctgcaattatttttgagactcccctccgagtggacgttgcagtgctgaaagcgcgagcgaagctgctgcagaaatacctgtgtgacgagcagaaggagctacaggcgctctacgccctccaggcccttgtagtgaccttagaacagcctcccaacctgctgcggatgttctttgacgcactgtatgacgaggacgtggtgaaggaggatgccttctacagttgggagagtagcaaggaccccgctgagcagcagggcaagggtgtggcccttaaatctgtcacagccttcttcaagtggctccgtgaagcagaggaggagtctgaccacaactgagggctggtggggccggggacctggagccccatggacacacagatggcccggctagccgcctggactgcaggggggcggcagcagcggcggtggcagtgggtgcctgtagtgtgatgtgtctgaactaataaagtggctgaagaggcaggatggcttggggctgcctgggcccccctccaggatgccgccaggtgtccctctcctccccctggggcacagagatatattatatataaagtcttgaaatttggtgtgtcttggggtggggaggggcaccaacgcctgcccctggggtccttttttttattttctgaaaatcactctcgggactgccgtcctcgctgctgggggcatatgccccagcccctgtaccacccctgctgttgcctgggcagggggaagggggggcacggtgcctgtaattattaaacatgaattcaattaagctcaaaaaaaaaaaaaaaa

SEQ ID NO: 31650 - DNA, 8082 bp, Homo Sapiens
gcagagtctgcagtgcggagggggcgggaagtccaggccccgcactcgatccacgctggctccctacggaggcccacctactcgaggcccaccgactcctactgcaatcagtactatgcgatcgtcctagagagtccattcagctgcacttccgcctcagtatggcatcacagctgcaagtgttttcgcccccatcagtgtcgtcgagtgccttctgcagtgcgaagaaactgaaaatagagccctctggctgggatgtttcaggacagagtagcaacgacaaatattatacccacagcaaaaccctcccagccacacaagggcaagccaactcctctcaccaggtagcaaatttcaacatccctgcttacgaccagggcctcctcctcccagctcctgcagtggagcatattgttgtaacagccgctgatagctcgggcagtgctgctacatcaaccttccaaagcagccagaccctgactcacagaagcaacgtttctttgcttgagccatatcaaaaatgtggattgaaacgaaaaagtgaggaagttgacagcaacggtagtgtgcagatcatagaagaacatccccctctcatgctgcaaaacaggactgtggtgggtgctgctgccacaaccaccactgtgaccacaaagagtagcagttccagcggagaaggggattaccagctggtccagcatgagatcctttgctctatgaccaatagctatgaagtcttggagttcctaggccgggggacatttggacaggtggctaagtgctggaagaggagcaccaaggaaattgtggctattaaaatcttgaagaaccacccctcctatgccagacaaggacagattgaagtgagcatcctttcccgcctaagcagtgaaaatgctgatgagtataattttgtccgttcatacgagtgctttcagcataagaatcacacctgccttgtttttgaaatgttggagcagaacttatatgattttctaaagcaaaacaaatttagcccactgccactcaagtacatcagaccaatcttgcagcaggtggccacagccttgatgaagctcaagagtcttggtctgatccacgctgaccttaagcctgaaaacatcatgctggttgatccagttcgccagccctaccgagtgaaggtcattgactttggttctgctagtcacgtttccaaagctgtgtgctcaacctacttacagtcacgttactacagagctcctgaaattattcttgggttaccattttgtgaagctattgatatgtggtcactgggctgtgtgatagctgagctgttcctgggatggcctctttatcctggtgcttcagaatatgatcagattcgttatatttcacaaacacaaggcttgccagctgaatatcttctcagtgccggaacaaaaacaaccaggtttttcaacagagatcctaatttggggtacccactgtggaggcttaagacacctgaagaacatgaactggagactggaataaaatcaaaagaagctcggaagtacatttttaattgcttagatgacatggctcaggtgaatatgtctacagacctggagggaacagacatgttggcagagaaggcagaccgaagagaatacattgatctgttaaagaaaatgctcacaattgatgcagataagagaattacccctctaaaaactcttaaccatcagtttgtgacaatgactcaccttttggattttccacatagcaatcatgttaagtcttgttttcagaacatggagatctgcaagcggagggttcacatgtatgatacagtgagtcagatcaagagtcccttcactacacatgttgccccaaatacaagcacaaatctaaccatgagcttcagcaatcagctcaatacagtgcacaatcaggccagtgttctagcttccagttctactgcagcagctgctactctttctctggctaattcagatgtctcactactaaactaccagtcagctttgtacccatcatctgctgcaccagttcctggagttgcccagcagggtgtttccttgcagcctggaaccacccagatttgcactcagacagatccattccaacagacatttatagtatgtccacctgcgtttcaaactggactacaagcaacaacaaagcattctggattccctgtgaggatggataatgctgtaccgattgtaccccaggcaccagctgctcagccactacagattcagtcaggagttctcacgcagggaagctgtacaccactaatggtagcaactctccaccctcaagtagccaccatcacaccgcagtatgcggtgccctttactctgagctgcgcagccggccggccggcgctggttgaacagactgccgctgtactgcaggcgtggcctggagggactcagcaaattctcctgccttcaacttggcaacagttgcctggggtagctctacacaactctgtccagcccacagcaatgattccagaggccatggggagtggacagcagctagctgactggaggaatgcccactctcatggcaaccagtacagcactatcatgcagcagccatccttgctgactaaccatgtgacattggccactgctcagcctctgaatgttggtgttgcccatgttgtcagacaacaacaatccagttccctcccttcgaagaagaataagcagtcagctccagtctcttccaagtcctctctagatgttctgccttcccaagtctattctctggttgggagcagtcccctccgcaccacatcttcttataattccttggtccctgtccaagatcagcatcagcccatcatcattccagatactcccagccctcctgtgagtgtcatcactatccgaagtgacactgatgaggaagaggacaacaaatacaagcccagtagctctggactgaagccaaggtctaatgtcatcagttatgtcactgtcaatgattctccagactctgactcttctttgagcagcccttattccactgataccctgagtgctctccgaggcaatagtggatccgttttggaggggcctggcagagttgtggcagatggcactggcacccgcactatcattgtgcctccactgaaaactcagcttggtgactgcactgtagcaacccaggcctcaggtctcctgagcaataagactaagccagtcgcttcagtgagtgggcagtcatctggatgctgtatcacccccacagggtatcgagctcaacgcggggggaccagtgcagcacaaccactcaatcttagccagaaccagcagtcatcggcggctccaacctcacaggagagaagcagcaacccagccccccgcaggcagcaggcgtttgtggcccctctctcccaagccccctacaccttccagcatggcagcccgctacactcgacagggcacccacaccttgccccggcccctgctcacctgccaagccaggctcatctgtatacgtatgctgccccgacttctgctgctgcactgggctcaaccagctccattgctcatcttttctccccacagggttcctcaaggcatgctgcagcctataccactcaccctagcactttggtgcaccaggtccctgtcagtgttgggcccagcctcctcacttctgccagcgtggcccctgctcagtaccaacaccagtttgccacccaatcctacattgggtcttcccgaggctcaacaatttacactggatacccgctgagtcctaccaagatcagccagtattcctacttatagttggtgagcatgagggaggaggaatcatggctaccttctcctggccctgcgttcttaatattgggctatggagagatcctcctttaccctcttgaaatttcttagccagcaacttgttctgcaggggcccactgaagcagaaggtttttctctgggggaacctgtctcagtgttgactgcattgttgtagtcttcccaaagtttgccctatttttaaattcattatttttgtgacagtaattttggtacttggaagagttcagatgcccatcttctgcagttaccaaggaagagagattgttctgaagttaccctctgaaaaatattttgtctctctgacttgatttctataaatgcttttaaaaacaagtgaagcccctctttatttcattttgtgttattgtgattgctggtcaggaaaaatgctgatagaaggagttgaaatctgatgacaaaaaaagaaaaattactttttgtttgtttataaactcagacttgcctattttattttaaaagcggcttacacaatctcccttttgtttattggacatttaaacttacagagtttcagttttgttttaatgtcatattatacttaatgggcaattgttatttttgcaaaactggttacgtattactctgtgttactattgagattctctcaattgctcctgtgtttgttataaagtagtgtttaaaaggcagctcaccatttgctggtaacttaatgtgagagaatccatatctgcgtgaaaacaccaagtattctttttaaatgaagcaccatgaattcttttttaaattattttttaaaagtctttctctctctgattcagcttaaatttttttatcgaaaaagccattaaggtggttattattacatggtggtggtggttttattatatgcaaaatctctgtctattatgagatactggcattgatgagctttgcctaaagattagtatgaattttcagtaatacacctctgttttgctcatctctcccttctgttttatgtgatttgtttggggagaaagctaaaaaaacctgaaaccagataagaacatttcttgtgtatagcttttatacttcaaagtagcttcctttgtatgccagcagcaaattgaatgctctcttattaagacttatataataagtgcatgtaggaattgcaaaaaatattttaaaaatttattactgaatttaaaaatattttagaagttttgtaatggtggtgttttaatattttacataattaaatatgtacatattgattagaaaaatataacaagcaatttttcctgctaacccaaaatgttatttgtaatcaaatgtgtagtgattacacttgaattgtgtacttagtgtgtatgtgatcctccagtgttatcccggagatggattgatgtctccattgtatttaaaccaaaatgaactgatacttgttggaatgtatgtgaactaattgcaattatattagagcatattactgtagtgctgaatgagcaggggcattgcctgcaaggagaggagacccttggaattgttttgcacaggtgtgtctggtgaggagtttttcagtgtgtgtctcttccttccctttcttcctccttcccttattgtagtgccttatatgataatgtagtggttaatagagtttacagtgagcttgccttaggatggaccagcaagcccccgtggaccctaagttgttcaccgggatttatcagaacaggattagtagctgtattgtgtaatgcattgttctcagtttccctgccaacattgaaaaataaaaacagcagcttttctcctttaccaccacctctacccctttccattttggattctcggctgagttctcacagaagcattttccccatgtggctctctcactgtgcgttgctaccttgcttctgtgagaattcaggaagcaggtgagaggagtcaagccaatattaaatatgcattcttttaaagtatgtgcaatcacttttagaatgaatttttttttccttttcccatgtggcagtccttcctgcacatagttgacattcctagtaaaatatttgcttgttgaaaaaaacatgttaacagatgtgtttataccaaagagcctgttgtattgcttaccatgtccccatactatgaggagaagttttgtggtgccgctggtgacaaggaactcacagaaaggtttcttagctggtgaagaatatagagaaggaaccaaagcctgttgagtcattgaggcttttgaggtttcttttttaacagcttgtatagtcttggggcccttcaagctgtgaaattgtccttgtactctcagctcctgcatggatctgggtcaagtagaaggtactggggatggggacattcctgcccataaaggatttggggaaagaagattaatcctaaaatacaggtgtgttccatctgaattgaaaatgatatatttgagatataattttaggactggttctgtgtagatagagatggtgtcaaggaggtgcaggatggagatgggagatttcatggagcctggtcagccagctctgtaccaggttgaacaccgaggagctgtcaaagtatttggagtttcttcattgtaaggagtaagggcttccaagatggggcaggtagtccgtacagcctaccaggaacatgttgtgttttctttattttttaaaatcattatattgagttgtgttttcagcactatattggtcaagatagccaagcagtttgtataatttctgtcactagtgtcatacagttttctggtcaacatgtgtgatctttgtgtctcctttttgccaagcacattctgattttcttgttggaacacaggtctagtttctaaaggacaaattttttgttccttgtcttttttctgtaagggacaagatttgttgtttttgtaagaaatgagatgcaggaaagaaaaccaaatcccattcctgcaccccagtccaataagcagataccacttaagataggagtctaaactccacagaaaaggataataccaagagcttgtattgttaccttagtcacttgcctagcagtgtgtggctttaaaaactagagatttttcagtcttagtctgcaaactggcatttccgattttccagcataaaaatccacctgtgtctgctgaatgtgtatgtatgtgctcactgtggctttagattctgtccctggggttagccctgttggccctgacaggaagggaggaagcctggtgaatttagtgagcagctggcctgggtcacagtgacctgacctcaaaccagcttaaggctttaagtcctctctcagaacttggcatttccaacttcttcctttccgggtgagagaagaagcggagaagggttcagtgtagccactctgggctcatagggacacttggtcactccagagtttttaatagctcccaggaggtgatattattttcagtgctcagctgaaataccaaccccaggaataagaactccatttcaaacagttctggccattctgagcctgcttttgtgattgctcatccattgtcctccactagaggggctaagcttgactgcccttagccaggcaagcacagtaatgtgtgttttgttcagcattattatgcaaaaattcactagttgagatggtttgttttaggataggaaatgaaattgcctctcagtgacaggagtggcccgagcctgcttcctattttgattttttttttttttaactgatagatggtgcagcatgtctacatggttgtttgttgctaaactttatataatgtgtggtttcaattcagcttgaaaaataatctcactacatgtagcagtacattatatgtacattatatgtaatgttagtatttctgctttgaatccttgatattgcaatggaattcctactttattaaatgtatttgatatgctagttattgtgtgcgatttaaactttttttgctttctccctttttttggttgtgcgctttcttttacaacaagcctctagaaacagatagtttctgagaattactgagctatgtttgtaatgcagatgtacttagggagtatgtaaaataatcattttaacaaaagaaatagatatttaaaatttaatactaactatgggaaaagggtccattgtgtaaaacatagtttatctttggattcaatgtttgtctttggttttacaaagtagcttgtattttcagtattttctacataatatggtaaaatgtagagcaattgcaatgcatcaataaaatgggtaaattttctga

SEQ ID NO: 31651 - DNA, 8776 bp, Homo Sapiens
ggtggcgacggcgagcacagaaacgatggagttgagccagtcgaccctggttggaagcaagtgagaagagaccaggcgcacccctaaatttctgtgcggagcgcttgtcatcctccccagggaacggtgcacccaaaggaggactggctggactgatttgctagggagagggcggggaagaggaggcaaggtgagcagagaagccccctgcgtatccggactgccagatcgcgcttttgccggactcctgccccctccctgctcaggtgggcgcgcccggtctccagctcacaggggcgcttggaggagaccagaaagtcgccgcctggctgcgcgggatgcctttcgccaagcggatcgtggagccgcaatggctgtgcaggcagcggcgccctgcgcccggcccagcagtggacgcgagcggaggcagcgctgagccgccgccgcccttgcagccgccgggccggagggacctggacgaggtcgaggcgccagggccagaggagccagcccgcgccgtccctgcaccttcagggctgccaccgccgccgccgccactgcccgcgccggccgaccagactcagccgccgcacggagaggcgtccgtggctggcgaggagagcacggcggggatcccggaggcggcgcccgcagccggcgaggcgtcctcggcggcggcggcggcggccgtgctgctcatgctggacctatgcgcggtcagcaacgccgctctggcccgtgtcctccggcagctctcggacgtggcccggcacgcttgcagcctcttccaggagctcgagagcgacatccagctcacccaccgccgcgtctgggcgctgcagggcaagctcggcggcgtgcagcgcgtcctcagcacgcttgaccctaagcaggaggcagtgcccgtctccaacctggacatagagagtaagctgagtgtgtactaccgcgccccgtggcaccagcagcgcaacatcttcctcccagccacaaggccaccctgcgtggaggagctgcaccgccacgcccggcagagcctgcaagccctgcgcagagaacaccggagccggagcgatcgccgagagcaaagagcagctgcccccctttccattgcagctcctccactgccagcctaccctccagctcacagccagaggaggcgtgagtttaaggaccgtcactttttaacgtcccatcccccagaggatgaagatacagatgtcatgttagggcagaggccgaaaaacccaatacacaatatcccttccacactggacaagcagaccaactggagcaaagcactacctctcccgacgccagaggagaagatgaaacaagatgcccaagtgatttcttcttgcattattcccatcaatgttactggagttggctttgacagagaggctagtatacgctgctctctggttcattcacaatcggtactacagcggagacgaaaattgaggaggaggaaaaccatctcgggtatccccagaagagttcaacaagaaatagattctgatgaatcaccagtggccagggaaaggaatgtgattgtgcacacaaacccagacccctccaacactgtcaataggatatccggaaccagggactctgagtgccaaaccgaggatattctgattgctgccccatccagaaggagaatcagagctcaaaggggtcaaagcattgcagcttccctttctcattctgctggcaacatttctgccctagcagacaaaggtgacaccatgtttactcctgcagtgagcagccgcacaagatctcggagccttccccgggaaggtaatagaggtggggatgctgagcccaaagttggcgctaaaccctcagcatatgaagagggagagtcttttgtgggtgaccatgaaagaacccctaatgatttcagtgaggctccaagcagcccgagtgcccaggaccaccagcctactttgggcctggcctgctctcaacatcttcacagcccccagcacaaattaagtgagaggggaaggtcacgtctgtcccgaatggctgctgactctggcagctgtgacatctcctccaactcagacacgtttgggagccccatccactgcatctccacggctggcgtcctccttagcagccacatggaccagaaagatgaccaccagtcatccagtggcaactggagtgggagcagctccacgtgcccctcgcagacctcagaaaccatccctcctgcagcttctcctccactcactggctcttcacactgtgactcggagttgtcactaaacacagcccctcatgccaatgaggatgccagtgttttcgtgacagagcaatacaatgaccacttggataaagtgagaggccatcgggcaaactcctttacctccactgttgcagacctgctggatgatcccaacaacagcaacacaagtgacagtgagtggaattacctacaccaccaccatgatgcctcctgccgccaggattttagtcctgagcgtcccaaggcagacagcctgggctgcccaagcttcacaagcatggccacttatgacagctttctggaaaagtctccatcagacaaagcggacactagctctcacttttcagtagacacggaaggatactatacctccatgcactttgactgtggtctcaaaggtaataagagctatgtctgtcactatgcagccctgggcccagagaatggccagggtgtaggggcttcccctggtcttccagattgtgcctggcaggactacttagaccacaagaggcagggaagaccaagcatctctttcaggaaaccaaaggcaaagccgaccccacctaaacgtagctcatcattgaggaagtctgatggaaacgcagatatttctgagaagaaagaaccaaagataagcagtggtcagcacctgcctcacagttccagggaaatgaagctgcctcttgatttcgccaacacgccttctcgaatggaaaacgccaatcttcccaccaagcaggaaccttcttggataaaccagagtgaacaaggcattaaggaacctcagttagatgcttcggatattccaccattcaaagatgaagttgccgaatccacacactatgcagacctctggctcctaaatgacttgaaaacaaatgatccttatagatctctatctaattcaagcaccgctacgggtaccacagtcattgaatgcatcaaatctccagagagctctgaatcccaaacatcacaatcagaatcaagagccaccaccccatctcttccttctgttgacaatgagtttaaactggcttcaccagaaaagctggctggcttggcatctccatcaagtggctattcaagccagtctgaaacgccaacatcctctttccctacagctttcttttcaggtccattgtctcccggaggtagcaaaagaaaacctaaagtcccagaaagaaaatcctcactacagcaaccctctttaaaagatggaactatatcactgagtaaagaccttgaacttccaattatacctcctacccatcttgatctaagtgctcttcataatgtcttgaacaaaccattccaccaccgtcatccactgcatgtttttactcataataagcagaacacagtaggagaaacactgaggtcgaatcctccaccgtcccttgcaattacaccaacgatcctgaaatctgttaaccttaggtccatcaacaagtctgaagaagttaagcaaaaagaagaaaacaatacagatctcccttatttagaggaaagcacactcacaacggctgccttgtctccaagtaagattaggccgcatacagcaaataaatcagtatctcgtcaatactccactgaagacaccatactgtcctttttagactcttctgcagttgagatgggaccagataaactacatttagaaaaaaactctacttttgatgtgaagaatcgctgcgatccagaaaccataacatcagctggtagcagtcttctagattcaaatgtcacaaaagaccaagtgcgtacagagactgagcctattccagaaaacacgccaaccaaaaactgtgcttttcccacagaaggatttcagagggtctctgctgcccgcccaaatgatttggatggtaaaataatacaatatggacctggtccagacgaaactctagaacaggtacagaaggcaccctctgcaggtctggaggaagttgcacaacctgaatctgtggatgtaatcacatctcagtcagactcaccaactagagcaacagatgtaagcaatcaatttaagcatcaatttgttatgagccgccaccatgacaaagtgcctggtactatcagctatgaatcggagataacatctgtaaattcattccctgaaaaatgttccaagcaggaaaatattgcttcaggtatttcagccaaaagtgcctctgataacagcaaagcagaggagacccaaggaaatgtggatgaggcttcattgaaagaatcatcaccgagtgatgactccatcatttcaccacttagtgaagactcccaagctgaagcagagggtgtgttcgtgtctccaaacaaacctcgaacaactgaggatttatttgcagtcattcacagatccaagaggaaagtacttggaagaaaagattccggggacatgtctgttcgaagcaaatcgagagctcccctcagcagtagcagcagcagcgccagttccatcacttcacccagcagtaatgtgacaacccccaacagccagaggtctcctggtctcatataccgaaatgccaaaaagtccaacacatccaatgaagagtttaagctgttactgctcaagaaaggcagtcgctcagattctagttaccgcatgtctgccactgagatcctgaagagccccatactgcccaaacctcctggggagctcacagcagagtcccctcagagcaccgatgatgcccatcaggggtcacaaggggctgaggcattgtccccactctctccatgctccccacgagttaatgcagaaggcttttcctcgaagagctttgccacctcagcatcagcaagggttggacgttctcgggcccctcctgcagccagcagcagccgctacagtgtccgctgccggctgtacaatacgcccatgcaggcaatctccgagggagagacggaaaattctgacgggagcccacatgacgaccgttcctcccagagttcaacatagactgcctgtaccaggctgcctggcaaaggccaaaacccttactcacatgaggatggaggaacagaacagaggacttgggaaaagtctcaacttgatggggtagcatcactgctaagcaatgaatgaatttctaaatacagtatgtgctgggtaaacagaaagtggtttagacattcttgattagtttccatattttaagtagctgcagtctttcatgtttttctttagcatagtttgatttacgcaatctccttccttgtgaaaatagaggatacaaaattgtctaattttcatgacacctagaaaacgttttcccagagctgcctattcagaaactaaagccctcactgtcattattctttaagaagatgaaattactctggatgtttggtatttttttacattaaaacaaactaaagcaaaatttagaagaaagaactacacatatgtaaataccatatttttgataaaaatgtgtaaatagatttatcaatgatgagtggacatgtggtcaattatctactgcacaccaactgtttatagaatacacaaaaataaaatgtaataactgtattctgtgaataccattttcatatcaaatgccatatttaaatgtccaccaatatgatttctgagtggtaaacctcaaatatgaattttaaactggtgaactaaaggaaatcttgaggtcatatactgaaatatgaataaattaaaataatgaattcagatctaatcatttttatgacaaattgcagcaccaaacaaactaatagcaacccatggctgtgatttgttgtgtggtaatttggacagaatgaaaagcatgcttttgattttttttttaatcagtgagagaagtcatcattctcaacacaaagccctgaacaacagcatttgacagtgtcctttagattttaattttttcaatggattgctttaaagagaatgagtagggaaaatagtagttaattttaggttatgttttatattaggctactggggacataaacggtcataactaatgactgtaatcattaaactccttaaacagtttagaaattagctccaggttcttaaactaacaaaaataaaacctaagcatgccacagagctattgattaatcagtaagtacctgtaatgagttttcagtgaagctttctctctgtgctgatgagattcatgctacctaaaaattaacagaaatgacactgtgaacaatgtagttggaaaataggtatgtgtatatgcattatttatactcattgttaaactgggaatggggaacagctctggttcacaatactacatacaactgagtttttgtctggttttactatagtgtctgcttgatggcaaaaggggagggtggagggtgggagaggaaatgtcagggcatgtgctctgataaaataaaggcagggaaacaagctgaattacttgaaattacttgaattttcttgtcttaaaactgaaaaaaaaatgtagttacacgttaaaatctgcaaatggtttttacacctctgattttaacatgaacttatactaatgtttggaatcttatgtcagaaatataagcagctatgtacttagaataggttttgaatgggagaggtagaacagagagagaattaagaagggatctgacttataaaagactagaatgtgattagagtgatagaacataccaatgttaccaagaaattgacaagctgctggctttaagcttatgcaagtggtagttgggaaagtaggaggtgtggaagagggtttgcattttggattaattcatgcaaaatgaaggaggaagcctggtctaagaagatactgtctttcaatagaaatgatttctaaactgctacagattaagaatagataatctgattgctgttgttttgtttgtttggaaagaaaaaaaatgtctggcttcttctactatttgttttcactaccaaactgtgttactaaatttcttgtcatccttgtatgtaaaatgggtgctgggggtggaggggtataagaggagggagagtcagagagagtgtgtatgggtgtgtgtgagtgtgagtgtgtgtgtacgcacacacactggggatagataagctacctggtaaagggtttgaacatttacaaaatgtcacactttttcttaaaagaaaaatattttggggtttgaataaaatggaccaccatttctcattggaacccattaattaagaaaaccagcatggtttgacaccacatgggaacatgaataaatctgtctcatgatttgaaaagtacaccttgcaaagttttaaaaataaagtttttaggcaaatgcgataagaaaccgtcatttccagtcacagtaggcgatctttcgtaatttcataaaagcagttcgtttgcagtatggcttttgtgtagttaggggttttttaagtgtgaagaaaggtatgtgggctttaaaagtgattctaaatcttgaatagaaaacacatgaattggctttaataaaaatgtcacctttttattattgacattaagtaatggtaccatatattttttaaaatacatattgacttgaattgtgaggcaataagataccttctatatgtaatgatcacagaactaacccttataatatagttttacttattttgtttactctaaaaatctatagcagagtttctctattttatatttcatagatttaaaaaacccaaataaagatggatttaaaattcactgtggaaaagagtattgagttacaaactgagaagaaaaagcaggaagttccctaataatctggaatattctacatggcttgattacatagcaaacaagaccaagatttagggctgtcttaaacatcactgccgtcttgaagcagggtacacacgttaggtattgtgaagaacatcaatccgaacttttcttctgttgtttgcactgatgcgattttttgttcttttatgtttatacaacgtatctatgttgtgtaggggaaattttttcattttttaaaaattctactttggttttgttgttgttttgatttgtttttggctaagtagaggacatggactagttgtagcaaacagaacatgctgtttgctcttgccaaaggtcagtgagtgagtgcatttgctgcagtggtggcacgtagagaactagatggtaataaagatttaaaactatgaagaaggttacagtgtaactattttggtactagaaccagttcatgctggccgaaacgacaatggtttatggacttgcatccattttgtatttttgtaatatttgtaaatatgaactttttaaattgctgcaaagatggtttcttttgtaagatgttttcaacgtttacattcaatccaagcctttgtatattttagagctgtgcaacactttaagtcttgtatttatttttagtaaaaatggtgacagtttcattgtgaacccctctcaaaaaaaatgtatcagaaaagtttgattacctagaaagtgtgtatagaaactgcaaataaacgtgactgcaattaaaaaaaaaaaaaaaaaa

SEQ ID NO: 31652 - DNA, 2720 bp, Homo Sapiens
gtcgactcagccttaggtaccggtcaggcaaaatgcggtcctccctggctccgggagtctggttcttccgggccttctccagggacagctggttccgaggcctcatcctgctgctgaccttcctaatttacgcctgctatcacatgtccaggaagcctatcagtatcgtcaagagccgtctgcaccagaactgctcggagcagatcaaacccatcaatgatactcacagtctcaatgacaccatgtggtgcagctgggccccatttgacaaggacaactataaggagttactagggggcgtggacaacgccttcctcatcgcctatgccatcggcatgttcatcagtggggtttttggggagcggcttccgctccgttactacctctcagctggaatgctgctcagtggccttttcacctcgctctttggcctgggatatttctggaacatccacgagctctggtactttgtggtcatccaggtctgtaatggactcgtccagaccacaggctggccctctgtggtgacctgtgttggcaactggttcgggaaggggaagcgggggttcatcatgggcatctggaattcccacacatctgtgggcaacatcctgggctccctgatcgccggcatctgggtgaacgggcagtggggcctgtcgttcatcgtgcctggcatcattactgccgtcatgggcgtcatcaccttcctcttcctcatcgaacacccagaagatgtggactgcgcccctcctcagcaccacggtgagccagctgagaaccaggacaaccctgaggaccctgggaacagtccctgctctatcagggagagcggccttgagactgtggccaaatgctccaaggggccatgcgaagagcctgctgccatcagcttctttggggcgctccggatcccaggcgtggtcgagttctctctgtgtctgctgtttgccaagctggtcagttacaccttcctctactggctgcccctctacatcgccaatgtggctcactttagtgccaaggaggctggggacctgtctacactcttcgatgttggtggcatcataggcggcatcgtggcagggctcgtctctgactacaccaatggcagggccaccacttgctgtgtcatgctcatcttggctgcccccatgatgttcctgtacaactacattggccaggacgggattgccagctccatagtgatgctgatcatctgtgggggcctggtcaatggcccatacgcgctcatcaccactgctgtctctgctgacctggggactcacaagagcctgaagggcaacgccaaagccctgtccacggtcacggccatcattgacggcaccggctccataggtgcggctctggggcctctgctggctgggctcatctcccccacgggctggaacaatgtcttctacatgctcatctctgccgacgtcctagcctgcttgctcctttgccggttagtatacaaagagatcttggcctggaaggtgtccctgagcagaggcagcggctctagtatggtcctaacccaccagtgatagtattttcctcaagtcccatgacttttgtataaagaaatatgaggccccaattggaacagcagcatggagggtcccagttgggtccccaacgtgctccccatgggcaagacaatggaaacttccacaagcaggggaggcaaaccctctttattgaacattagccagcccagcccagaccccagggctgcctaaggacacagagattctccatgggaaggggactgccaagcatgaggaaatagaagattcaggggcctgagctctggaagctgcaagcaaaagggatgggactagggctgagttgtgtctccattttgataaggaaaggatatgctcacactcttgcttgttcagattccaagacagaaggcttcacaaggccaacgcctggaaaatgggcatctctccctcccatgttaagctttaacctctgtaatctgcctgtatctataggtgggcatctcactccatcaaaggagcccagcctctctttgtccctctatccatgcaacagtcttctctgtgcatttccccaagctgggccctcttctactctccatttaggcctgttgataactccattacccacccatcactgctgttcctccagggccagcactcgggcgaggcaggggagctgccttcggtacataatttgaaggggcactccctcttgggcacatgccggccctgagtgcctcccttgcctcactctgatcccggccccataatgtcctcagtggaaggtgactgggggccggtgctgtggggagagtagaaagaggggttggcatgactaaaaataccagtatgtgtattaagtattttgagaatgaaatgccaaggagtgcctactgtatgccagctctgctctaggaatggagtagacagtggacacaagaaggacttacgccctgagcacaggtgccaacggtgacaagactggcaagacgtgagggcatgaatggttcattcaggcagctgctgcaggtgtggtcacctggtgccatctgctgctcccttttccacttttctatgtcctccttccaccccaagtcccggatcactcgctgttttctggctagctcttggcatctccatctgagcctaaagttgcccactggcaccaatagattctgtttgacctgcaaaaaaaaaaaaaaaaaa

SEQ ID NO: 31653 - DNA, 2858 bp, Homo Sapiens
agtggcggggaagcaaagcacaggagcgctgtggtgccagcggccgggctagggacgactggcgggtttgcgctggacccgaccccgagggcgggcgcaagggggcgggcgctgccgtactcaggccgcggggccagggcgggccggccggcggggcatttaaaccccgctgacagccagtccagcccgggacacgcgcccagctctgtagcctcctccgtcgactcagccttaggtaccggtcaggcaaaatgcggtcctccctggctccgggagtctggttcttccgggccttctccagggacagctggttccgaggcctcatcctgctgctgaccttcctaatttacgcctgctatcacatgtccaggaagcctatcagtatcgtcaagagccgtctgcaccagaactgctcggagcagatcaaacccatcaatgatactcacagtctcaatgacaccatgtggtgcagctgggccccatttgacaaggacaactataaggagttactagggggcgtggacaacgccttcctcatcgcctatgccatcggcatgttcatcagtggggtttttggggagcggcttccgctccgttactacctctcagctggaatgctgctcagtggccttttcacctcgctctttggcctgggatatttctggaacatccacgagctctggtactttgtggtcatccaggtctgtaatggactcgtccagaccacaggctggccctctgtggtgacctgtgttggcaactggttcgggaaggggaagcgggggttcatcatgggcatctggaattcccacacatctgtgggcaacatcctgggctccctgatcgccggcatctgggtgaacgggcagtggggcctgtcgttcatcgtgcctggcatcattactgccgtcatgggcgtcatcaccttcctcttcctcatcgaacacccagaagatgtggactgcgcccctcctcagcaccacggtgagccagctgagaaccaggacaaccctgaggaccctgggaacagtccctgctctatcagggagagcggccttgagactgtggccaaatgctccaaggggccatgcgaagagcctgctgccatcagcttctttggggcgctccggatcccaggcgtggtcgagttctctctgtgtctgctgtttgccaagctggtcagttacaccttcctctactggctgcccctctacatcgccaatgtggctcactttagtgccaaggaggctggggacctgtctacactcttcgatgttggtggcatcataggcggcatcgtggcagggctcgtctctgactacaccaatggcagggccaccacttgctgtgtcatgctcatcttggctgcccccatgatgttcctgtacaactacattggccaggacgggattgccagctccatagtgatgctgatcatctgtgggggcctggtcaatggcccatacgcgctcatcaccactgctgtctctgctgatctggggactcacaagagcctgaagggcaacgccaaagccctgtccacggtcacggccatcattgacggcaccggctccataggtgcggctctggggcctctgctggctgggctcatctcccccacgggctggaacaatgtcttctacatgctcatctctgccgacgtcctagcctgcttgctcctttgccggttagtatacaaagagatcttggcctggaaggtgtccctgagcagaggcagcgggtataaagaaatatgaggccccaattggaacagcagcatggagggtcccagttgggtccccaacgtgctccccatgggcaagacaatggaaacttccacaagcagggaaggcaaaccctctttattgaacattagccagcccagcccagaccccagggctgcctaaggacacagagattctccatgggaaggggactgccaagcatgaggaaatagaagattcaggggcctgagctctggaagctgcaagcaaaagggatgggactagggctgagttgtgtctccattttgataaggaaaggatatgctcagactcttgcttgttcagattccaagacagaaggcttcacaaggccaacgcctggaaaatgggcatctctccttcccatgttaagctttaacctctgtaatctgcctgtatctataggtgggcatctcactccaccaaaggagcccagcctctctttgtccctctatccatgcaacagtcttctctgtgcatttccccaagctgggccctcttctactctccatttaggcctgttgataactccattacccgcccatcactgctgttcctccagggccagcactcgggcgaggcaggggagctgccttcggtacataatttgaaggggcactccctcttgggcacatgccggccctgagtgcctcccttgcctcactctgatcctggccccataatgtcctcagtggaaggtgatgggggccggtgctgtggggagagtagaaagaggggttggcatgactaaaaataccagtatgtgtattaagtattttgagaatgaaatgccaaggagtgcctactatatgccagctctaggaatggagtagacagtggacacaagaaggacttacgccctgagcacaggtgccaatggtgacaagactggcaagacgtgagggcatgaatggttcattcaggcagctgctgcagatgtggtcacctggtgccatctgctgctcccttttccacttttctatgtcctccttccaccccaagtcccggatcactcgctgttttctggctagctcttggcatctccatctgagcctaaagttgcccactggcaccaatagattctgtttgacctgc

SEQ ID NO: 31654 - DNA, 3003 bp, Homo Sapiens
gggagggggctccgggcgccgcgcagcagacctgctccggccgcgcgcctcgccgctgtcctccgggagcggcagcagtagcccgggcggcgagggctgggggttcctcgagactctcagaggggcgcctcccatcggcgcccaccaccccaacctgttcctcgcgcgccactgcgctgcgccccaggacccgctgcccaacatggattttctcctggcgctggtgctggtatcctcgctctacctgcaggcggccgccgagttcgacgggaggtggcccaggcaaatagtgtcatcgattggcctatgtcgttatggtgggaggattgactgctgctggggctgggctcgccagtcttggggacagtgtcagcctgtgtgccaaccacgatgcaaacatggtgaatgtatcgggccaaacaagtgcaagtgtcatcctggttatgctggaaaaacctgtaatcaagatctaaatgagtgtggcctgaagccccggccctgtaagcacaggtgcatgaacacttacggcagctacaagtgctactgtctcaacggatatatgctcatgccggatggttcctgctcaagtgccctgacctgctccatggcaaactgtcagtatggctgtgatgttgttaaaggacaaatacggtgccagtgcccatcccctggcctgcacctggctcctgatgggaggacctgtgtagatgttgatgaatgtgctacaggaagagcctcctgccctagatttaggcaatgtgtcaacacttttgggagctacatctgcaagtgtcataaaggcttcgatctcatgtatattggaggcaaatatcaatgtcatgacatagacgaatgctcacttggtcagtatcagtgcagcagctttgctcgatgttataacgtacgtgggtcctacaagtgcaaatgtaaagaaggataccagggtgatggactgacttgtgtgtatatcccaaaagttatgattgaaccttcaggtccaattcatgtaccaaagggaaatggtaccattttaaagggtgacacaggaaataataattggattcctgatgttggaagtacttggtggcctccgaagacaccatatattcctcctatcattaccaacaggcctacttctaagccaacaacaagacctacaccaaagccaacaccaattcctactccaccaccaccaccacccctgccaacagagctcagaacacctctaccacctacaaccccagaaaggccaaccaccggactgacaactatagcaccagctgccagtacacctccaggagggattacagttgacaacagggtacagacagaccctcagaaacccagaggagatgtgttcagtgttctggtacacagttgtaattttgaccatggactttgtggatggatcagggagaaagacaatgacttgcactgggaaccaatcagggacccagcaggtggacaatatctgacagtgtcggcagccaaagccccagggggaaaagctgcacgcttggtgctacctctcggccgcctcatgcattcaggggacctgtgcctgtcattcaggcacaaggtgacggggctgcactctggcacactccaggtgtttgtgagaaaacacggtgcccacggagcagccctgtggggaagaaatggtggccatggctggaggcaaacacagatcaccttgcgaggggctgacatcaagagcgaatcacaaagatgattaaagggttggaaaaaaagatctatgatggaaaattaaaggaactgggattattgagcctggagaagagaagactgaggggcaaaccattgatggttttcaagtatatgaagggttggcacagagagggtggcgaccagctgttctccatatgcactaagaatagaacaagaggaaactggcttagactagagtataagggagcatttcttggcaggggccattgttagaatacttcataaaaaaagaagtgtgaaaatctcagtatctctctctctttctaaaaaattagataaaaatttgtctatttaagatggttaaagatgttcttacccaaggaaaagtaacaaattatagaatttcccaaaagatgttttgatcctactagtagtatgcagtgaaaatctttagaactaaataatttggacaaggcttaatttaggcatttccctcttgacctcctaatggagagggattgaaaggggaagagcccaccaaatgctgagctcactgaaatatctctcccttatggcaatcctagcagtattaaagaaaaaaggaaactatttattccaaatgagagtatgatggacagatattttagtatctcagtaatgtcctagtgtggcggtggttttcaatgtttcttcatggtaaaggtataagcctttcatttgttcaatggatgatgtttcagatttttttttttttaagagatccttcaaggaacacagttcagagagattttcatcgggtgcattctctctgcttcgtgtgtgacaagttatcttggctgctgagaaagagtgccctgccccacaccggcagacctttccttcacctcatcagtatgattcagtttctcttatcaattggactctcccaggttccacagaacagtaatattttttgaacaataggtacaatagaaggtcttctgtcatttaacctggtaaaggcagggctggagggggaaaataaatcattaagcctttgagtaacggcagaatatatggctgtagatccatttttaatggttcatttcctttatggtcatataactgcacagctgaagatgaaaggggaaaataaatgaaaattttacttttcgatgccaatgatacattgcactaaactgatggaagaagttatccaaagtactgtataacatcttgtttattatttaatgttttctaaaataaaaaatgttagtggttttccaaatggcctaataaaaacaattatttgtaaataaaaacactgttagtaat

SEQ ID NO: 31655 - DNA, 2799 bp, Homo Sapiens
tcttatccccagaaagtgcaaggagggcatagtcctgatgaccacagagttagaggaagtggaaaaggagggaaaccacctcagaggtcaatagcagattcttttagatttgaaggaaagtggcatgaagatgagttgaggcaccagaggatacaagaagaaaaatactcccagtcaactagaagaggctctgaagactttgagacaaggagctcatttcagaagaggtatcctgaggatcgtgatttcagaaaatatggacacacatcaaaaagacctaaagacgtggagaggtatgaaagcagagagcctgccaggaacccaaagtggaagcctgagcattccctcccaccttaccaagaggacacagaccagtggaaccttgggccccaaacttatcgacatgctgagagggaacacccagagaccagttcagcaaccaaagtatcctatgactatcgtcacaaacgtcctaagctcttggatggggaccaggacttttctgatgggagaactcagaagtactgtaaggaagaagatagaaaatatagttttcaaaaaggccctctaaatagagagttagattgttttaatactggaagagggagagagactcaagatggacaagtcaaagaaccttttaaaccgtctaagaaagacagcattgcctgtacttattcaaataaaaatgatgttgatttgcgatctagtaatgacaaatggaaggaaaaaataaagaaagaaggggattgtagaaaagagagcaattcttccagtaaccaacttgataaaagtcaaaaacttcctgatgtgaaaccctcgcctatcaatcttaggaagaaatcacttacagttaaagtagatgtgaagaaaacagtagatacattcagggttgcttctagctattccacagagagacagatgtcacatgatttggttgctgttggcaggaaaagtgagaactttcatccagtgtttgaacatcttgactcaactcagaatactgaaaacaaacctacaggagaatttgctcaggaaatcataacaataatccatcaagttaaagcaaattattttccatcacctggcattactttacatgagcgtttctcaacaatgcaagatatacacaaggcagatgtaaatgaaattccattgaattcagatccagaaatacacaggagaatagatatgtctttggccgagcttcagagtaaacaagctgtgatctatgaatcggaacagactctgatcaaaataatagatccaaatgacctacgacatgacattgaaagaaggcgaaaagaacggttacagaatgaagatgagcacatttttcacatagctagtgctgcagagagggatgatcagaattccagtttttcaaaggtaaagaatgttcatactgatggattccaaaaacccacacattttataaaatcaaattttagaaaatgtattgaaaaaccttacatgaattatactacgcagagaaaagacataattactcacaaaccatttgaggttgagggaaaccaccgaaacacaagagtaagaccttttaagagcaactttagaggtggcagatgccagcccaattataaatcaggcctggtacagaagagcttgtacattcaggctaagtatcagcgtttacggttcactggcccaaggggatttatcactcataagttcagagaaagattaatgagaaaaaagaaggaatatacagatgttgccacaggaatctaatctgaaatcgtacaaatggaaatgacgctacaggaggatgtttgggagcatctctctctttttgtcaggagttagaagtgacactaaggcactaatactgtaacttcttgataaaataactttattttttagtagtggaatgctgcaacttttttacacctaacaattgcttttaaattacagtattcaatttaaaagttgtattaactacagtttcctttgcaaaaagtctcaaaagaatcacttgaagggcattatttgttgatgcatttttctctgagcatggtttcatagagagaacttcaccaagtaatattcagacgtttatatgttgaaagttttgcttacataataaaaacaaaaacaagtgtctgaattgtatagtgtctttacatgaaagaactttaaacagtggccttatggtagaaaatttcataccagatttttctttttctgatgacattttggcttataactcgaagttttcttaagtttctgaagatcaaggcctatataattcatacatttcatattataagaaggcaagagacaaggtgcttcaaatattccatcaggtagttgtgagtgcactgaatttttagtaatatgttcattcagtttttttccacaactatttgctcttttccaatttcaaaatgctattgtggaaaatatgtaaagattttgtaatctatagtccatcttatttttccctcagggcaagcttgtgcatatcatatttttaaaggctttttaaaaatctgacaaacaaaatctcatatttgaaaattgtactttactactacagcattacacattttgcaagcacatcttatagagtgtttacttttagttcagttgatatgtattgcatacctactatgtgtaagagcaaatggatgggatttttaaatgaaatttttaggccccaataccttatttctttatgttttctgtgttctgcttaacagtacatatacattcccaattacatttttgtgaaatgtttatttgtaataagataaaatgttgttgctctttctgctt

SEQ ID NO: 31656 - DNA, 4044 bp, Homo Sapiens
gccggagcggccaggccgccgtctgcccgtcccgctggacgtcccgcggtccgccctcccgtgcgtccgtctgccggtgagcccgcccgcccgccggcccagaacagagaacagaagctcagagaagtgaagcaacttgcccagctatgagagacagagccaggatttgaaaccagatgaggacgctgaggcccagagagggaaagccacttgcctagggacacacagcggggagaggtggagcagggcctctatttcgagacccctgactccacacctggtgtttgtgccaagaccccaggctgcctcccaggtcctctgggacagcccctgccttctaccaggaccatgggtagcaacaagagcaagcccaaggatgccagccagcggcgccgcagcctggagcccgccgagaacgtgcacggcgctggcgggggcgctttccccgcctcgcagacccccagcaagccagcctcggccgacggccaccgcggccccagcgcggccttcgcccccgcggccgccgagcccaagctgttcggaggcttcaactcctcggacaccgtcacctccccgcagagggcgggcccgctggccggtggagtgaccacctttgtggccctctatgactatgagtctaggacggagacagacctgtccttcaagaaaggcgagcggctccagattgtcaacaacacagagggagactggtggctggcccactcgctcagcacaggacagacaggctacatccccagcaactacgtggcgccctccgactccatccaggctgaggagtggtattttggcaagatcaccagacgggagtcagagcggttactgctcaatgcagagaacccgagagggaccttcctcgtgcgagaaagtgagaccacgaaaggtgcctactgcctctcagtgtctgacttcgacaacgccaagggcctcaacgtgaagcactacaagatccgcaagctggacagcggcggcttctacatcacctcccgcacccagttcaacagcctgcagcagctggtggcctactactccaaacacgccgatggcctgtgccaccgcctcaccaccgtgtgccccacgtccaagccgcagactcagggcctggccaaggatgcctgggagatccctcgggagtcgctgcggctggaggtcaagctgggccagggctgctttggcgaggtgtggatggggacctggaacggtaccaccagggtggccatcaaaaccctgaagcctggcacgatgtctccagaggccttcctgcaggaggcccaggtcatgaagaagctgaggcatgagaagctggtgcagttgtatgctgtggtttcagaggagcccatttacatcgtcacggagtacatgagcaaggggagtttgctggactttctcaagggggagacaggcaagtacctgcggctgcctcagctggtggacatggctgctcagatcgcctcaggcatggcgtacgtggagcggatgaactacgtccaccgggaccttcgtgcagccaacatcctggtgggagagaacctggtgtgcaaagtggccgactttgggctggctcggctcattgaagacaatgagtacacggcgcggcaaggtgccaaattccccatcaagtggacggctccagaagctgccctctatggccgcttcaccatcaagtcggacgtgtggtccttcgggatcctgctgactgagctcaccacaaagggacgggtgccctaccctgggatggtgaaccgcgaggtgctggaccaggtggagcggggctaccggatgccctgcccgccggagtgtcccgagtccctgcacgacctcatgtgccagtgctggcggaaggagcctgaggagcggcccaccttcgagtacctgcaggccttcctggaggactacttcacgtccaccgagccccagtaccagcccggggagaacctctaggcacaggcgggcccagaccggcttctcggcttggatcctgggctgggtggcccctgtctcggggcttgccccactctgcctgcctgctgttggtcctctctctgtggggctgaattgccaggggcgaggcccttcctctttggtggcatggaaggggcttctggacctagggtggcctgagagggcggtgggtatgcgagaccagcacggtgactctgtccagctcccgctgtggccgcacgcctctccctgcactccctcctggagctctgtgggtctctggaagaggaaccaggagaagggctggggccggggctgagggtgcccttttccagcctcagcctactccgctcactgaactccttccccacttctgtgccacccccggtctatgtcgagagctggccaaagagcctttccaaagaggagcgatgggcccctggccccgcctgcctgccaccctgccccttgccatccattctggaaacacctgtaggcagaggctgccgagacagaccctctgccgctgcttccaggctgggcagcacaaggccttgcctggcctgatgatggtgggtgggtgggatgagtaccccctcaaaccctgccctccttagacctgagggacccttcgagatcatcacttccttgcccccatttcacccatggggagacagttgagagcggggatgtgacatgcccaaggccacggagcagttcagagtggaggcgggcttggaacccggtgctccctctgtcatcctcaggaaccaacaattcgtcggaggcatcatggaaagactgggacagcccaggaaacaaggggtctgaggatgcattcgagatggcagattcccactgccgctgcccgctcagcccagctgttgggaacagcatggaggcagatgtggggctgagctggggaatcagggtaaaaggtgcaggtgtggagagagaggcttcaatcggcttgtgggtgatgtttgaccttcagagccagccggctatgaaagggagcgagcccctcggctctggaggcaatcaagcagacatagaagagccaagagtccaggaggccctggtcctggcctccttccccgtactttgtcccgtggcatttcaattcctggccctgttctcctccccaagtcggcaccctttaactcatgaggagggaaaagagtgcctaagcgggggtgaaagaggacgtgttacccactgccatgcaccaggactggctgtgtaaccttgggtggcccctgctgtctctctgggctgcagagtctgccccacatgtggccatggcctctgcaactgctcagctctggtccaggccctgtggcaggacacacatggtgagcctagccctgggacatcaggagactgggctctggctctgttcggcctttgggtgtgtggtggattctccctgggcctcagtgtgcccatctgtaaaggggcagctgacagtttgtggcatcttgccaagggtccctgtgtgtgtgtatgtgtgtgcatgtgtgcgtgtctccatgtgcgtccatatttaacatgtaaaaatgtcccccccgctccgtcccccaaacatgttgtacatttcaccatggccccctcatcatagcaataacattcccactgccaggggttcttgagccagccaggccctgccagtggggaaggaggccaagcagtgcctgcctatgaaatttcaacttttcctttcatacgtctttattacccaagtcttctcccgtccattccagtcaaatctgggctcactcaccccagcgagctctcaaatccctctccaactgcctaaggccctttgtgtaaggtgtcttaatactgtcctttttttttttttaacagtgttttgtagatttcagatgactatgcagaggcctgggggacccctggctctgggccgggcctggggctccgaaattccaaggcccagacttgcggggggtgggggggtatccagaattggttgtaaatactttgcatattgtctgattaaacacaaacagacctcagaaaaaaaaaaaaaaaaaaaaaaaaaaaaaaaaaaaaaaaaaaaaaaaa

SEQ ID NO: 31657 - DNA, 5222 bp, Homo Sapiens
gttggagcggggccggcgccgcagccgcttctgctggctgagctgctgccgccgccgggcggacgggcggacgcgcggagctgggggcggcgcggcggggccggcggggcgcggcggggctgaccggccccgatgaggcggaaggagaagcggctcctgcaggcggtggcgctggtgctggcggccctggtcctcctgcccaacgtggggctttgggcgctgtaccgcgagcggcagcccgacggcacccctgggggatcgggggcggcggtggcgccggcggcgggacagggctcacacagtcgacaaaagaaaacgtttttcttgggagatgggcagaagctgaaggactggcatgacaaggaggccatccggagggacgctcagcgcgtaggaaatggagaacaaggaagaccttaccccatgaccgatgctgagagagtggatcaggcataccgagaaaatggatttaacatctacgtcagtgataaaatctccttgaatcgctctctcccagatatccggcacccaaactgcaacagcaagcgctacctggagacacttcccaacacaagcatcatcatccccttccacaacgagggctggtcctccctcctccgcaccgtccacagtgtgctcaatcgctcgcctccagagctggtcgccgagattgtactggtcgacgacttcagtgatcgagagcacctgaagaagcctcttgaagactacatggcccttttccccagtgtgaggattcttcgaaccaagaaacgggaagggctgataaggacccgaatgctgggggcctcagtggcaactggggatgtcatcacattcttggattcacactgtgaagccaatgtcaactggcttccccccttgcttgaccgcattgctcggaaccgcaagaccattgtgtgcccgatgattgatgtaattgaccatgacgactttcggtacgagacacaggcaggggatgccatgcggggagcctttgactgggagatgtactacaagcggatcccgatccctccagaactgcagaaagctgaccccagcgacccatttgagtctcccgtgatggccggtggactgttcgccgtggatcggaagtggttctgggaactcggcgggtatgacccaggcttggagatctggggaggggagcagtatgaaatctccttcaaggtgtggatgtgtgggggccgcatggaggacatcccctgctccagggtgggccatatctacaggaagtatgtgccctacaaggtcccggccggagtcagcctggcccggaaccttaagcgggtggccgaagtgtggatggatgagtacgcagagtacatttaccagcgccggcctgaataccgccacctctccgctggggatgtcgcagtccagaaaaagctccgcagctcccttaactgcaagagtttcaagtggtttatgacgaagatagcctgggacctgcccaaattctacccacccgtggagcccccggctgcagcttggggggagatccgaaatgtgggcacagggctgtgtgcagacacaaagcacggggccttgggctccccactaaggctagagggctgcgtccgaggccgtggggaggctgcctggaacaacatgcaggtattcaccttcacctggagagaggacatccggcctggagacccccagcacaccaagaagttctgctttgatgccatttcccacaccagccctgtcacgctgtacgactgccacagcatgaagggcaaccagctgtggaaataccgcaaagacaagaccctgtaccaccctgtcagtggcagctgcatggactgcagtgaaagtgaccataggatcttcatgaacacctgcaacccatcctctctcacccagcagtggctgtttgaacacaccaactcaacagtcttggaaaaattcaataggaactgagccctcatgtccccttggcaggccccccagggtctggcactcactgcagacttcctctttcaagggaggcagggcccctgtgggcactaggtgtaaaaggtgctggccaaatggttcagggtgaagagggctcttgattcaggggctggggtctgcctggtccttgagcccctgagttgtgggggtagggtgaagagcatatcccacaagaggccccacagggagcagagactgctttaatccctgctgacatcacggaaaagcaacagagccttttcaactttgtcactatgtccccttgaacattatgtgggagaacaccaaggtagcctaggccacccaaaagtgagtcctgcgaggttgcccagccctcagatggctctcctacatgatggtgctttagaaacaaaggtaaaatttgcctgtttggggcagcttttagtatcgatgccactcatctgcagcagaagagaaagaagtcctcttggggctttttagtttctgccgtcctggggggaacattgcagttactgcacagcttctgttctctgtcacaaccccaggtgatttggtccggtcaaaggccatacttggggccctaagagtgttcagtattgaatgctgatcagctgccaggtgaggagtcagaagagggagcccccctagacatttctttgcagctatggacatgcgggatatctccccctgctctctgggtatttgaaatgtcaattttagcactctccaggcacaaggacagcccagcaccagctttacagggcagtgtttcagatggccctgagcccacggaaaaggccaggtagacctccaaactagaaatgctggctgatttgccctgatccatgcttccatttccctgtctctcttccccaggcaattactggcctcaaaagaggaacagaggtgctgcgaggtgctcacctcacagagtctggaggcctccaggatcaactgtgggcaaagtgcctgcctctgacctcatcatggttctagttctcatacagaactccagaatttttaaagaactctataattggattgcaaactaggatgctacataggattctggtattccacatccaatatggatttctagaatgctgtgattaaaggagccagccaggtgtaatacagtcaaggcagcccccagcctagagacaatctgtgaaatccaaagttggtggtgttgggaaagcagggggacatgtgtccctcagctcagcagaggctgtggtacaacatggtccttggtgaagacctgcacccctggaacctcccaccatcatcacaactgtagtctcatttgcagtggagaaaagaacccgacgtcccacagccagatatacacccagctccatgccagcccttcatgtttaccttttgctttgttaattacatgtcagactcctagagggcctccagactaataggaagcatttctgtaaccaacctgccacccactgattcagaaatggaaatcacattccacaatctatggcttccaccagctagcccaggaaatacttgaaatcagcattccaattagtgttgagtctcttgattgtgtcatttaccaattaaataactgagacctaagtctgggaacagagccacgaatctgcctttgagatgctggcagatctcaaggccatcaattattgggggagggagggacaaacactcccaatcatccaccagtcagactgaatgtgtagctggcgaggaattacttccacttctggcccagcacaagccctgctttggccacctgtctgcaagagaggcggcccctgtgcttgcaacgcttacgtgttgatcccagtgtccttttccaaatgagtgctgtagctttagaagtggccctctatagaaagaagtcaaaagatgaggccccttctagaatctaggataacaagagtgttgacagtttgaggagtcgaattgagattcatcatcaaagagcaatgcagcgtcgttaaaataaaaactgtgccttttaaaaagaaaaatgcaaatatagagcaaatccctaaacttgaaccatttcctagtgccttgctagacaaacataaaggggcagggttgtggggaggggaacgtttttggtggtgtgtgcagttcctactggatgagtgtgtgtttcttaatgtctcatttcaagcaggagatgttgggtctggagcaagatctgagactgagatgtcccccaagggtgacaggtcagatttatttcagtcagtgcaagtcacactccaaactaaaggctgggcagtgcgtttagtctgtggcctagaagacctcatcagcccccgagaggaggccttgcattacctcactgggacctgtttgggggccatccctgcggtccaccctctgaacccccagcatgtttgtcctgtttctcaccattgggttaaggggtgccgagcactagctagacttccacatagtcccaccccaagtgggcggcagtgttcctggcatgaccaggattcctgtgaaagcaggagcagcagcaagccgtcccgggcctgcctttcccatcctttggttctcctttccagtctgggttcacaccctgaaaagggatgggtgtgtcctctgagcactctggcatttgtcattgctgagcccatatcagtaggtcctgggacttgacaaagtatgtgggaggggaaggaaggacagaacttgactggctccatttcatggaccaactgatcaattgccagtactaagccactcattgttatggcttcctttttgaaaaccacctgtctcaaggattcaggtttctgctcacatccccagctgatgctcaataaaactcagccaggagcatatggagatgctgacagccaggtaatgggtgagactgtggggtcccttttcctctaaagcctttactctgaggataaggtcacaaagtagggtgtgacttgaaagtatcgtgaccatgtggcccaccagcagcctttccaaaggggaactccagagacatttcataatgcaaacagcactgttgctttaagaacaaggcctttggaggtggctaaacttgcacgcacgtgtgtgaaaagccatcccatcttctgcctccagttggagctttcagctgttaaaacagtcagaaactattgattcttccctttaggaaaaaatgctcaggcagaacggggtacatccacaggaggaatcggacgagaggatgtgacattcggtccaggagagaaagagcagtttctgttaaagatgta

SEQ ID NO: 31658 - DNA, 3070 bp, Homo Sapiens
ttgatgagggggagcgatgtctgcgacgcaccggaagcggctccgaggaaggcctgtgggagtctcggagacgtgtctgtctgtgaggcgctgggtgcacgtccccagggctctgggctaggaaggcagcggcgaggtgcctccccacgtacccctcgcgggcccagccgagcaacgtggggcgaaggcggcggcgaaggcccgggctgggagcgttggcggccggagtcccagccatggcggagtctgtggagcgcctgcagcagcgggtccaggagctggagcgggaacttgcccaggagaggagtctgcaggtcccgaggagcggcgacggagggggcggccgggtccgcatcgagaagatgagctcagaggtggtggattcgaatccctacaggtaacctgcgtcgccggtcggaggcaggcgcgggggacgaggtcaggctccgtgaggtcagaagtgaggcgcttcccacgtcccgctcatggggacgcccgccacccttttcttggtctgcgaatcctgttcccaaatgggcaaggccacatcttagtactgatcggaagatattctttctcttttttaaaaacctccagtgagtcagccatatggtgctgctcctgtgcctgctgaggacgtgtgtccagtttcctatcacccttgcctcttaattagtccgcctcgctgtgtataagactgatagtaagaactttcagaagatgagatcaaatattaaacctgctaagccgcttgatggcattgaaacgaatgggaattgtaagcgactatgagaaaatccgtacctttgccgtagcaatagtaggtgttggtggagtaggtagtgtgactgctgaaatgctgacaagatgtggcattggtaagttgctactctttgattatgacaaggtggaactagccaatatgaatagacttttcttccaacctcatcaagcaggattaagtaaagttcaagcagcagaacatactctgaggaacattaatcctgatgttctttttgaagtacacaactataatataaccacagtggaaaactttcaacatttcatggatagaataagtaatggtgggttagaagaaggaaaacctgttgatctagttcttagctgtgtggacaattttgaagctcgaatgacaataaatacagcttgtaatgaacttggacaaacatggatggaatctggggtcagtgaaaatgcagtttcagggcatatacagcttataattcctggagaatctgcttgttttgcgtgtgctccaccacttgtagttgctgcaaatattgatgaaaagactctgaaacgagaaggtgtttgtgcagccagtcttcctaccactatgggtgtggttgctgggatcttagtacaaaacgtgttaaagtttctgttaaattttggtactgttagtttttaccttggatacaatgcaatgcaggatttttttcctactatgtccatgaagccaaatcctcagtgtgatgacagaaattgcaggaagcagcaggaggaatataagaaaaaggtagcagcactgcctaaacaagaggttatacaagaagaggaagagataatccatgaagataatgaatggggtattgagctggtatctgaggtttcagaagaggaactgaaaaatttttcaggtccagttccagacttacctgaaggaattacagtggcatacacaattccaaaaaagcaagaagattctgtcactgagttaacagtggaagattctggtgaaagcttggaagacctcatggccaaaatgaagaatatgtagataatggactgggatatattgtatttctcatgttaaagcctcttcccttgaaattaaaaaaaaattttaactgataaaacttagggcaacattaattaatgtatattcttacctgaattgttatactttttgaaaatcctgtgacttgcctgtttctccccgctccaacgaaatcattaactctcctaaaatgtgtttcattctagtaagaaaacctcaaaggatattgtaggatataaatcttacttgaaaacatagctgttgaaatgttttggccttttggagtgggggaaggacaaatctgatcctgtaatctttttctttccagtaatcccttgtgtctgttgcatgaggacatggacaataaagtagtatatgatcctcagatacagggagaaggacaaggcatacagcttattgattagagctggcaagcatctgctcattatgtttggaattgctttctataagaaaattgcccactactactaacttgatcaacaatgaattcaaaatagttaacctatgaaataacatcctctcaaatgtttgctgatgaagtacaagttgaaatgtagttattggaaaagtctgtaacctgtggatcatatatattcaaagtgagacaaaggcaaataaaaagcagctattttcatgaatagacaaagttgatttcaggaagtataaattatattctgcaccgaacaaggaacagaaattattgcatctgtggaacatatatctggagttactatactttactgaagagcaaggcataaatttagactaaaatccatccagattacactcattctttaggctactcctggatacttcatttaaatttgattttcgaggtagtgagatgtcggcaaggtttgtcctgtatattaggaataaaggaaaagttctaaactgcctctgcaatgacttgtagtcagtggaagagtatcactttcccctgatcatgaccactaaactgtaaattgatataaattagttttctctcgagttacacccaagtaatgaagacttaagagaaccttggttgaaataaatttccaatagtttggagactcataaataccatgcaggtgtaaccactgccaataggctgtttctatgcttatttcctattttgatttttactttgaagataggaatatctaaattatatctctagggagaaaatgttgtaaaaaattaaaagtacatccctgattgtaaaataaagttcaaaaaactgatttcaaaaaaaaaaaaaaaaaa

SEQ ID NO: 31659 - DNA, 2806 bp, Homo Sapiens
agaccaccttgcggccgaccccgctcccccgcctcctcgggagagataaatgctgactccgctcggaaagttctcaactgcaaagtttgctgtccggctgcctagggtctgggaagctcgggcaccctccctctccggggctcctgctcccacccctccggcccccccaccgtcgcgctcctccaggctgggcctgtggccgcggtgctttttaattttcccccagctcagaatcttgctgctcggcccccaggagagcaacaactcaacgggaacgatgtggaaggtgtcagctctgctcttcgttttgggaagcgcgtcgctctgggtcctggcagaaggagccagcacaggccagccagaagatgacactgagactacaggtttggaaggcggcgttgccatgccaggtgccgaagatgatgtggtgactccaggaaccagcgaagaccgctataagtctggcttgacaactctggtggcaacaagtgtcaacagtgtaacaggcattcgcatcgaggatctgccaacttcagaaagcacagtccacgcgcaagaacaaagtccaagcgccacagcctcaaacgtggccaccagtcactccacggagaaagtggatggagacacacagacaacagttgagaaagatggtttgtcaacagtgaccctggttggaatcatagttggggtcttactagccatcggcttcattggtggaatcatcgttgtggttatgcgaaaaatgtcgggaaggccctaaagagctgaagggttacgccctgctgccaacgtgcttaaaaaaagaccgtttctgactctgtgccctgtccctgagctcgtgggagaagatgacccgtggaacacttgcctggcccactcagaatccacggtgacctctccgcttgccaaaataaccgaaggaaagaccgttcaccagacttggctcctctaaacatttgctgttcaaacatgtttttgaatatacattctataaaagattatttgaaagacaaaattcatagaaaatggagcaaaactgtataaactgatttgtaactaacactggaccattggatcgatattatatgctgtaaccatgtgtctccgtctgaccattcttgttattgttaaaatgcagaggaatctggaaatatttatatccacggagtccttggatccagtgctacgtcagtaaatagcaccagcattttgcaattgctgatctgctgaaatgtacacattctggtctagtttggtctatcttttaaagcctgatctggtgtgaataatcaactaggaaatctaaacttggataacacgtggtgaacaactgcctttagctggtccagattaatcatttcaaagacatccattttagatcacaagcaggaagtcgatagtctcaaaggcactttgtttctcccaagtaggccaccaggcagcctctagagttgctttacccaaatccttctccagccatgacttggtgactctaagcttgctcccacctgccccctccacttccctcagatgatgaggagccagggctaagggggcagccttctctcttcccagtgatgcacatccttcacattggctgctttgttctggaatatggatatctcagcctggatgccgaggaagctgctggatgcttaatggtgctagaggctcaagtgtgtttgaaaccaagagccagttgtcccccatgcagaaagaaatcctgtgtgagcctctggtatgagaaataaaatctgccagttttataacattcactttctgcctctgaggaaagatacagggaacaaaaatcaatttgtacagtcttaatattaaaagcagcttgactaaatacctgatttaaaaatagaagacatccccagtcctcatgacataccgcaaatatctgtggggtcctgttgaaaagaacaaaataaaggagcccaaggggtcattctgtctcagcaccatccagcctggcacttctcttcccatatatccattggatttttttttttttttcctaaacaaagtttttacactgagcagatgctctgtcatgatggcggttgtgcaattctggtatcctctaaatttgtaagcattcataaaacaggaaaaagtaaactatcattcggaagcacagcccattcctcccattttttgcaatgatgtctggatgttattttaaacagtgtgtctgtgtgttcccaaatccagctggccccaccagctcagattccattttttttgtgtgtgtgtgtgaaacgtagtctgcaactctgcctcccggcaattatacatgtgtcaggatgtcaaaaagcaattctcctgcctcagcctcctgagtagctgggactacaggttcctaccaccacacccggccaatttttgtatttttagtagagatggggtttcaccgtatcggcgaggatgatctctatctcttgacctcgtgatctgcccgcctcggcctcccaaagtgctgggattacaggcgtgtgccactgcgctcggcctcagattccatatttgaacaccagctgattgagagaaggggaatgagaagagctggatgagtttaaataactcattgttcagattcctgaacaggagttgggataatggccatcttttctttcctatcctttcttcccccctcactgtgaaaaataacagtccaccccaagtcatacactggacccagtgcctgcggggacaggactgtgggtttcttggtcacacctgtgttggtgctcaatgcagtgtagacatgttttcaaataaaacaaatgattgtgtacaa

SEQ ID NO: 31660 - DNA, 4235 bp, Homo Sapiens
cgaggagaccaagccgctgctggggggcgacgtgtcggcccccgaaggcacgaagatgggcgccgtgccctgccgccgggctcttctgctttgcaacgggatgaggtacaaactgctgcaggagggcgacattcaggtctgtgtcatccggcacccgcggacctttctcagcaagatcctcacctcgaaattcctgaggcgctgggagccgcaccacctaacgctggccgacaacagcctggcgtccgccacgccaactgggtacatggaaaactcagtctcctacagcgcaattgaagacgttcagctgctgtcctgggagaatgccccgaagtactgtttacagctcacgattcctgggggaactgtcttactgcaggctgccaatagctacctgcgagaccagtggttccattctctgcaatggaagaaaaagatttacaaatataagaaagtgctgagtaacccaagccgctgggaagttgtcttgaaagagatccggaccctggtggacatggccctgacatcccccctgcaggatgactccatcaaccaggccccactggaaatcgtctcgaaactgctctcagagaacacaaacttgaccacccaggagcatgaaaacatcattgtggcaatcgctcctttgctggaaaacaaccacccaccaccagatctctgtgaattcttttgcaagcactgcagagagcggccccggtccatggtggtcatcgaggtgttcacccccgtggtgcagcgaatcctcaagcataacatggactttgggaagtgcccgcgactgaggctgtttactcaggagtacatccttgccttgaacgagctcaacgcggggatggaagtggtgaagaagttcattcagagcatgcacggccccacagggcactgcccccacccccgggtcctgcccaacctggtggccgtgtgcctggctgccatctactcctgctatgaagagttcatcaacagccgcgacaattccccaagcctgaaggaaatccggaacggctgccagcagccgtgcgaccggaagcccactttacctctgcgccttctgcaccccagcccggacctggtgtctcaggaagccacgctgtctgaggcccggctcaagtcggtggtcgtggcctccagtgagatccacgtggaggtggaacgcaccagcactgccaagccggcgctgacggccagcgcaggcaacgacagcgagcccaacctcatcgactgcctcatggtcagccccgcctgcagcaccatgagcatcgagctgggcccccaggccgaccgcacgctcggctgctacgtggaaatcctcaagctgctgtcagactatgatgactggagaccgtctctggccagtttgcttcaacccattccattccccaaagaagctctcgcacatgagaagttcaccaaggaactgaagtacgtgattcagaggttcgccgaagaccccaggcaagaggtccactcatgcctgctgagcgtgcgggccggcaaagatggctggttccagctctacagccccggaggggtggcctgcgacgatgacggggagctgttcgccagcatggtgcacatcctcatgggctcctgttacaagaccaaaaaattcctgctctccctggcagaaaacaagctgggtccctgcatgctcctggcactgagggggaaccagaccatggtggagatcctgtgcttgatgctggaatacaacatcatcgacaacaacgacacccaactgcagatcatctcaaccctggagagcacagacgtggggaagcgcatgtacgagcagctgtgtgaccggcagcgggagctgaaggagctgcaaaggaaaggcgggcccaccaggctaacactgccctccaagtccacagacgctgacttggctcgtttgctgagctccggctccttcggaaacctggagaacctcagtttggccttcaccaatgtaaccagtgcctgcgccgagcacctcatcaaactgccttcgctcaagcagctgaacctgtggtccactcagtttggagacgctggccttcggctcctgtcggaacacctcaccatgctccaggtgctgaacctgtgcgagaccccggtcacagacgctggcctgctggccctgagctccatgaagagtctctgcagtttaaacatgaacagcaccaagctctcagctgacacctacgaagatctgaaggccaagcttcccaatttgaaggaagtggacgtccgctacaccgaagcctggtgaagctcccagctcaaggcaggaagacgtttgcaaccgcgacaaaataactcttgactaacagccgcagagcagccggtcctggggtcccaccctggtgccctggctgtgagatagatggggagtctttctgggggcggaggggggagggggtggggagggggcccacaagcacgcccagcccccgccgaattcttttagcttcgtaattggaacctttgacctgatctaaagtggactttgtagcaacaagaggagcatcagcgggtcggggaggggtttgggggtgggctggggggtgggggaccctttgtggattttctttgcctttgtgtttgatgccgtcgtgtgggaaaagtcaactccgatgccaccattgcgggccggacgaaggatgctttcttcctagaggctccgagctgagctgcgaactcgccccccgcccttgggacaagaagacccagtcacatcactgcacccgtcctgtgtcctcaccattgctatgcaaagtgattcttgttgtacataagatttaaataatgcacctatttaagacatgttgacaaattgcgggtctgggacccgcctcttatttatgaagtctttgaccgtcccccccgcccgaccccaccgccctcccgcccccacctggcgtgtagtactgtataaaccagtcagctgtcgggttagtggtagtattattgttatttttttaaaggaaacaaacagacaacaaaaagaagaaaaaaaaaaagaacctccttggaaaaattaattgctttttcgtaatggattctctatgctaatgctctctcgtctgtctgtctgtctgcccactcccccacccaccactgtgcgtttctgatttccaaatgtctccaactccctcacgaggtggggctcaggctggaggaggagggattaagatccccttgctccactaaggcccaagctctttctctcggcaccttttagacttgaatgggaggctgctaacccgccctctccagtccaccccggtaaaagagctgttccccacccccagggagctcctgtccctgtcagcctttgctgtcccctgtccccaacggagactctgtcacccctgggctccccctgccatcgtgtgcttcacgtggccccatgcatgcccgcctctctgcatggtctcttgggaaaagagagatgtgtcgcctccgccagtccgactgccctccccaccccacccccgccaccccccacatgtgaccactgcaacgaagacactccttctgtccccacctgctccgaagacaaaccaacctccgtttcttttataaacagtcggctttttcttaataagccctcactgtacagaacagcccgttgatggtttatttggggtccccctctccccccagcccttttttctgttggtttagcacaaatacttccctcctccggcacctccaaacctaccccacagtcagtgtacttgttttatatatatttaatcttattcaatggaaaccatgcttttgtcgttttatactttgctaggtagactttattacccccccactatgccctcatttttttaaaaaaggaaaaaaaaaagaaactgggttccagtcttaattcattttccgtgccaggttttatttcgtgtgtgtgtgagtgtgttctgttttgtgttttgttttttgttgttgttttcagttgtttggttttcttttctttcccccctccggtcccatacttcacagcactctggtgcgggaagaagcagaagcaaaaaaaataaaaataaaaaaataaataaaaataaaaaaaataaaaaaggaaaaaaaaaaagaagaaacaagacatgccacctttcccctcgcactgttgcttttcctgatggttaatactactgtcacgtagctgtgtacaaagagatgtgaaatactttcaggcaaaaataaactgtaagtgactcatc

SEQ ID NO: 31661 - DNA, 7834 bp, Homo Sapiens
ccttttcgttcgccctctcggggcggcttcgccgaaggtagcgccgaatccggcaaccggagcctgggcgcgaagcgaagaagccggaacaaagtgagggggagccggccggctggcccgggaagccccaggggcgcaggggaagcgggactcgcgccgggcggggtttccctgcgccccggcgccccgcgggcagcatgcccctgcgggcagggggagctgggctgaactggccctcccgggggctcagcttgcgccctagagcccaccagatgtgcccccgccggggcccccgggttgcgtgaggacacctcctctgaggggcgccgcttgcccctctccggatcgcccggggccccggctggccagaggatggacgaggaggaggatggagcgggcgccgaggagtcgggacagccccggagcttcatgcggctcaacgacctgtcgggggccgggggccggccggggccggggtcagcagaaaaggacccgggcagcgcggactccgaggcggaggggctgccgtacccggcgctggccccggtggttttcttctacttgagccaggacagccgcccgcggagctggtgtctccgcacggtctgtaacccctggtttgagcgcatcagcatgttggtcatccttctcaactgcgtgaccctgggcatgttccggccatgcgaggacatcgcctgtgactcccagcgctgccggatcctgcaggcctttgatgacttcatctttgccttctttgccgtggagatggtggtgaagatggtggccttgggcatctttgggaaaaagtgttacctgggagacacttggaaccggcttgactttttcatcgtcatcgcagggatgctggagtactcgctggacctgcagaacgtcagcttctcagctgtcaggacagtccgtgtgctgcgaccgctcagggccattaaccgggtgcccagcatgcgcatccttgtcacgttgctgctggatacgctgcccatgctgggcaacgtcctgctgctctgcttcttcgtcttcttcatcttcggcatcgtcggcgtccagctgtgggcagggctgcttcggaaccgatgcttcctacctgagaatttcagcctccccctgagcgtggacctggagcgctattaccagacagagaacgaggatgagagccccttcatctgctcccagccacgcgagaacggcatgcggtcctgcagaagcgtgcccacgctgcgcggggacgggggcggtggcccaccttgcggtctggactatgaggcctacaacagctccagcaacaccacctgtgtcaactggaaccagtactacaccaactgctcagcgggggagcacaaccccttcaagggcgccatcaactttgacaacattggctatgcctggatcgccatcttccaggtcatcacgctggagggctgggtcgacatcatgtactttgtgatggatgctcattccttctacaatttcatctacttcatcctcctcatcatcgtgggctccttcttcatgatcaacctgtgcctggtggtgattgccacgcagttctcagagaccaagcagcgggaaagccagctgatgcgggagcagcgtgtgcggttcctgtccaacgccagcaccctggctagcttctctgagcccggcagctgctatgaggagctgctcaagtacctggtgtacatccttcgtaaggcagcccgcaggctggctcaggtctctcgggcagcaggtgtgcgggttgggctgctcagcagcccagcacccctcgggggccaggagacccagcccagcagcagctgctctcgctcccaccgccgcctatccgtccaccacctggtgcaccaccaccaccaccatcaccaccactaccacctgggcaatgggacgctcagggccccccgggccagcccggagatccaggacagggatgccaatgggtcccgccggctcatgctgccaccaccctcgacgcctgccctctccggggccccccctggtggcgcagagtctgtgcacagcttctaccatgccgactgccacttagagccagtccgctgccaggcgccccctcccaggtccccatctgaggcatccggcaggactgtgggcagcgggaaggtgtatcccaccgtgcacaccagccctccaccggagacgctgaaggagaaggcactagtagaggtggctgccagctctgggcccccaaccctcaccagcctcaacatcccacccgggccctacagctccatgcacaagctgctggagacacagagtacaggtgcctgccaaagctcttgcaagatctccagcccttgcttgaaagcagacagtggagcctgtggtccagacagctgcccctactgtgcccgggccggggcaggggaggtggagctcgccgaccgtgaaatgcctgactcagacagcgaggcagtttatgagttcacacaggatgcccagcacagcgacctccgggacccccacagccggcggcaacggagcctgggcccagatgcagagcccagctctgtgctggccttctggaggctaatctgtgacaccttccgaaagattgtggacagcaagtactttggccggggaatcatgatcgccatcctggtcaacacactcagcatgggcatcgaataccacgagcagcccgaggagcttaccaacgccctagaaatcagcaacatcgtcttcaccagcctctttgccctggagatgctgctgaagctgcttgtgtatggtccctttggctacatcaagaatccctacaacatcttcgatggtgtcattgtggtcatcagcgtgtgggagatcgtgggccagcaggggggcggcctgtcggtgctgcggaccttccgcctgatgcgtgtgctgaagctggtgcgcttcctgccggcgctgcagcggcagctggtggtgctcatgaagaccatggacaacgtggccaccttctgcatgctgcttatgctcttcatcttcatcttcagcatcctgggcatgcatctcttcggctgcaagtttgcctctgagcgggatggggacaccctgccagaccggaagaattttgactccttgctctgggccatcgtcactgtctttcagatcctgacccaggaggactggaacaaagtcctctacaatggtatggcctccacgtcgtcctgggcggccctttatttcattgccctcatgaccttcggcaactacgtgctcttcaatttgctggtcgccattctggtggagggcttccaggcggagggagatgccaacaagtccgaatcagagcccgatttcttctcacccagcctggatggtgatggggacaggaagaagtgcttggccttggtgtccctgggagagcacccggagctgcggaagagcctgctgccgcctctcatcatccacacggccgccacacccatgtcgctgcccaagagcaccagcacgggcctgggcgaggcgctgggccctgcgtcgcgccgcaccagcagcagcgggtcggcagagcctggggcggcccacgagatgaagtcaccgcccagcgcccgcagctctccgcacagcccctggagcgctgcaagcagctggaccagcaggcgctccagccggaacagcctcggccgtgcacccagcctgaagcggagaagcccaagtggagagcggcggtccctgttgtcgggagaaggccaggagagccaggatgaagaggagagctcagaagaggagcgggccagccctgcgggcagtgaccatcgccacagggggtccctggagcgggaggccaagagttcctttgacctgccagacacactgcaggtgccagggctgcatcgcactgccagtggccgagggtctgcttctgagcaccaggactgcaatggcaagtcggcttcagggcgcctggcccgggccctgcggcctgatgaccccccactggatggggatgacgccgatgacgagggcaacctgagcaaaggggaacgggtccgcgcgtggatccgagcccgactccctgcctgctgcctcgagcgagactcctggtcagcctacatcttccctcctcagtccaggttccgcctcctgtgtcaccggatcatcacccacaagatgttcgaccacgtggtccttgtcatcatcttccttaactgcatcaccatcgccatggagcgccccaaaattgacccccacagcgctgaacgcatcttcctgaccctctccaattacatcttcaccgcagtctttctggctgaaatgacagtgaaggtggtggcactgggctggtgcttcggggagcaggcgtacctgcggagcagttggaacgtgctggacgggctgttggtgctcatctccgtcatcgacattctggtgtccatggtctctgacagcggcaccaagatcctgggcatgctgagggtgctgcggctgctgcggaccctgcgcccgctcagggtgatcagccgggcgcaggggctgaagctggtggtggagacgctgatgtcctcactgaaacccatcggcaacattgtagtcatctgctgtgccttcttcatcattttcggcatcttgggggtgcagctcttcaaagggaagtttttcgtgtgccagggcgaggataccaggaacatcaccaataaatcggactgtgccgaggccagttaccggtgggtccggcacaagtacaactttgacaaccttggccaggccctgatgtccctgttcgttttggcctccaaggatggttgggtggacatcatgtacgatgggctggatgctgtgggcgtggaccagcagcccatcatgaaccacaacccctggatgctgctgtacttcatctcgttcctgctcattgtggccttctttgtcctgaacatgtttgtgggtgtggtggtggagaacttccacaagtgtcggcagcaccaggaggaagaggaggcccggcggcgggaggagaagcgcctacgaagactggagaaaaagagaaggagtaaggagaagcagatggctgaagcccagtgcaaaccttactactccgactactcccgcttccggctcctcgtccaccacttgtgcaccagccactacctggacctcttcatcacaggtgtcatcgggctgaacgtggtcaccatggccatggagcactaccagcagccccagattctggatgaggctctgaagatctgcaactacatcttcactgtcatctttgtcttggagtcagttttcaaacttgtggcctttggtttccgtcggttcttccaggacaggtggaaccagctggacctggccattgtgctgctgtccatcatgggcatcacgctggaggaaatcgaggtcaacgcctcgctgcccatcaaccccaccatcatccgcatcatgagggtgctgcgcattgcccgagtgctgaagctgctgaagatggctgtgggcatgcgggcgctgctggacacggtgatgcaggccctgccccaggtggggaacctgggacttctcttcatgttgttgtttttcatctttgcagctctgggcgtggagctctttggagacctggagtgtgacgagacacacccctgtgagggcctgggccgtcatgccacctttcggaactttggcatggccttcctaaccctcttccgagtctccacaggtgacaattggaatggcattatgaaggacaccctccgggactgtgaccaggagtccacctgctacaacacggtcatctcgcctatctactttgtgtccttcgtgctgacggcccagttcgtgctagtcaacgtggtgatcgccgtgctgatgaagcacctggaggagagcaacaaggaggccaaggaggaggccgagctagaggctgagctggagctggagatgaagaccctcagcccccagccccactcgccactgggcagccccttcctctggcctggggtcgagggccccgacagccccgacagccccaagcctggggctctgcacccagcggcccacgcgagatcagcctcccacttttccctggagcaccccacggacaggcagctgtttgacaccatatccctgctgatccagggctccctggagtgggagctgaagctgatggacgagctggcaggcccagggggccagccctctgccttcccttctgcccccagcctgggaggctccgacccacagatccctctagctgagatggaggctctgtctctgacgtcagagattgtgtctgaaccgtcctgctctctagctctgacggatgactctttgcctgatgacatgcacacactcttacttagtgccctggagagcaatatgcagccccaccccacggagctgccaggaccagacttactgactgtgcggaagtctggggtcagccgaacgcactctctgcccaatgacagctacatgtgtcggcatgggagcactgccgaggggcccctgggacacaggggctgggggctccccaaagctcagtcaggctccgtcttgtccgttcactcccagccagcagataccagctacatcctgcagcttcccaaagatgcacctcatctgctccagccccacagcgccccaacctggggcaccatccccaaactgcccccaccaggacgctcccctttggctcagaggccactcaggcgccaggcagcaataaggactgactccttggacgttcagggtctgggcagccgggaagacctgctggcagaggtgagtgggccctccccgcccctggcccgggcctactctttctggggccagtcaagtacccaggcacagcagcactcccgcagccacagcaagatctccaagcacatgaccccgccagccccttgcccaggcccagaacccaactggggcaagggccctccagagaccagaagcagcttagagttggacacggagctgagctggatttcaggagacctcctgccccctggcggccaggaggagcccccatccccacgggacctgaagaagtgctacagcgtggaggcccagagctgccagcgccggcctacgtcctggctggatgagcagaggagacactctatcgccgtcagctgcctggacagcggctcccaaccccacctgggcacagacccctctaaccttgggggccagcctcttggggggcctgggagccggcccaagaaaaaactcagcccgcctagtatcaccatagacccccccgagagccaaggtcctcggaccccgcccagccctggtatctgcctccggaggagggctccgtccagcgactccaaggatcccttggcctctggcccccctgacagcatggctgcctcgccctccccaaagaaagatgtgctgagtctctccggtttatcctctgacccagcagacctggacccctgagtcctgccccactttcccactcacctttctccactgggtgccaagtcctagctcctcctcctgggctatattcctgacaaaagttccatatagacaccaaggaggcggaggcgctcctccctgcctcagtggctctgggtacctgcaagcagaacttccaaagagagttaaaagcagcagccccggcaactctggctccaggcagaaggagaggcccggtgcagctgaggttcccgacaccagaagctgttgggagaaagcaatacgtttgtgcagaatctctatgtatattctattttattaaattaattgaatctagtatatgcgggatgtacgacattttgtgactgaagagacttgtttccttctacttttatgtgtctcagaatatttttgaggcgaaggcgtctgtctcttggctattttaacc

SEQ ID NO: 31662 - DNA, 7084 bp, Homo Sapiens
ggctgcagctgagctcagcttaaaggtcgctggaaatcaagtgctttgtaagtgaaggcattttgactacaagcgattcaagacattttggaaacgtcagtctctggaatgggtcgtctttttctttctatgatatctggtatctaatgttttacttaggataaagactactacttaatagctcttttaggcaccacaaatgattttttcttttgatgcagtgcagctgcttctagcctgtctacggacagagatctttgttatgactttcagcccttaacatgtttggaaatgagaacaaatggcacaaagcttacgattgcactttgcagccagaagaagcaatacttaccctttgtcagaaacctccggagatgacttggatagccatgttcacatgtgcttcaaaagaccaacacggatttcaacgtctaacgttgttcaaatgaagctgactcccagacagactgcactaactccgttaataaaggaaaacgttcagtctcaagaaagatcatctgttccctcatctgaaaatgttaataaaaagagcagctgtctacagatttcactacagccaacaaggtacagtggatatcttcagtctagcaatgtcttagctgatagtgatgatgcttcgtttacttgtatcttgaaggatggtatttacagtagtgctgtggtcgataatgaattgaatgctgtgaatgatggtcaccttgtaagcagtccagccatttgtagtggtagccttagtaacttttcaaccagtgataatgggtcttacagcagcaatggtagtgattttgggtcatgtgcaagtatcacaagtggaggttcatatactaacagtgtcatcagtgacagtagtagttatacttttccaccaagtgatgatacttttttgggtggaaacttaccttctgacagcacctccaatagaagtgtgccaaacaggaatactactccttgtgaaattttttcaagaagtacaagtacagatccttttgtccaggatgacttggaacatggattagagattatgaaattgccagtgagcaggaacacaaaaattccactaaaacgttactcctccttagtcatttttcctaggagtccttcaactacccgaccgacttctccaacaagtctgtgtactcttctgagcaaaggatcctatcaaacttcacaccagtttattatttctcctagtgaaattgcacataatgaggatggcactagtgctaaaggatttctttcaacagctgtcaatggacttcggttatctaaaacaatttgtacccccggagaagtaagagacatacggccgcttcacaggaagggctcgttacagaagaaaattgttctttcgaataatactcccagacagactgtctgtgaaaagtcatctgaaggatattcttgtgtttcagtgcatttcacccaacgaaaagcagctacattagactgtgaaacaacaaatggtgattgtaaaccagaaatgtcagaaattaagcttcattctgattcagagtatattaagctcatgcataggacatctgcatgtttgccatcctcccaaaatgtagattgtcaaataaatatcaatggagaattggaaagaccacattcacagatgaacaaaaaccatggtattttacgaagaagtatttcattgggaggagcttatccaaatatttcctgtctatccagccttaagcacaattgttctaaagggggaccatctcagttactcataaagtttgcatctggaaatgaaggtaaagtggataatttatcaagagacagcaacagagattgcacaaatgaactgtctaattcttgcaagcctggctgggttgttttggaccaaccagatgctgcttgccatttgcagcaacaacaagaaccttctcctctacctccagggtgggaagagaggcaggatatccttggaaggacctattatgtaaaccatgaatctagaagaacacagtggaaaagaccaacccctcaggacaacctaacagatgctgagaatggcaacattcaactgcaagcacaacgtgcatttaccaccaggcggcagatatccgaggaaacagaaagtgttgacaaccgagagtcttccgagaactgggaaattataagagaagatgaagccaccatgtatagcaaccaggccttcccatcacctccaccgtcaagtaacttggatgttccaactcatcttgcagaagaattgaatgccagactcaccatttttggaaattcagccgtgagccagccagcatcgagctcaaatcattccagcagaagaggcagcttacaagcctatacttttgaggaacaacctacacttcctgtgcttttgcctacttcatctggattaccaccaggttgggaagaaaaacaagatgaaagaggaagatcatattatgtagatcacaattccagaacgactacttggacaaagcccactgtacaggccacagtggagaccagtcagctgacctcaagccagagttctgcaggcccgcaatcacaagcctccaccagtgattcaggccagcaggtgacccagccatctgaaattgagcaaggattccttcctaaaggctgggaagtccggcatgcaccaaatgggaggcctttctttattgaccacaacactaaaaccaccacctgggaagatccaagattgaaaattccagcccatctgagaggaaagacatcacttgatacttccaatgatctagggcctttacctccaggatgggaagagagaactcacacagatggaagaatcttctacataaatcacaatataaaaagaacacaatgggaagatcctcggttggagaatgtagcaataactggaccagcagtgccctactccagggattacaaaagaaagtatgagttcttccgaagaaagttgaagaagcagaatgacattccaaacaaatttgaaatgaaacttcgccgagcaactgttcttgaagactcttaccggagaattatgggtgtcaagagagcagacttcctgaaggctcgactgtggattgagtttgatggtgaaaagggattggattatggaggagttgccagagaatggttcttcctgatctcaaaggaaatgtttaacccttattatgggctgtttgaatattctgctacggacaattataccctacagataaatccaaactctggattgtgtaacgaagatcacctctcttacttcaagtttattggtcgggtagctggaatggcagtttatcatggcaaactgttggatggttttttcatccgcccattttacaagatgatgcttcacaaaccaataacccttcatgatatggaatctgtggatagtgaatattacaattccctaagatggattcttgaaaatgacccaacagaattggacctcaggtttatcatagatgaagaactttttggacagacacatcaacatgagctgaaaaatggtggatcagaaatagttgtcaccaataagaacaaaaaggaatatatttatcttgtaatacaatggcgatttgtaaaccgaatccagaagcaaatggctgcttttaaagagggattctttgaactaataccacaggatctcatcaaaatttttgatgaaaatgaactagagcttcttatgtgtggactgggagatgttgatgtgaatgactggagggaacatacaaagtataaaaatggctacagtgcaaatcatcaggttatacagtggttttggaaggctgttttaatgatggattcagaaaaaagaataagattacttcagtttgtcactggcacatctcgggtgcctatgaatggatttgctgaactatacggttcaaatggaccacagttatttacagttgaacagtggggtactcctgaaaagctgccaagagctcatacctgttttaatcgcctggacttgccaccttatgaatcatttgaagaattatgggataaacttcagatggcaattgaaaacacccagggctttgatggagttgattagattacaaataacaatctgtagtgtttttactgccatagttttataaccaaaatcttgacttaaaattttccggggaactactaaaatgtggccactgagtcttcccagatcttgaagaaaatcatataaaaagcatttgaagaaatagtacgacaacttatttttaatcacttttaaataatgtgttgcatttacacagttgtttcatgctgtctttagagttaggtgcctgcctaaagccaggcaccaccacacctggctttagagttcacacaataggatataagtcctgtatgacttaaatagtgaattttgtccttaacatttacctcttgtatagtatctgccaggcagttttttcttaaactactgagatgataactgtgaaatatttgtgatacgtgtcatgtgtgaaaagtttgatgcattttgagatggaaaactgaaatttggaaaaagaaatactttactattgagtaaactacaatatatttagtgctactcgcagctatttattattttgtagacctgccttatgcaccttactgcctagatttttgggaaaaaaactttggaaagtgtgttacctatatttctagccaactaactcacagaaaaactgtttacttcttcactttcgaagtatttggcttttgttaatatgcagttttactaaacagatggttcataagacatgtgaagcaaattcatatttgcaatgggtaaaaagtattaaagcctttctcttgcctgcatatcctattgaccattggtatagtcatcactttttcatattttagtgtagttagaagaattccttcttcaaacattaaagatccacaaagcagtatttctaaatatgccttgaagaactaaatgaagtgtatagcacttgcctttactagatattctttacacttgtacaattatgtagtaaatgtatgtttacagggtttatcatgtttacagattaagctaatttctgtagtcgcatttttatatttttagtatcactctagtaaaaaaaccaaataatttgtttaaaataaccaaagagttgttataatgcataatttgtattaaatttattactatttcttatgccttttaaaatactgtttactatgaagacagtgtttttaattacaaatccagaattctgtaggcaaaatgctacagttcatatcttcctttaaccaaactgaagtacataaagaccatgtacatgtattcatcaaacgtttattgaatgctgcgtgcctagcgctgtgctatgctctggggtaagagttgtcagcttcagagaagctgagtcctgatcctcaaggaacttgcaaatgtgtctatgaatttgtaaaacaatcaaaagtaggcgtaagcagaataaggcaaaagggaaagtgttctaggttccagcacacctgcaaagataaagtgtgccaagactgtatttatatttcatacttatattgtttcatccttatattggaatgattatatagaaaatgctcttaaaaagattaaacctatttctcagtatggtatcttggtgatttaggaataattgtaaatatatgttacgaatcttcttaaatatatatatatacacaccctgtgagaactgtaaaaagtacctctggttcttggtttaagtttgttggggtataacatgatgagtactcattagcacctgatagaaatctgaaatgtgacagtagcaaaaccactttctactttccaaacaccacagcatcagcatggtttaggggaagcaattcacagattaatgtaccctgcgttttgtcttcaccattgtcaaccagcagtcaaggatgagcaccaggtatagtcctggtttgatatctcaccagccatgtgaactgaagcagcttacttaacctctctggattcatatttcttcatctgtcaaatgagagtaatcatgcccaccctcattgtcatgccagattgtcagaagttccagacagatgagaaagcaaaaagtactttgtaaagtgttatacaatcagaaggtgctttgtgctgaccgtcagattgtgtcaagtcaggtgtgcaaattgaccacactcccaaagaatcatttaaaagtaaagtgacttctaagagacaaggaagtaggaacatttctgatattaaatatataaataatatggatacacatgtgtatatctgtatatggatcttaccatcataattcattttcttcatatcagcaaagtaatagtaatgtgggccaatgcattttggaaatgtcctcattatgtagaatggaatgtgaaaattatttttgttaaaacaggattttgccacaattatttaaatattatgtttgtgaactatctaagcatgagaaaatacaaagctttctttgtatctggctgatactcatttggatgattctgtgactcatagaacatgatgttaaatgagaccagactcaactgccaccagtccccagctgcagaccttcatccccttcatctcccactaggggctcatggtctggaagaaacatgtatcaagcaacacagccccttatcccagatagaaaagtgtctcaaatgcattctactgcgggacagtcagtaggatcattttcataaagcaaggacatcatatgtttctagaaattacaagcatataactttagcctacaatctcttattaaaaatttttaacaaaattgtattacaaatgcatttcatcagaactcaaatttaaatggtgtttgttttgggtttttatttataatgctgaagttattccatataagtatcaagttaaacacaattcattttgattataaactatttgactttttaaaatcttctgacacagtaaatatatatatcaagattgatgtatcaaaatttattgcacactttaaagtgtaaaatcattttttaaaatcttgaatccacaaataaagttctattctgattttaaaaaaaaaaaaaaaaaaaaaaaaaaaaaaaaaaaaaaaaaaaaaaaaaaaaaaaaaaaaaaaaaaaaaaaaaa

SEQ ID NO: 31663 - DNA, 2413 bp, Homo Sapiens
gcaggcctctcctccgagaacagaggccaggtcatgactcactggcttcctgcaacctgacgatggcccagccagaagacaaggcacctgaagtccccacagagggggtgaggtgaacaaagcagacaggacccctctaggggtcctcagcaccctagagccacttactcgcctgcagaggacatggggggtgtggcatgtgccagagctggatacccaggatgcggaggcccttgtggggctgtggccactagggagtttcttggtcacaggacgtgaccccagccaggccctggtgttgaggtcaggacctttaccaggagaagtcaatacctaccagatccagaagattcccagaggtgtgtccctggaatcctccaacctctgcatgccagacctgccccatctcctggcctttctatcagccagcagggatgttctgcccagaaccctgctcttgccccctcccactctagggcccagagatgaacacacagatcctgtgcagatcggcagggtccaacaggacaccccagggaaggtgctttccattgtgaaccagctctacctggagacccacagaggctgggggagggagcagacccctcaagaaacagagccagaggctgctcagagacatgatccagcccccaggaaccctgcgcctcacggggtctcctgggtgaaaggcccgctcagcccggaagtggaccatcctgggccggctctcgccagcctactggaagaggaggaggaagaccttgaaggaaaggaggaaggaagggaggacgaccctgaagaggaaggccctgaggacgtgctcaccattcacgtccagtctctggtcagggcccggagcagctacgtggccaggcagtaccgaagccttcgggtgcgcatcgcctcagattctgggggtccccacgggtctggggacccggccacggagctgcttcaggatgtgcggcacctccttactgacctccaggatcacctggcaaaggactcctacatcagggctgtctttggaagcaggggtcctgggctccccaagaaggacgaggatccaggccccgcgctggagacggcggtgtgccaggcggtgctggcgcccctgaagccggccctgtggacacgactccgcacactccgagcaccggagctgcggcggctgcggcggcgacagacagccctgcgggcgggggcggggcctccgggggcacaggggccgggaccggaagggcagagccccgcccccgccttgcggagccgcatccacgagcgccttgcgcacctccacgctgcctgcgccccgcgccgcaaggtggcgctcctcttggaggtgtgcagagatgtctatgcgggcctggctcgaggcgagaaccaagatcccctgggggccgacgccttcctgccggcgctgaccgaggaactcatctggagcccggacattggggacacgcagctggacgtagagtttcttatggagctcttagatccagatgagctgcggggagaggctgggtactacctgaccacgtggtttggggcgctgcaccacattgcccactaccagcccgaaacagaccgcgctccccgggggctcagctccgaggcccgcgcctccctgcaccagtggcaccgcaggcggacgctgcacagaaaggatcatcccagagcccaggccaacctgccctttaaggagccatgggcagaagagactgtgacagggaccagtgacaactaggggtttcacacccctccgttcatgcctgtaatcccaacattttgggaggccaaggtgggaggattgctcaaactcctaacctcaagcaatctgcccacgtcggcctcccaaagtgctgagattgtaggcgtgagccaccgtgcccaattgtgatcgtttttcccaaagaatgtatcacatgctaacaaaccatatatttatgtatttcattgttcatagtaactacaatttaaaaaactaaaaagaaacaagtgaggccgggtgcggttgctcatgcctgtaatcccagcactttgggaggccaaggtgggcagatcacctgaggtcgggagttcaagaccagcctgacaaacatggagaaacccgtctctactaaaaatacaaacttagccgggcatggtggcgcatgcctgtaatcccagctactccggaggctaaggcaggagaatggcttgaacccgggaggcgaagattgcggtgagcggagattgcgccattgcactccagcctgggcaacaagagtgaaacaccatctcaaaaataaataaataaataaaaagaaacaagtgaagttaacgttaataataatatatttgatttaacacaatgtatcccaaatattatcacttcaacatgtatccatattaaaaagttactgacatattt

SEQ ID NO: 31664 - DNA, 3829 bp, Homo Sapiens
ggatcgcgtggagtgaaggtcctaccacggcgcgtgagtttcgctctgccttggattaagtctgcacttcccaggtccccggcgcttctgcccctgggacgtgggatccccacggacctggaaattctcgcctgtcttcccttcacccagagcaaattgagacgtcccggattgattcctaaagactcatgttatgtgaagaagcagctcagaagaggaaaggaaaggagccaggcatggctcttcctcagatatctcttccaaacgcatgatgaaggaggtcttgtcaacagggcaaggcaatacagaagtgatccacacagggacattgcaaagatatcaaagttatcacattggagatttttgcttccaggaaattgagaaagaaattcatgatattgagtttcagtgtcaagaagatgaaagaaatggccatgaagcacccatgacaaaaataaaaaagttgactggtagcacagaccaacatgatcacaggcatgctggaaacaagcctattaaagatcagcttggatcaagcttttattcacatctgcctgaactccacataattcagatcaaaggtaaaattggtaatcaatttgagaagtctaccagtgatgctccctcggtttcaacatcccaaagaatttctcctaggccccaaatccatatttctaataactatgggaataattccccgaattcttcactactcccacaaaaacaggaagtatacatgagagaaaaatctttccaatgtaatgagagtggcaaagcctttaattgtagctcactcttaaggaaacaccagataccccatttaggagacaaacaatataaatgtgatgtatgtggcaagctctttaatcacaagcaataccttacatgccatcgtagatgtcacactggagagaaaccttacaagtgtaatgagtgtggaaagtccttcagtcaggtatcatcccttacatgccatcgtagacttcacactgcagtaaaatctcacaagtgtaatgagtgtggcaagatctttggtcaaaattcagcccttgtaattcataaggcaattcatactggagaaaaaccttacaagtgtaatgaatgtgacaaagcttttaatcagcaatcaaaccttgcacgtcatcgtagaattcatactggagagaaaccttacaaatgtgaagaatgtgacaaagttttcagtcggaaatcaacccttgagtcacataagagaattcatactggagagaaaccatacaaatgtaaggtttgtgacacagctttcacatggaattctcagctggcaagacataaaagaattcacactggagagaaaacttacaagtgtaatgagtgtggcaagaccttcagtcacaagtcatcccttgtatgccatcatagacttcatggtggagagaaatcttacaaatgtaaggtctgtgacaaggcttttgcgtggaattcacacctggtaagacatactagaattcatagtggaggaaaaccttacaagtgtaatgaatgtgggaagacctttggtcaaaattcagatcttctaattcataagtcaattcatactggagagcaaccttacaaatatgaagaatgtgaaaaggttttcagttgtggatcaacccttgagacacataagataattcacaccggagagaaaccatacaaatgtaaggtttgtgacaaggcttttgcgtgtcattcctatctggcaaaacatactagaattcatagtggagagaaaccttacaagtgtaatgagtgcagcaagaccttccgtctgaggtcataccttgcaagccatcgcagagttcatagtggtgagaaaccttacaagtgtaatgagtgcagcaagaccttcagtcagaggtcataccttcattgccatcgtagacttcatagtggtgagaaaccttacaagtgtaatgagtgtggcaagaccttcagtcacaagccatcccttgttcaccatcgtagacttcatactggagagaaatcttacaaatgtacggtttgtgacaaggctttcgtgcgtaattcatacctggcaagacataccagaattcacactgcagagaaaccttacaagtgtaatgaatgtgggaaggcttttaatcaacaatcacaactttcacttcatcatagagttcatgctggggagaaactttacaaatgtgaaacatgtgacaaagttttcagtcgcaaatcacaccttaaaagacataggagaattcatcctggaaagaaaccatacaaatgtaaggtttgtgacaagacttttgggagtgattcacacctgaaacaacatactggacttcacactggagagaaaccttacaagtgtaatgagtgtggcaaagcctttagcaagcagtcaacacttattcaccatcaggcagttcatggtgtagggaaacttgactaatgtaatgattgtcacaaagtcttcagtaacgctacaaccattgcaaatcattggagaatctataatgaataaagatctaacaagtgtaataaatgtggcaaatttttcagacatcattcatacattgcagttcattgacacactcatactggagagaaaccttacaaatgtcatgactgtggcaaggtcttcagtcaagcttcatcctatgcaaaacataggagaattcatacaggagagaaacctcacatgtgtgatgattgtggcaaagcctttacttcatgttcacacctcattagacatcagagaatccctactggacagaaatcttacaaatgtcagaagtgtggcaaggtcttgagtccgaggtcactccttgcagaacatcagaaaattcatttttgagataactgttcccaatgcagtgagtatagcaaaccatcaagcattaattgacactagagtcagtccagcattgacttgagtttgtgttgacttaacattgagttcaacccttaattgacattcaagtgtttatgttaagaggattgggccaggtgtggtttctcacacctgtaattccagcacggttggaggccaaggcacataggtcacttgaggtcagaagtttgaaaccagcatggccaacagatgtcagccacttttcccagcctgttttttgattcttattttctatttttcttttttgagatagtactttttaaagagatagtacttttttgatatagtactttataaaagggagatcaggccgggcacggaggctcatgtaggtgatcccggcactttgggaggccgagacgggcccatggcagggtcaggagatcgagaccgtcctggctagcacggtgaggccccgtctctgctgaaaatatagaatattggccgggcgtggtggcgggtgcctgtggtcctagctgcttgggaggctgaggcgggagaatggtgtggatcctggagacggagcttgcagggagccggcatcgtgccactgcactccggcctgggcgacggtgagaatctgtctcaaagagaaaggaaaagaagggatatcaaagctggatggtggctcatccctgcaatcacaacactttggtagactgatgtgagtggatcacctaaggtcagaagttcaagagcaccctggctaacatggtgaaaccccatctctactaaaagtgcagaggttagccggggggtggtggtgtgcacctttggttccagctacttgggaggctgaggcacgggagtcgcttggacctgggaggtagaggttgccgtgaggcaagatcgtgccactgccctcagcctgggcagtagagtcagtctccatctcaaagaaaccagcaaacaaaaaaaaaaaaaaaaaaa

SEQ ID NO: 31665 - DNA, 3829 bp, Homo Sapiens; identical to SEQ ID NO: 31664

SEQ ID NO: 31666 - DNA, 4745 bp, Homo Sapiens
gggggctagggggtggggctgcagccgggacggggccttcggcagggcctgcgggggcgggacggagcggacccgagtgatacccgggagactagcttggccacaggagacaacgttgaggtacagacaggattattcaagatcaggttgtagccattttcaacaaggatcactgatcaaaattttctttttacaaagagatttacaagttaaacatgaagggaaaatactggaatcatttggattctgacaggataaagaatacaatatttcacatttacttgtaatggaacctttgtaagattcatcacttgtcattcacccagttgggaacatggaagttggtttttctcgtactactgttcagacactgtcaagaagccactgcaaaaacatcaaacaaaaaatttctcaatgggaaggaagggctaatggtatatctaatccagaaaagtggtgtccaaaggactttggagtgagatataactgtcaccaagagatccgtcttaagaaaaatcctatagctgagagaaagagcaaaaacttggatgtaaccagccgtgaaaatgtgggtctagatataaatgaaaataccaaaagccatgatcaaagtgagaatgaaaataagaaacatgaatatgacgatacacacttctttaaaaatgaatcagaatccaactgggtatgttctcgggtcaaagaaattgaaagctgtaaagaagatgtcttagatccagagacttcattacctccaggaaacttctatacctcacaaatactgtggaagaaaatagaagcacttcccccagataaactcttaaatttggctttagaacattgtgactcttcagaaaaagaactgaacttcagagttctggatagttcatacggaataaccaagagcttagaaaatatttactctgaacctgaggggcaagaatgtggaccttccataaatcctttgccaaaacctcgtaggacattcagatatttatccgaatctggtgttacgccgtataaagaaagaaactgtgacaaaaaatactgtgaaaataactcttgtgcacaatcttctttggcctcttctcaggaacctgaaccaaagaaatatggtggaaaaatcagaggaagatctaaaaggaaatcctttgaatttgaggatattcagcactttcgaaatcggaactcacagacgattcgtgaagaacttggaagaaattctgggtcagcactttattacacacagtctgaggacaatatctatgaagatatcatatatcccaccaaagaaaatccatatgaagatattccagtgcagcctttacctatgtggagatccccttcagcatggaagctaccacccgctaaaagtgcttttaaagcacccaagcttgtattgaaaatagatgacatatttgaatctaaaagagggaagaagaaggtaaagttacattcttacactgggaaggaattacctccgacaaaaggtgaaaccagtgggaacgaaagtgatgccgagtatctgccaaagaatcgccataaacgcttagcacaactgcaaccgtcttccaagaggaatcctcactaccagaccttggagcgggatcttattgaattacaggagcagcagctgtttgaactttttgtggtggtgtctctacagaagaaaccatcaggaataagctatattccccaggtcatacaacaattccctggcaaggatgatcatggctataagcagtccaaagacatggaagagagacttaaagttattccaaaattttgttttcctgattcaaaggactggatgccaacctcagaactcaagagtgaaacattctcctttgtcttgactggtgaagatggaagccggtggtttggttactgtaagaagctcttgccagtaggcaaaggaaagcgactccctgaggtatactgcatggttagtcgcctaggctgcttcaatcttttttcaaagattctggatgaagtagagaagagaagagaaatgtctccagcccttgtttacccattcatgcgaagtgtcatggaagctcctttcccagctcctggacgcaccatcacagttaagagttacctccctggggctggagatgagtccattgaactctgccgaccactagattcccgattggaacatgttgattttaaatgtctctttaagtgcctgagtgtgtgtcatctcatccgggtctgtgcctctctccttttggagcgtagggtaatctttgttgccaacagcctaagcaccctgtcaaaatgtggccatgctgtggtagctacactgtatccgttcacctggcagcatacctatatcccagtcctgccagcatctatgattgacatcgtgtgctcacctacaccattccttattggaatcctgtcttgctccttaccacagctccaggacctacccattgaagaggtgctgatagttgatctctgtacagacaagttcttacaggaggtatctgatgaggatgaaattctaccaccaaaacttcaagctgccctgatgcagattttggaagaacgaaatgaaatcttgactcaggagcagaatttttcacaagatgtgacactcaactctctggtgtccgaagcatttgtcaggttttttgtggagttggtaggacattattctttgaacatgactgtcactgagcgtggggagcgtgttttccaaagggaaccattccgtaagtcccacacctcccgaagtgtacgccacttcctggatctcttcatggaaactcagatgtttgcaggattcatccaggaccgagagcttcggaaaagtggagttaaaggtttgtttgagatccgggccatccagtatttggaaacaattcctgagtcggagcccagtgggatgaatagaattttgcggagtcttggaagcaaaatgaaatttctgcaaaagaaatgaaatctctgattgtctccatcctgaatatacaacagaaagtgccaaagaaaatatttttctaagggtcaggatcccatgaagtattctacaaaattcttgaaattttaaaaggttaaagagcgagtcaggctgtcagaggaggattctcctgttgctgctgtagtaatcactggagaattgttgggaatggtctggcaccatgccatctttactctgtctccattttttttttatagcagccttttctatgtgattcttgggctcattctctgttttgtgctttgtctgtgaaagtagttgtgtttcacaaggaaaagccttgttgttgttacatttaaaaaatagctcaaagatgagaataatgagagaaatgctgagtttaaggtagtagagagacatgatggaaatggagaacactagccttatacacataattctcatcactgaactatcatggcccctttaaacccatgggctgtttgacctgggctaaggaatagactcatcacatatctccattgttttgccttatattatatctaggggaatctcacttaggaggaagccctacttgtaatattataaggtactgttattaagtaccttataaaattagacatcttgcaactcctcctccaaattatgtggcatttgagtagtttgcttgtgcctcacatgtcaacattaaactttgtggaggctggatgcagtggctcacacctgtaatctccaccactttgggaggctaaggcaggagtttgagggtgggagtttgagactagcctgggcaacatagcaagatcccatctctacaaaaacattttaaaaataagtaaataaatttaaactttgtgaaattatagctaatatgaaaatgtcctttcaagggcatgggagccacctttattttttagtgtccaccatgtgccatgcactgtggtatatgtatgcatatcatctcaaccaatccttaaatcaaccttatgagatagatatttgcatctccattttactaataaactgaggctgggattacaggcatgagtcactgcacccggcctgtgtgtgtgtgtgtgtgtgtgtgtgtgtgttttcaaactcatgggcaaattcaagttcagatggtgcacttttcattgattaatgttatagcaaatgtcagtttgttttcttcagtttctgctgatggttttaactggcacagaaagtatttattcaaccttacaaaactgtgtaagttgtattgtgatacagtttattgacttgtacagtattgtcattacaacccattcaggtatgcatgaatctgaagcagaacaccatttaagactggtgctgtataatataattcctacagatgtgggtccagggaatagaactgagcctgtcttttttttaatgttaagcaggttacccccagtggggcttctactagacatctctccatttggtctcttcttacactccaacccagcaggaacagttaataattggatgtttataaaatgggggtaaaagggtttactgtgatggatcctggctatccctctaggaggagacctttgcttcagcaatggtgtcttcatcctcgcagcctgaagctgcttcatttccttaggtctgttgtgttttctgtaaagtgttaggaattctggatatttttgtaaaagaatcaagatttgtataaaatgttgtttacagatcttttaatgaataaatacataaaccccccacagaaaaaaaaaaaaaaaaaaaaaaaaaaaaaaaaaaaaaaagaaaaaaaaaaaaaaaaaaa

SEQ ID NO: 31667 - DNA, 8082 bp, Homo Sapiens
ggacagcgctctcgacacggagcacccttctagcttcttcgtctccaggactgacgctcaggctcctctctcgccttagcccaacttgctttcccgcctcgcaaactccggtttccctccactcccaactcttttcactacacgtttcccctcctctatctcccacgccacgaaccccgatccccagactcctctctcccgccctcctccttcctctctcctcccttcaactcttcatccgcttccacctcagactctgcgcgcacccaattcagtcgcccgctcccgttcggctcctcgaagccatggcgggacctgggggctggagggacagggaggtcacggatctgggccacctgccggatccaactggaatattctcactagataaaaccattggccttggtacttatggcagaatctatttgggacttcatgagaagactggtgcatttacagctgttaaagtgatgaacgctcgtaagacccctttacctgaaataggaaggcgagtgagagtgaataaatatcaaaaatctgttgggtggagatacagtgatgaggaagaggatctcaggactgaactcaaccttctgaggaagtactctttccacaaaaacattgtgtccttctatggagcatttttcaagctgagtccccctggtcagcggcaccaactttggatggtgatggagttatgtgcagcaggttcggtcactgatgtagtgagaatgaccagtaatcagagtttaaaagaaggttggattgcttatatctgccgagaaatccttcagggcttagctcaccttcacgcacaccgagtaattcaccgggacatcaaaggtcagaatgtgctgctgactcataatgctgaagtaaaactggttgattttggagtgagtgcccaggtgagcagaactaatggaagaaggaatagtttcattgggacaccatactggatggcacctgaggtgattgactgtgatgaggacccaagacgctcctatgattacagaagtgatgtgtggtctgtgggaattactgccattgaaatggctgaaggagcccctcctctgtgtaaccttcaacccttggaagctctcttcgttattttgcgggaatctgctcccacagtcaaatccagcggatggtcccgtaagttccacaatttcatggaaaagtgtacgataaaaaatttcctgtttcgtcctacttctgcaaacatgcttcaacacccatttgttcgggatataaaaaatgaacgacatgttgttgagtcattaacaaggcatcttactggaatcattaaaaaaagacagaaaaaaggaatacctttgatctttgaaagagaagaagctattaaggaacagtacaccgtgagaagattcagaggaccctcttgcactcacgagcttctgagattgccaaccagcagcagatgcagaccacttagagtcctgcatggggaaccctctcagccaaggtggctacctgatcgagaagagccacaggtccaggcacttcagcagctacagggagcagccagggtattcatgccactgcaggctctggacagtgcacctaagcctctaaaggggcaggctcaggcacctcaacgactacaaggggcagctcgggtgttcatgccactacaggctcaggtgaaggctaaggcctctaaacctctacaaatgcagattaaggcacctccacgactacggagggcagccagggtgctcatgccactacaggcacaggttagggcacctaggcttctgcaggtacagtcccaggtatccaaaaagcagcaggcccagacccagacatcagaaccacaagatttggaccaggtaccagaggaatttcagagtcaagatcaggtacccgaacaacaaaggcagggccaggcccctgaacaacagcagaggcacaaccaggtgcctgaacaagagctggagcagaaccaggcacctgaacagccagaggtacaggaacaggctgccgagcctgcacaggcagggactgaggcagaggaacctgagtcattacgagtaaatgcccaggtatttctgcccctgctatcacaagatcaccatgtgctgttgccactacatttggatactcaggtgctcattccagtagaggggcaaactgaaggatcacctcaggcacaggcttggacactagagcccccacaggcaattggctcagttcaagcactgatagagggactatcaagagacttgcttcgggcgccaaactcaaataactcaaagccacttggtccgttgcaaaccctgatggaaaatctgtcatcaaataggttttactcacaaccagaacaggcacgggagaaaaaatcaaaagtttctactctgaggcaagcactggcaaaaagactatcaccaaagaggttcggggcaaagtcatcatggagacctgaaaagcttgaactctcggatttagaagcccgcaggcaaaggcgccaacgcagatgggaagatatctttaatcagcatgaggaagaattgagacaagttgataaagacaaagaagatgaatcatcagacaatgatgaagtatttcattcgattcaggctgaagtccagatagagccattgaagccatacatttcaaatcctaaaaaaattgaggttcaagagagatctccttctgtgcctaacaaccaggatcatgcacatcatgtcaagttctcttcaagcgttcctcagcggtctcttttggaacaagctcagaagcccattgacatcagacaaaggagttcgcaaaatcgtcaaaattggctggcagcatcagaatcttcttctgaggaagaaagtcctgtgactggaaggaggtctcagtcatcaccaccttattctactattgatcagaagttgctggttgacatccatgttccagatggatttaaagtaggaaaaatatcaccccctgtatacttgacaaacgaatgggtaggctataatgcactctctgaaatcttccggaatgattggttaactccggcacctgtcattcagccacctgaagaggatggtgattatgttgaactctatgatgccagtgctgatactgatggtgatgatgatgatgagtctaatgatacttttgaagatacctatgatcatgccaatggcaatgatgacttggataaccaggttgatcaggctaatgatgtttgtaaagaccatgatgatgacaacaataagtttgttgatgatgtaaataataattattatgaggcgcctagttgtccaagggcaagctatggcagagatggaagctgcaagcaagatggttatgatggaagtcgtggaaaagaggaagcctacagaggctatggaagccatacagccaatagaagccatggaggaagtgcagccagtgaggacaatgcagccattggagatcaggaagaacatgcagccaatataggcagtgaaagaagaggcagtgagggtgatggaggtaagggagtcgttcgaaccagtgaagagagtggagcccttggactcaatggagaagaaaattgctcagagacagatggtccaggattgaagagacctgcgtctcaggactttgaatatctacaggaggagccaggtggtggaaatgaggcctcaaatgccattgactcaggtgctgcaccgtcagcacctgatcatgagagtgacaataaggacatatcagaatcaccaacacaatcagatttttctgccaatcactcatctccttccaaaggttctgggatgtctgctgatgctaactttgccagtgccatcttatacgctggattcgtagaagtacctgaggaatcacctaagcaaccctctgaagtcaatgttaacccactctatgtctctcctgcatgtaaaaaaccactaatccacatgtatgaaaaggagttcacttctgagatctgctgcggttctttgtggggagtcaatttgctgttgggaacccgatctaatctatatctgatggacagaagtggaaaggctgacattactaaacttataaggcgaagaccattccgccagattcaagtcttagagccactcaatttgctgattaccatctcaggtcataagaacagacttcgggtgtatcatctgacctggttgaggaacaagattttgaataatgatccagaaagtaaaagaaggcaagaagaaatgctgaagacagaggaagcctgcaaagctattgataagttaacaggctgtgaacacttcagtgtcctccaacatgaagaaacaacatatattgcaattgctttgaaatcatcaattcacctttatgcatgggcaccaaagtcctttgatgaaagcactgctattaaagtatgcattgatcaatcagcagactctgaaggagactacatgtcctatcaagcctatatacgaatactggcaaaaatacaggcagctgatccagtgaaccggtttaagagaccagatgagctccttcatttgctgaagctcaaggtatttccaacacttgatcataagccagtgacagttgacctggctattggttctgaaaaaagactaaagattttcttcagctcagcagatggatatcacctcatcgatgcagaatctgaggttatgtctgatgtgaccctgccaaagaatcccctggaaatcattataccacagaatatcatcattttacctgattgcttgggaattggcatgatgctcaccttcaatgctgaagccctctctgtggaagcaaatgaacaactcttcaagaagatccttgaaatgtggaaagacataccatcttctatagcttttgaatgtacacagcgaaccacaggatggggccaaaaggccattgaagtgcgctctttgcaatccagggttctggaaagtgagctgaagcgcaggtcaattaagaagctgagattcctgtgcacccggggtgacaagctgttctttacctctaccctgcgcaatcaccacagccgggtttacttcatgacacttggaaaacttgaagagctccaaagcaattatgatgtctaaaagtttccagtgatttattaccacattataaacatcatgtataggcagtctgcatcttcagatttcagagattaaatgagtattcagttttatttttagtaaagattaaatccaaaactttacttttaatgtagcacagaatagttttaatgagaaatgcagctttatgtataaaattaactatagcaagctctaggtactccaatggtgtacaatgtcttttgcacaaactttgtaacttttgttactgtgaattcaaacattactctttggacagtttggacagtatctgtattcagattttacaacatggagtaaagaaacctgttatgaattagattacaagcagccttcaaaagaattggcactgggataagatttttcagaaaaagaaaaacatcggcaaactgtgtgtgatttttccaaagctatataaagaaccaaaggtttagtcaagaaacaaaaatcttaaagattattataacccagactaaggttgaacaacctgcatgcccagagaaaactatggcgacaaaggggaaaaggccaccactcgttttctcactgattcatgccaattaagcctacagttaaagaccagttttgttcttttcacccatttttaagctggttttctcctgataagaagaaaggaagaaagccccagacgcttggtttttctcagaacccccaaaagatgtgcaatagctgttgttacaaaccaccaaataatacagttgtgagcctgaatacaggactgaactcctatacacgtgtactgtagaatgagtattttttaataccttaaggtaggcgtcaaattctactccccaaagcagagatggattgatttatcaaaattattatctggccaacagtgtgactatcagacagcatcaaatatttgcccaatccaagattagactacacaaaagcttccttccagtattaaacaaaaagaattaaacataactatgaaaaaactttgctaatatctgtgtttttcagatttcattttttgtaaaatcagaaattaatctaaacatattcagtgataagttcatgtgtaacgacttaatgttaaaggttaaaaaaaagatttcacaaaatatacaactttcaccatatatataagcctgcaaaattagagtagtgaaagtcatgctagtccatcacccaaatatgttatagacgccatagacaggtgatgtttggtcacctatggtaactgctacctgatgaagagcataatttctgcatatccatcctcaataccatggtaaattctggggcaatagagaagcaacagaactgccacaaagtatacctcaatataattcctctagttctgcttctaaaatctgaggacagtgctagtgggaaaataattttcaaactacctggttaaccaaaatacaaaagcagctgactatgtgtgatttcataatagcacatttcttgacacttagtgctagaaatgaagatttggattttcctaacaacttacatcaagaatgtagtgtagctcattattgagaatttaggaaagcctgaatccattaattaaggaaataaatgtgactcacatttcttttactgtgacacaataatgtgatcctaaaactggcttatccttgagtgtttacaactcaaacaactttttgaatgcagtagttttttttttttaaaaacaaacttttatgtcaaattttttttcttagaagtagtcttcattattataaatttgtacaccaaaaggccatggggaactttgtgcaagtacctcatcgctgagcaaatggagcttgctatgttttaatttcagaaaatttcctcatatacgtagtgtgtagaatcaagtcttttaataattcattttttcttcataatatttactcaaagttaagcttaaaaataagttttatcttaaaatcatatttgaagacagtaagacagtaaactattttaggaagtcaacccccattgcactctgtggcagttattctggtaaaaataggcaaaagtgacctgaatctacaatgatgtcccaaagtaaccaagtaagagagattgtaaatgataaaccgagctttaaaggataaagtgttaataaagaaaggaagctgggcacatgtcaaaaagggagatcgaaatgttaggtaatcatttagaaaggacagaaaatatttaaagtggctcataggtaatgaatatttctgacttagatgtaaatccatctggaatctttacatcctttgccagctgaaacaagaaagtgaagggacaatgatatttcatggtcagtttattttgtaagagacagaagaaattatatctatacattaccttgtagcagcagtacctggaagccccagcccgtcacagaagtgtggaggggggctcctgactagacaatttccctagcccttgtgatttgaagcatgaaagttctggcaggttatgagcagcactagggataaagtatggttttattttggtgtaatttaggtttttcaacaaagcccttgtctaaaataaaaggcattattggaaatatttgaaaactagaaaatgatggataaaagggctgataagaaaatttctggctgtcagtagaagtgagataagatcctcagaggaaacagtaagaagggataatcattaagatagtaaaacaggcaaagcagaatcacatgtgcacacacacatacacatgtaaacattggaatgcataagttttaatattttagcgctatcagtttctaaatgcattaattactaactgccctctcccaagattcatttagttcaaacagtatccgtaaactaggaataatgccacatgcattcaatgggaccttttaagtactcttcagtttgttccaagaaatgtgcctactgaaatcaaattaatttgtattcaatgtgtacttcaagactgctaattgtttcatctgaaagcctacaatgaatcattgttcaaccttgaaaaataaaattttgtaaatcaaaaaaaaaaaaaaaaaaa

SEQ ID NO: 31668 - DNA, 7915 bp, Homo Sapiens
acagcgctctcgacacggagcacccttctagcttcttcgtctccaggactgacgctcaggctcctctctcgccttagcccaacttgctttcccgcctcgcaaactccggtttccctccactcccaactcttttcactacacgtttcccctcctctatctcccacgccacgaaccccgatccccagactcctctctcccgccctcctccttcctctctcctcccttcaactcttcatccgcttccacctcagactctgcgcgcacccaattcagtcgcccgctcccgttcggctcctcgaagccatggcgggacctgggggctggagggacagggaggtcacggatctgggccacctgccggatccaactggaatattctcactagataaaaccattggccttggtacttatggcagaatctatttgggacttcatgagaagactggtgcatttacagctgttaaagtgatgaacgctcgtaagacccctttacctgaaataggaaggcgagtgagagtgaataaatatcaaaaatctgttgggtggagatacagtgatgaggaagaggatctcaggactgaactcaaccttctgaggaagtactctttccacaaaaacattgtgtccttctatggagcatttttcaagctgagtccccctggtcagcggcaccaactttggatggtgatggagttatgtgcagcaggttcggtcactgatgtagtgagaatgaccagtaatcagagtttaaaagaagattggattgcttatatctgccgagaaatccttcagggcttagctcaccttcacgcacaccgagtaattcaccgggacatcaaaggtcagaatgtgctgctgactcataatgctgaagtaaaactggttgattttggagtgagtgcccaggtgagcagaactaatggaagaaggaatagtttcattgggacaccatactggatggcacctgaggtgattgactgtgatgaggacccaagacgctcctatgattacagaagtgatgtgtggtctgtgggaattactgccattgaaatggctgaaggagcccctcctctgtgtaaccttcaacccttggaagctctcttcgttattttgcgggaatctgctcccacagtcaaatccagcggatggtcccgtaagttccacaatttcatggaaaagtgtacgataaaaaatttcctgtttcgtcctacttctgcaaacatgcttcaacacccatttgttcgggatataaaaaatgaacgacatgttgttgagtcattaacaaggcatcttactggaatcattaaaaaaagacagaaaaaaggaatacctttgatctttgaaagagaagaagctattaaggaacagtacaccgtgagaagattcagaggaccctcttgcactcacgagcttctgagattgccaaccagcagcagatgcagaccacttagagtcctgcatggggaaccctctcagccaaggtggctacctgatcgagaagagccacaggtccaggcacttcagcagctacagggagcagccagggtattcatgccactgcaggctctggacagtgcacctaagcctctaaaggggcaggctcaggcacctcaacgactacaaggggcagctcgggtgttcatgccactacaggctcaggtgaaggctaaagcctctaaacctctacaaatgcagattaaggcacctccacgactacggagggcagccagggtgctcatgccactacaggcacaggttagggcacctaggcttctgcaggtacagtcccaggtatccaaaaagcagcaggcccagacccagacatcagaaccacaagatttggaccaggtaccagaggaatttcagggtcaagatcaggtacccgaacaacaaaggcagggccaggcccctgaacaacagcagaggcacaaccaggtgcctgaacaagagctggagcagaaccaggcacctgaacagccagaggtacaggaacaggctgccgagcctgcacaggcagagactgaggcagaggaacctgagtcattacgagtaaatgcccaggtatttctgcccctgctatcacaagatcaccatgtgctgttgccactacatttggatactcaggtgctcattccagtagaggggcaaactgaaggatcacctcaggcacaggcttggacactagaacccccacaggcaattggctcagttcaagcactgatagagggactatcaagagacttgcttcgggcaccaaactcaaataactcaaagccacttggtccgttgcaaaccctgatggaaaatctgtcatcaaataggttttactcacaaccagaacaggcacgggagaaaaaatcaaaagtttctactctgaggcaagcactggcaaaaagactatcaccaaagaggttcagggcaaagtcatcatggagacctgaaaagcttgaactctcggatttagaagcccgcaggcaaaggcgccaacgcagatgggaagatatctttaatcagcatgaggaagaattgagacaagttgataaagacaaagaagatgaatcatcagacaatgatgaagtatttcattcgattcaggctgaagtccagatagagccattgaagccatacatttcaaatcctaaaaaaattgaggttcaagagagatctccttctgtgcctaacaaccaggatcatgcacatcatgtcaagttctcttcaagcgttcctcagcggtctcttttggaacaagctcagaagcccattgacatcagacaaaggagttcgcaaaatcgtcaaaattggctggcagcatcagaatcttcttctgaggaagaaagtcctgtgactggaaggaggtctcagtcatcaccaccttattctactattgatcagaagttgctggttgacatccatgttccagatggatttaaagtaggaaaaatatcaccccctgtatacttgacaaacgaatgggtaggctataatgcactctctgaaatcttccggaatgattggttaactccggcacctgtcattcagccacctgaagaggatggtgattatgttgaactctatgatgccagtgctgatactgatggtgatgatgatgatgagtctaatgatacttttgaagatacctatgatcatgccaatggcaatgatgacttggataaccaggttgatcaggctaatgatgtttgtaaagaccatgatgatgacaacaataagtttgttgatgatgtaaataataattattatgaggcgcctagttgtccaagggcaagctatggcagagatggaagctgcaagcaagatggttatgatggaagtcgtggaaaagaggaagcctacagaggctatggaagccatacagccaatagaagccatggaggaagtgcagccagtgaggacaatgcagccattggagatcaggaagaacatgcagccaatataggcagtgaaagaagaggcagtgagggtgatggaggtaagggagtcgttcgaaccagtgaagagagtggagcccttggactcaatggagaagaaaattgctcagagacagatggtccaggattgaagagacctgcgtctcaggactttgaatatctacaggaggagccaggtggtggaaatgaggcctcaaatgccattgactcaggtgctgcaccgtcagcacctgatcatgagagtgacaataaggacatatcagaatcatcaacacaatcagatttttctgccaatcactcatctccttccaaaggttctgggatgtctgctgatgctaactttgccagtgccatcttatacgctggattcgtagaagtacctgaggaatcacctaagcaaccctctgaagtcaatgttaacccactctatgtctctcctgcatgtaaaaaaccactaatccacatgtatgaaaaggagttcacttctgagatctgctgtggttctttgtggggagtcaatttgctgttgggaacccgatctaatctatatctgatggacagaagtggaaaggctgacattactaaacttataaggcgaagaccattccgccagattcaagtcttagagccactcaatttgctgattaccatctcaggtcataagaacagacttcgggtgtatcatctgacctggttgaggaacaagattttgaataatgatccagaaagtaaaagaaggcaagaagaaatgctgaagacagaggaagcctgcaaagctattgataagttaacaggctgtgaacacttcagtgtcctccaacatgaagaaacaacatatattgcaattgctttgaaatcatcaattcacctttatgcatgggcaccaaagtcctttgatgaaagcactgctattaaagtatttccaacacttgatcataagccagtgacagttgacctggctattggttctgaaaaaagactaaagattttcttcagctcagcagatggatatcacctcatcgatgcagaatctgaggttatgtctgatgtgaccctgccaaagaatcccctggaaatcattataccacagaatatcatcattttacctgattgcttgggaattggcatgatgctcaccttcaatgctgaagccctctctgtggaagcaaatgaacaactcttcaagaagatccttgaaatgtggaaagacataccatcttctatagcttttgaatgtacacagcgaaccacaggatggggccaaaaggccattgaagtgcgctctttgcaatccagggttctggaaagtgagctgaagcgcaggtcaattaagaagctgagattcctgtgcacccggggtgacaagctgttctttacctctaccctgcgcaatcaccacagccgggtttacttcatgacacttggaaaacttgaagagctccaaagcaattatgatgtctaaaagtttccagtgatttattaccacattataaacatcatgtataggcagtctgcatcttcagatttcagagattaaatgagtattcagttttatttttagtaaagattaaatccaaaactttacttttaatgtagcacagaatagttttaatgagaaatgcagctttatgtataaaattaactatagcaagctctaggtactccaatggtgtacaatgtcttttgcacaaactttgtaacttttgttactgtgaattcaaacattactctttggacagtttggacagtatctgtattcagattttacaacatggagtaaagaaacctgttatgaattagattacaagcagccttcaaaagaattggcactgggataagatttttcagaaaaagaaaaacatcggcaaactgtgtgtgatttttccaaagctatataaagaaccaaaggtttagtcaagaaacaaaaatcttaaagattattataacccagactaaggttgaacaacctgcatgcccagagaaaactatggcgacaaaggggaaaaggccaccactcgttttctcactgattcatgccaattaagcctacagttaaagaccagttttgttcttttcacccatttttaagctggttttctcctgataagaagaaaggaagaaagccccagacgcttggtttttctcagaacccccaaaagatgtgcaatagctgttgttacaaaccaccaaataatacagttgtgagcctgaatacaggactgaactcctatacacgtgtactgtagaatgagtattttttaataccttaaggtaggcgtcaaattctactccccaaagcagagatagattgatttatcaaaattattatctggccaacagtgtgactatcagacagcatcaaatatttgcccaatccaagattagactacacaaaagcttccttccagtattaaacaaaaagaattaaacataactatgaaaaaactttgctaatatctgtgtttttcagatttcattttttgtaaaatcagaaattaatctaaacatattcagtgataagttcatgtgtaacgacttaatgttaaaggttaaaaaaaagatttcacaaaatatacaactttcaccatatatataagcctgcaaaattagagtagtgaaagtcatgctagtccatcacccaaatatgttatagacgccatagacaggtgatgtttggtcacctatggtaactgctacctgatgaagagcataatttctgcatatccatcctcaataccatggtaaattctggggcaatagagaagcaacagaactgccacaaagtatacctcaatataattcctctagttctgcttctaaaatctgaggacagtgctagtgggaaaataattttcaaactacctggttaaccaaaatacaaaagcagctgactatgtgtgatttcataatagcacatttcttgacacttagtgctagaaatgaagatttggattttcctaacaacttacatcaagaatgtagtgtagctcattattgagaatttaggaaagcctgaatccattaattaaggaaataaatgtgactcacatttcttttactgtgacacaataatgtgatcctaaaactggcttatccttgagtgtttacaactcaaacaactttttgaatgcagtagttttttttttttaaaaacaaacttttatgtcaaattttttttcttagaagtagtcttcattattataaatttgtacaccaaaaggccatggggaactttgtgcaagtacctcatcgctgagcaaatggagcttgctatgttttaatttcagaaaatttcctcatatacgtagtgtgtagaatcaagtcttttaataattcattttttcttcataatatttactcaaagttaagcttaaaaataagttttatcttaaaatcatatttgaagacagtaagacagtaaactattttaggaagtcaacccccattgcactctgtggcagttattctggtaaaaataggcaaaagtgacctgaatctacaatgatgtcccaaagtaaccaagtaagagagattgtaaatgataaaccgagctttaaaggataaagtgttaataaagaaaggaagctgggcacatgtcaaaaagggagatcgaaatgttaggtaatcatttagaaaggacagaaaatatttaaagtggctcataggtaatgaatatttctgacttagatgtaaatccatctggaatctttacatcctttgccagctgaaacaagaaagtgaagggacaatgatatttcatggtcagtttattttgtaagagacagaagaaattatatctatacattaccttgtagcagcagtacctggaagccccagcccgtcacagaagtgtggaggggggctcctgactagacaatttccctagcccttgtgatttgaagcatgaaagttctggcaggttatgagcagcactagggataaagtatggttttattttggtgtaatttaggtttttcaacaaagcccttgtctaaaataaaaggcattattggaaatatttgaaaactagaaaatgatggataaaagggctgataagaaaatttctgactgtcagtagaagtgagataagatcctcagaggaaacagtaagaagggataatcattaagatagtaaaacaggcaaagcagaatcacatgtgcacacacacatacacatgtaaacattggaatgcataagttttaatattttagcgctatcagtttctaaatgcattaattactaactgccctctcccaagattcatttagttcaaacagtatccgtaaactaggaataatgccacatgcattcaatgggatcttttaagtactcttcagtttgttccaagaaatgtgcctactgaaatcaaattaatttgtattcaatgtgtacttcaagactgctaattgtttcatctgaaagcctacaatgaatcattgttcaaccttgaaaaataaaattttgtaaa

SEQ ID NO: 31669 - DNA, 2475 bp, Homo Sapiens
gaggatttgccacagcagcggatagagcaggagagcaccaccggagcccttgagacatccttgagaagagccacagcataagagactgccctgcttggtgttttgcaggatgatggtggcccttcgaggagcttctgcattgctggttctgttccttgcagcttttctgcccccgccgcagtgtacccaggacccagccatggtgcattacatctaccagcgctttcgagtcttggagcaagggctggaaaaatgtacccaagcaacgagggcatacattcaagaattccaagagttctcaaaaaatatatctgtcatgctgggaagatgtcagacctacacaagtgagtacaagagtgcagtgggtaacttggcactgagagttgaacgtgcccaacgggagattgactacatacaataccttcgagaggctgacgagtgcatcgtatcagaggacaagacactggcagaaatgttgctccaagaagctgaagaagagaaaaagatccggactctgctgaatgcaagctgtgacaacatgctgatgggcataaagtctttgaaaatagtgaagaagatgatggacacacatggctcttggatgaaagatgctgtctataactctccaaaggtgtacttattaattggatccagaaacaacactgtttgggaatttgcaaacatacgggcattcatggaggataacaccaagccagctccccggaagcaaatcctaacactttcctggcagggaacaggccaagtgatctacaaaggttttctattttttcataaccaagcaacttctaatgagataatcaaatataacctgcagaagaggactgtggaagatcgaatgctgctcccaggaggggtaggccgagcattggtttaccagcactccccctcaacttacattgacctggctgtggatgagcatgggctctgggccatccactctgggccaggcacccatagccatttggttctcacaaagattgagccgggcacactgggagtggagcattcatgggataccccatgcagaagccaggatgctgaagcctcattcctcttgtgtggggttctctatgtggtctacagtactgggggccagggccctcatcgcatcacctgcatctatgatccactgggcactatcagtgaggaggacttgcccaacttgttcttccccaagagaccaagaagtcactccatgatccattacaaccccagagataagcagctctatgcctggaatgaaggaaaccagatcatttacaaactccagacaaagagaaagctgcctctgaagtaatgcattacagctgtgagaaagagcactgtggctttggcagctgttctacaggacagtgaggctatagccccttcacaatatagtatccctctaatcacacacaggaagagtgtgtagaagtggaaatacgtatgcctcctttcccaaatgtcactgccttaggtatcttccaagagcttagatgagagcatatcatcaggaaagtttcaacaatgtccattactcccccaaacctcctggctctcaaggatgaccacattctgatacagcctacttcaagccttttgttttactgctccccagcatttactgtaactctgccatcttccctcccacaattagagttgtatgccagcccctaatattcaccactggcttttctctcccctggcctttgctgaagctcttccctctttttcaaatgtctattgatattctcccattttcactgcccaactaaaatactattaatatttctttcttttcttttcttttttttgagacaaggtctcactatgttgcccaggctggtctcaaactccagagctcaagagatcctcctgcctcagcctcctaagtacctgggattacaggcatgtgccaccacacctggcttaaaatactatttcttattgaggtttaacctctatttcccctagccctgtccttccactaagcttggtagatgtaataataaagtgaaaatattaacatttgaatatcgctttccaggtgtggagtgtttgcacatcattgaattctcgtttcacctttgtgaaacatgcacaagtctttacagctgtcattctagagtttaggtgagtaacacaattacaaagtgaaagatacagctagaaaatactacaaatcccatagtttttccattgcccaaggaagcatcaaatacgtatgtttgttcacctactcttatagtcaatgcgttcatcgtttcagcctaaaaataatagtctgtccctttagccagttttcatgtctgcacaagacctttcaataggcctttcaaatgataattcctccagaaaaccagtctaagggtgaggaccccaactctagcctcctcttgtcttgctgtcctctgtttctctctttctgctttaaattcaataaaagtgacactgagcaaaaaaaaaaaaaaa

SEQ ID NO: 31670 - DNA, 1736 bp, Homo Sapiens
gtgtgcgggggccgccattttccgggagtgggaggtgcactttacttcctgactcctttcctttttccagtggttatcgcggcgcccaccggcctctgatctctgagtcttctccaacccacagacgttttttgttgctctggttccaggaccttctccacaactaggccattttccctgccaggtgtcctttttgacctcttgacctctgactcaaagggcctgctccccgtcatgtcttcggcctggagaagagccagctcctgaaggaggcctttgataaggccggcccggtccccaagggcagagaagatgtgaagaggcttctgaaactacacaaggaccggttccgaggtgacctgcggtggatcctcttctgtgcagacctgccgtccctcatccaagaaggccctcaatgcgggctggtggccttgtggatggcaggtactctcctgtcgccccccagtggcgtccccctggagagactcatacgggtggccacggaaagaggctacacggcccagggagagatgttctcagtggccgatatgggcaggctggcccaggaggtgctgggctgccaggccaagctgctctctggtggcctgggcggtcccaacagagacctcgtcctgcagcacctggtcactggacatcccctgctcatcccctacgacgaggacttcaaccatgagccgtgtcagaggaagggccacaaggcacactgggcggggtcctgctgggtgttcgggctgtgcccagtctcggctacactgaggaccctgagctgccgggcctgttccacccagtgctgggcacgccctgccaaccaccatccctgccagaggagggctccccgggagctgtctacctgctgtccaagcagggcaagagttggcactatcagctgtgggactacgaccaggtccgggagagcaacctgcagctgacggacttctcgccctcacgggccactgacggccgggtttttaaagcccatctgggagcagttacctgtgccagcccctctacctgtgttagcagatctggcaaccctgtaaggggggtgctagatggacccgatttgacagatggcaagactgaggcctggagaagtggaatcactggcctgaggtcacatgactagcacatggcaagatggagtctcgttctgtcgtccaggctggagtgcggtggcgtgatctcagctcactccagcctccacttcccaggttcaagtgattctcctgcctcagccccccaagtaactgggattacaggcatgcaccaccatgcctggctaattttttgtatttttagtagagacggggctttgccatgttggccaggctggtctcgaactcctgaccttgagtaatccacccgcctcggcctcccaaagtgctgggattacaggtgtgagccactgagcccggccacagtgcagtatttctaaccagtgatcagggtaaagaggatgcgtgtccaccatcccagccctgatcagcctgtctgtgcatcccccatcccagccagggcttggagcagccttgctcaccactgtgtcccctgcattgtaacacatccaggcacaagaatagccgcccagtgactgccaagtgagtgaaccagcctgcttggagcctgcctctttcccaaactgctcattatcctgttaccccacccagcccacgtgtccaaatacactccagatgcaaaataaaaagctctacgac

SEQ ID NO: 31671 - DNA, 3298 bp, Homo Sapiens
ggaggtgcactttacttcctgactcctttcctttttccagtggttatcgcggcgcccaccggcctctgatctctgagtcttctccaacccacagacgttttttgttgctctggttccaggaccttctccacaactaggccattttccctgccaggtgtcctttttgacctcttgacctctgactcaaaggtcagctcaaaggttccgaactcgggcctgggatgtgagggggtactgaacctaagttctccgaatctttagccctgggtccctaagtcgcatccttaaggcacctcactctagatctgagccttcatatcccaaactcactcatgagtttccacatccagccccaaagaatgagttaactcctactaactctccacctaagactcccgaggtaacccaaccggtaccacagatccggttccggatttaaggaccccaccctgttaaccgtcaggtgccttatgacttgagtcagcctcgcaattcctgctcccgtggtttcaaatattagccctggtcctttcacacccactgctcagtccccagattctggaactcagctcttaaacctttaaaatctccatccctgagaccgttctccgttggaggatccttccctccccgctttctgaacctctcaacacctcctgtagaccccaaaatgacttctccatgctctcctcccctaaaaccaccaatttctcctccaaaaacccctgtaccccaagccagcagcattccatctcctcctctacccccaagtcccctggacttttcagctttaccatcccctccctggagtcagcagacccctgttcccccaccgctcccactgcctcctccacccgctgccacagggcctgctccccgtcatgtcttcggcctggagaagagccagctcctgaaggaggcctttgataaggccggcccggtccccaagggcagagaagatgtgaagaggcttctgaaactacacaaggaccggttccgaggtgacctgcggtggatcctcttctgtgcagacctgccgtccctcatccaagaaggccctcaatgcgggctggtggccttgtggatggcaggtactctcctgtcgccccccagtggcgtccccctggagagactcatacgggtggccacggaaagaggctacacggcccagggagagatgttctcagtggccgatatgggcaggctggcccaggaggtgctgggctgccaggccaagctgctctctggtggcctgggcggtcccaacagagacctcgtcctgcagcacctggtcactggacatcccctgctcatcccctacgacgaggacttcaaccatgagccgtgtcagaggaagggccacaaggcacactgggcggtgagtgcaggggtcctgctgggtgttcgggctgtgcccagtctcggctacactgaggaccctgagctgccgggcctgttccacccagtgctgggcacgccctgccaaccaccatccctgccagaggagggctccccgggagctgtctacctgctgtccaagcagggcaagagttggcactatcagctgtgggactacgaccaggtccgggagagcaacctgcagctgacggacttctcgccctcacgggccactgacggccgggtgtacgtggtgcccgtgggtggggtacgggctggcctctgtggccaggccctgctcctcacaccacaggactgcagccattagctgcggctgcggtctcaggctgcagcctagctcggtaaccatttgaagtgtgcctacacttctcccactgtgtgatggcgacaagattgaagctaggtctcaggggtctccagtcctccttcatcagggccaccccctgcagtattgagcaccagctggtccctctagggagagattgacaacagcccggaccctgcggcctgcctattccatctgaatgtcgcatcgtctgtttctcactaggggccgcctctgtcatctcactagacatttgaggaacctcctgcctgggccctctgcttctcacaggacagggacactgaactgcgtcagcctcagctcacccctccttagcccaaggtcttcctcatgcttgccacctactagtcatactggccttttagatccctgaagtgttgttcaaatccccggatcattgagtcccacccccagccctctgctgcggatcactccttaacttttccattggggctcaggtatcactacctcagggaagagtcctgcagccccagtcaagacacccctcccccacctcatgtcttcacagttttaaagcccatctgggagcagttacctgtgccagcccctctacctgtgttagcagatctggcaaccctgtaaggggggtgctagatggacccgatttgacagatggcaagactgaggcctggagaagtggaatcactggcctgaggtcacatgactagcacatggcaaggtcaggattcaagctaggtagtcagtatctcagccaggctgtctcctggctccctgaacattatggtgctgaccacaaactttcctgtccacttatacaaacttctagtgagtgtgtgtgattactagcttcatgaatacctgacccctccactctgaaggaggaacaggcctgtctggatcacttctctgtccctaactgagcccatctcatttagggaaactacagagcactgttgctttttttttttttagatggagtctcgttctgtcgtccaggctggagtgcggtggcgtgatctcagctcactccagcctccacttcccaggttcaagtgattctcctgcctcagccccccaagtaactgggattacaggcatgcaccaccatgcctggctaattttttgtatttttagtagagacggggctttgccatgttggccaggctggtctcgaactcctgaccttgagtaatccacccgcctcggcctcccaaagtgctgggattacaggtgtgagccactgagcccggccacagtgcagtatttctaaccagtgatcagggtaaagaggatgcgtgtccaccatcccagccctgatcagcctgtctgtgcatcccccatcccagccagggcttggagcagccttgctcaccactgtgtcccctgcattgtaacacatccaggcacaagaatagccgcccagtgactgccaagtgagtgaaccagcctgcttggagcctgcctctttcccaaactgctcattatcctgttaccccacccagcccacgtgtccaaatacactccagatgcaaaataaaaagctctacgaca

SEQ ID NO: 31672 - DNA, 4033 bp, Homo Sapiens
ggatagtcgccgtcaggcactgaggaggccgagagatgaggccggagcccaccaagttctgggaagttctttctgacacaagtaagataacatctctgccatgcccacaggtgctgagaacaagagaaatcaagtgaaggaaggaggcggagtttccaagacttgggtgtcatcatttctggggacatccttgattggagattgaagtttttgaaccgaaatttagagctgattcagaagagacaaatacagaacgtccaagttagcagtcgtttcccaaatttaggagacaatgatgcaggcccaggaatccctaacactggaggatgtggctgtggacttcacctgggaggagtggcagttcctgagccctgctcagaaggacctgtaccgggacgtgatgttggagaactacagcaacctggtggcagtggggtatcaagccagcaaaccagatgcactctccaaattggaacgaggagaagaaacttgcacaacagaagatgaaatctactctcgaatctgttctgaaatcaggaaaattgatgatcctctgcagcatcacttgcaaaatcaaagtattcagaagagtgtgaaacagtgccatgaacagaatatgtttggaaatattgttaatcagaacaaaggtcatttcctgctgaagcaagattgtgatacgtttgacttacatgaaaaacctttaaaatcaaatttaagttttgaaaaccagaaaaggagctctggcctaaagaactctgctgagtttaatagagatgggaaatccctttttcatgctaaccataaacaattttatactgaaatgaagtttcctgcaattgcaaaacctattaataagtcccagttcattaagcaacagagaactcacaacatagagaatgcccatgtatgcagtgaatgtgggaaagccttcctcaagttgtctcagtttattgatcatcagagagttcacactggagaaaaacctcatgtatgcagtatgtgtgggaaagctttctccagaaaatccagactaatggaccatcagagaactcatacagaactgaaacattatgaatgcactgaatgtgacaaaaccttcctcaagaaatcacagctcaatatacatcagaaaactcatatgggagggaaaccttacacatgtagccaatgtgggaaagccttcatcaagaagtgtcggctcatttatcatcaacgaactcatacaggagagaaaccccatggatgcagtgtatgtgggaaggccttctctacaaagttcagtctcactacacatcagaaaactcatacaggagaaaaaccttatatatgtagtgaatgtggaaaaggcttcattgagaagaggcgtcttactgcacatcatcgaactcatactggtgagaaaccctttatatgcaataaatgtgggaaaggcttcaccttgaagaacagtcttatcacacatcagcaaactcatacaggagagaaattatatacatgtagtgaatgtggaaaaggcttttcaatgaagcactgtctcatggtacatcaacgaactcatactggagagaaaccttataaatgcaatgagtgtggaaagggcttcgctttgaagagcccactcatcagacatcagcgaacacatactggagagaaaccctatgtatgcaccgaatgtcgaaaaggtttcaccatgaagagtgacctcattgtacatcagcgaactcatactgcagagaagccatatatatgcaatgattgtggaaaaggcttcactgtgaagagccgccttattgtgcatcagcgaactcatactggagaaaaaccctatgtatgtggtgagtgtggaaaaggctttccagcaaagatccggctaatgggacatcaacgaactcatacaggagagaaaccttatatttgcaatgagtgtggaaaaggcttcactgagaagagtcatctcaatgtacatcggcgcactcatacaggagagaaaccctatgtatgcagtgaatgtggcaaagacttaactgggaaaagcatgctcattgcacatcagcgaactcatactggggagaaaccttatatatgcaatgaatgtggaaagggcttcaccatgaagagtactctcagtatacatcagcaaactcatactggagagaagccatacaaatgcaatgaatgtgataaaaccttcaggaagaagacatgcctcatacaacatcagcgatttcacacaggaaagacttcctttgcatgtactgaatgtggaaaattctctttgcgcaaaaatgatcttattacacatcagagaattcacacaggagagaaaccgtacaaatgcagtgactgcgggaaagccttcactacaaaatcagggctcaatgttcatcaaagaaaacatacaggagagaggccctatggatgtagtgattgtgggaaagcttttgcgcacttgtctatccttgttaaacacaggagaattcacaggtagtcattttgggaaagcctcttgccagatgtaggcccttaagatatctgcaaagaagagtaatttcatgaatgcagactacatggttgtttatttagtgatcagttacttcatgttttgtgtcagagaaaacatgtacaaaacatttgagaaaatattttaggacattatgtctaaaaattgtatactgagaaaaatcctatgaatgtggcagactataaaagcctttggtgggaagataaaccccctcagaagtgatcatagatcatgaataaactactaattcgtggaaatgtaataattataggaacgtctttgcccaaaaataaaacttcaacagattgagagagttcacactggagaaatactttcctctggcaaacccctgtggcagggttttcagtaaaatgttttgcctcatcgtgtgctaggaaataatgcagaaaaaacttatgaaaacattcaatgtagaagacttttaggaaaatatcagagaatttaatgaaggaaagaagccttggcaaaatgatggatgagagctttctgtcacaattctaaccttaacagataatatgcctcatgtgcatttgggaacaggatagcttgagccatattcctagttgccttgtcactgattttatacattttaaattgtgacttcctctaatcacgaactaaaatttaatattgtatataataccggagtattttatgcctgcctcattttattatatgattagctcctgcatttctttggttctaagtttgtgttatttcagaataactaaagtacttcagaatgaaactggatacagtatattcagttcataagtgtaattgaccatacttgaatatgtttaagtttataagtaacatcaggtgttatgaaattaatataaataagatgtttttgtaagtttttattttgaaataagtttagattcacaaaatcttaccaaaatattccagagttcttgcccttaacccagcttcttccaaagataacaacttacataagcatagttcattaccaaatacaggaaagtgaaattgttacaatactgttaactacagaatttatttggaaatcaccagttttaacatgcatgcatttttgtttgttttttatatgtagctttaagaaatcttaacacatatattgattcatgtcaccaccaccgtaatcgagattcagaatgttgcatcaatgcaaactccctcatgctccttgtttatagtcacaacctctcctcagccctaacccttggcaatcagaaatcttttcatctttagttttgtcattagtagcatgttataaaaatggaatcatacagcatgtacccttttggtattggctatttcaactaaagcagattaacctgaaatccatccaagttgttctgcatatcattgttctgtttttattggccactaataatctatgatacgaatataccactatttgtttattcacccactgaaggacattagttttgttcccggtttttcttactgttacaaataaaaatcctatgaacatttgtacac

SEQ ID NO: 31673 - DNA, 909 bp, Homo Sapiens
ggcattttccggtgcctgcaccaaatcaggaagctcctagtctgtgccccaagatcacgcctcatttggaggtcacacgaggcctggctggtgggtcctgccagggcactggatctggagagtggaggaagcactgggtgccggggtttgggctcggggccatgtacgcctcctcctaccccccacccccgcagctgtcccctagaagccacctttgcccacccccaccccaccccaccccaccccagctcaataatctgcttcttctagaaggaaggaaatcgtctcttccctctgtagcccccactgggagtgcctcagctgctgaggacagtgatctgctgactcagccttggtactcggggaactgtgaccgctatgctgttgagagtgccctgctccacttacaaaaggatggggcctataccgtgcgccccagctcagggcctcatggctcccagcccttcaccctggcagtgcttctccgaggccgggtcttcaacattcccatccggcggctggatggcggacgccactatgccctgggccgggagggcaggaaccgtgaggagctcttctcctccgtggcggccatggtccagcacttcatgtggcaccctctgccccttgtggacagacacagcggcagccgggaactcacctgcctgctcttccccaccaagccttgaggccacagcgaagaatgcaggtgtctgcccagttcactaggtcctggatgaaggaaccgtggtggcctagaccagtcaggggacagcacaggcactgctggaacagcaaaggatcctctcacatctacttgtgggcctagggcaccctgagagggactggcctaccttgcacaagttcacattcaataaacatttgttgattgaaaaaaaaaaaaaaaaa

SEQ ID NO: 31674 - DNA, 1335 bp, Homo Sapiens
atggagcccttgtccccaggccatttgtggcagatcctgggctccagggaggcaaagctcctctgcctctgccatggacaagctcagtgggagcaggccccggcccaggaggaggacgaggaggaaaataagtatgagctgcccccctgtgaggctctgcccctcagtctagcccctgcccaccttcctggcactgaggaggactccttgtacctggatcactctggccccctgggtccatcaaagccatcgccacccctgcctcagcccaccatggtgagaggcctctccagaagtccctccttccccacccgccccatcccaggctgccatttcccagtgccaggccctccaaagaaacctgatgaggacctctacttggaatgtgagccggatccagtcctggctttgactcagactctcagcttccaagtcctgatgccctcaggccctctgcccaggacatcagtggtgcccagggaacagcagatgctgcctctaaaggtgagtaaaggctggtccaaaggtagggaccctcttgggcattttccggtgcctgcaccaaatcaggaagctcctagtctgtgccccaagatcacgcctcatttggaggtcacacgaggcctggctggtgggtcctgccagggcactggatctggagagtggaggaagcactgggtgccggggtttgggctcggggccatgtacgcctcctcctaccccccacccccgcagctgtcccctagaagccacctttgcccacccccaccccaccccaccccaccccagctcaataatctgcttcttctagaaggaaggaaatcgtctcttccctctgtagcccccactgggagtgcctcagctgctgaggacagtgatctgctgactcagccttggtactcggggaactgtgaccgctatgctgttgagagtgccctgctccacttacaaaaggatggggcctataccgtgcgccccagctcagggcctcatggctcccagcccttcaccctggcagtgcttctccgaggccgggtcttcaacattcccatccggcggctggatggcggacgccactatgccctgggccgggagggcaggaaccgtgaggagctcttctcctccgtggcggccatggtccagcacttcatgtggcaccctctgccccttgtggacagacacagcggcagccgggaactcacctgcctgctcttccccaccaagccttgaggccacagcgaagaatgcaggtgtctgcccagttcactaggtcctggatgaaggaaccgtggtggcctagaccagtcaggggacagcacaggcactgctggaaca

SEQ ID NO: 31675 - DNA, 1897 bp, Homo Sapiens
gtgggcggccccatcgcctagcaaccgggtggcagcgtcccttgagcccaggccacacagctgcacccagccctgcccggctcctcccaggcctgcaggacccctggggccctgtccttattccccagcaccgggacagccaaagctctggtcacaatgaacatcgtcttctccagggacagccaggtgagggtgatggagaataccgtggccaacaccgagaagtactttgggcagttctgctcgctgctggccgcctacacgcgcaagacggcccggctgcgggacaaggcggaccagctggtcaagcagctcatcgactttgccaactccgagaaccccgagctgcgggccaccatgaggggcttcgctgaggacctggccaaagtgcaggattaccggcaggcccaggtcgagaggctggagaccaaggtggtcaaccccctgaagctctacggggcacagatcaagcagacacgggctgagatcaagaaattcaaacatgtccaaaatcatgagatcaaacaactggaaaaactggagaaactgaggcagaagtcaccctcggatcagcaaatgatctcccaggcagagaccagagtgcagagggccgctgtggactccagccgcaccaccctccagctggaggagactgtggatggcttccagaggcagaagctcaaggacctgcagaaatttttttgtgactttgtaactattgagatggttttccatgccaaagcggtggaggtgtattctagcgccttccagaccctggagaagtatgacctggagagggatctactggattttagagccaagatgcaaggagtttatgggcattatgacactcggctgcttgccaacaccagcccccctccatctgttcttcagtctctcgccagccagggaactctgcaggtccagctgagtagggcaaatgaagaccctgaacatcctcatgccaatcatggcaggtttagtctctgtgagtgggtagttaaggggcagccagcccactgtgtgtgtgggcagggtgggcatctcatgcttccaggacattctctctaacgacgtagggtaagtgcaatcccaagccgtttaaaataatcccagactgcctggaggctttgttcttattttctgattcttttttctttgtctttgttggattgtgttaattcaaagaccttgtcttcaagctctgaatttccttcttctacttgttcaattctgttgctgagactttccagagcattttgcatttctgtgagtgtatccaatgtttcctgaagttttgattgtttttctttatgctatctatttcttggtccgagcccactgctcctggcggtgtgaccttgggaaagtctcctagcctctctgtgccttagagtcctcgcctgcagagtggcttagaacagtaacctccgtgtagggctgtgctgagtatcagatgaacagatctatacgaagcacagaaaacccggcctgttgcgcaacaaacacttgagacttgttgctgccattatcattactgatgttgctgtcgttttattattattattatttagagtgctcagagcaccatatggagcccaggaaaagaaggggaggagagtgaggacaactccatggaggaggcccccgtggaggacctcagggcactggggcagggaccccataagagagaactgcccacaacagtcagaagaacttagctggccttggatcctcaggtgggctctgctgtgtgccctcaggcaagccacgtgtcctctgagcctcagtttcctcatctgtacaacagggccaatatcactcacttcacaggttgctctgggggatcgctgtgcctggcatatagtaggtgttcaataaatgccctgtgactctc

SEQ ID NO: 31676 - DNA, 2946 bp, Homo Sapiens
gttcgcggctgcaccgctcggaggctgggtgacccgcgtagaagtgaagtacttttttatttgcagacctgggccgatgccgctttaaaaaacgcgaggggctctatgcacctccctggcggtagttcctccgacctcagccgggtcgggtcgtgccgccccctcccaggagagacaaacaggtgtcccacgtggcagccgcgccccgggcgcccctcctgtgatcccgtagcgccccctggcccgagccgcgcccgggtctgtgagtagagccgcccgggcaccgagcgctggtcgccgctctccttccgttatatcaacatgccccctttcctgttgctggaagccgtctgtgttttcctgttttccagagtgcccccatctctccctctccaggaagtccatgtaagcaaagaaaccatcgggaagatttcagctgccagcaaaatgatgtggtgctcggctgcagtggacatcatgtttctgttagatgggtctaacagcgtcgggaaagggagctttgaaaggtccaagcactttgccatcacagtctgtgacggtctggacatcagccccgagagggtcagagtgggagcattccagttcagttccactcctcatctggaattccccttggattcattttcaacccaacaggaagtgaaggcaagaatcaagaggatggttttcaaaggagggcgcacggagacggaacttgctctgaaataccttctgcacagagggttgcctggaggcagaaatgcttctgtgccccagatcctcatcatcgtcactgatgggaagtcccagggggatgtggcactgccatccaagcagctgaaggaaaggggtgtcactgtgtttgctgtgggggtcaggtttcccaggtgggaggagctgcatgcactggccagcgagcctagagggcagcacgtgctgttggctgagcaggtggaggatgccaccaacggcctcttcagcaccctcagcagctcggccatctgctccagcgccacgccagactgcagggtcgaggctcacccctgtgagcacaggacgctggagatggtccgggagttcgctggcaatgccccatgctggagaggatcgcggcggacccttgcggtgctggctgcacactgtcccttctacagctggaagagagtgttcctaacccaccctgccacctgctacaggaccacctgcccaggcccctgtgactcgcagccctgccagaatggaggcacatgtgttccagaaggactggacggctaccagtgcctctgcccgctggcctttggaggggaggctaactgtgccctgaagctgagcctggaatgcagggtcgacctcctcttcctgctggacagctctgcgggcaccactctggacggcttcctgcgggccaaagtcttcgtgaagcggtttgtgcgggccgtgctgagcgaggactctcgggcccgagtgggtgtggccacatacagcagggagctgctggtggcggtgcctgtgggggagtaccaggatgtgcctgacctggtctggagcctcgatggcattcccttccgtggtggccccaccctgacgggcagtgccttgcggcaggcggcagagcgtggcttcgggagcgccaccaggacaggccaggaccggccacgtagagtggtggttttgctcactgagtcacactccgaggatgaggttgcgggcccagcgcgtcacgcaagggcgcgagagctgctcctgctgggtgtaggcagtgaggccgtgcgggcagagctggaggagatcacaggcagcccaaagcatgtgatggtctactcggatcctcaggatctgttcaaccaaatccctgagctgcaggggaagctgtgcagccggcagcggccagggtgccggacacaagccctggacctcgtcttcatgttggacacctctgcctcagtagggcccgagaattttgctcagatgcagagctttgtgagaagctgtgccctccagtttgaggtgaaccctgacgtgacacaggtcggcctggtggtgtatggcagccaggtgcagactgccttcgggctggacaccaaacccacccgggctgcgatgctgcgggccattagccaggccccctacctaggtggggtgggctcagccggcaccgccctgctgcacatctatgacaaagtgatgaccgtccagaggggtgcccggcctggtgtccccaaagctgtggtggtgctcacaggcgggagaggcgcagaggatgcagccgttcctgcccagaagctgaggaacaatggcatctctgtcttggtcgtgggcgtggggcctgtcctaagtgagggtctgcggaggcttgcaggtccccgggattccctgatccacgtggcagcttacgccgacctgcggtaccaccaggacgtgctcattgagtggctgtgtggaggtgagtgggggaatccacaccctcagggctgcccccatggcaggccctcagcctgagccttcacatacatcatgacgaggatggcagctcttcccagctactgagcacttgcttcccaagtgccaggttctgtgctaaaccccatgctcacataaaatcctacagtaggtataaccatcctatttgacatttaaggtacagaaagtttaactaacatagataactccccccaaacttgagaatttatgcattccctttaaacagaacacacttttagaatatccacaagcttcctaagggtctaaagatcccacattcacactgacttgggcagtgacagagcccagagcaaacagggccaggccagcccaaatccagtgacctcctcttcaccttcttaaaagagacaggagaatcacttgaacccgggaggtggaggttgtggtgagccaagatcgcgccattgtactccagcctgggcaacaggagcaagattctgcctc

SEQ ID NO: 31677 - DNA, 1919 bp, Homo Sapiens
gacagcgcgtagtcgcagagtcagggaggggacctcaccacctgtctcctccctgaggtcttagaacagatacaagaaattccaggcgaaggtcccacagagtttggatcacgatgaggccagtgagtcggagatgagaaagacctcaaactcctgcatcatggaaaatgggcaccagccggggacaggtccaggcgatggaccccctgagattgcccaaaacttctcagcaccagatccccccaggcctcgtcctgtgagcctctccttgcggctgccccaccagccagtcacggccatcacccgagtctctgacaggttctctggggagacctcagctgcggctctatcacccatgtctgctgccaccctggggggcctcaacccaagccccagcgaggtcatcacgccctggactcccagtcctagcgagaagaattcctctttcacgtggtctgtgccaagctctggctacggggcagtgacagcaagcaaacacagcaatagcccaccgctggtgacaccaccccagtcgcccgtgtccccgcagccgccagccataactcaggtccatcggcagggggagcgtcgcagggagctggtgaggtcgcagacgctgccccgcacctcggaggcgcaggcccggaaagcattgtttgagaagtgggagcaggaaacggcggccggcaaggggaaaggcgaggcccgggccaggctgaagcggtcgcagagcttcggcgtggccagcgccagcagcatcaagcagatcctgctcgagtggtgccgcagcaagacgctgggctaccagcacgtggacctgcagaacttctcctccagctggagcgacggcatggccttctgcgccctggtacactccttcttccccgatgcctttgactacaactccctgagccccacgcagaggcagaagaacttcgagctggctttcaccatggccgagaatctggccaactgtgagcgcctcatcgaagtggaggacatgatggtgatgggccgcaagccggaccccatgtgtgtcttcacctacgtccagtcgctgtacaaccacctgcgtcgcttcgagtaaagcccctgagcctggattgccaaagagcagccccaggaagaggccgggggtccgcttgcgattccccagccaggatgcccccaggagccttgccgtttggtgtgagcgcgctgtttgttctgtggcatgtgacggcactccccttcgagcccagctgtgttactgattaaaagtactgctgagctgtggtccgacagcactgatcacagccaagggcttggaggaaaaggaaaaattatgagagagagagagacattggtgctaagtaatgatcttcctaaagaaatgcttgtgtttatagcttccagaatgctaatctacaattttccctctggtgaattcgatacatcggctttacagggttacagtgattaccaagtgtttttttttatcaaaatacccagagttttttacttcctcacgcgattgtaggttcctctcctccctccctctgggccactgccaggaaacagagagaccgcttaatcagcagcttgacaaagaagacctcaagtcttgggaagaaacagtttaatcactcccaagtcctgggcaacagatgaccttcaagtcacctccgctctccggggagatgggaaggctctcctctcggtcccaaagtcctcctgttcttcccaggaggcctcacaagtgtttggctaagcacaggctctcgggaatttaacacttttggggaaggaataggccctttgtgctgagagagagtttttattcacatcttttttaggggatttgctgcagatatttataaaaagtaactccctctgtaccactgacccatttatacataaaaaagatgtgttgaattttg

SEQ ID NO: 31678 - DNA, 2519 bp, Homo Sapiens
gctgttctcctagcagcgcgggccggtcggaccgccaaggcagccggcgctggcgatgggaagcggcgtggccgccgacacaggcagtggcaaagtttcccagacgtacacatctggacgcgcggctgccggctacccgtgacccctctaggaagggttcagggatttttaatttggaaaaaaatccacctggtttcctttgtcaaggtctctccgggtggccagcggcaggagctgcaaacttgggcacggcggctacaccggcagcggaccgggctttggagaacctcgggactcaggtgctgaggtgcccagcggctccggacgtgctacggggtgcgagcgcgggggagttcggggcgcacgacaaggaagggcccccgggagctctatatggaggaaggagcccagaatggtgtgcaccaggaagaccaaaactttggtgtccacttgcgtgatcctgagcggcatgactaacatcatctgcctgctctacgtgggctgggtcaccaactacatcgccagcgtgtatgtgcgggggcaggagccggcgcccgacaagaagctggaggaagacaaaggggacactctgaagattattgagcggctggaccacctggagaatgtcatcaagcagcacattcaagaggctcctgccaagcctgaggaggcagaggccgagcccttcacagactcctctctgtttgcacactggggccaggagctcagccccgaaggccggcgcgtggccctgaagcaattccagtactacggctacaacgcctacctcagcgaccgcctgcccctgggccggcccctgcctgacctcagacccagtgggtgccgtaacctctcatttcctgacagcctgccagaggtgagcatcgtgttcatcttcgtcaatgaagcgctttcagtgctgctgcgctccatccactcggccatggaacgcacgcccccacatctgctcaaggagatcattctggtggatgacaacagcagtaacgaggaactgaaggagaagctgaccgaatatgtggacaaggtgaacagccagaagccaggcttcatcaaagtcgtgcgtcacagcaagcaggaaggcctcatccgctccagggtcagtggctggagggcggccactgcccctgtggtggcactctttgatgcccacgtggagttcaatgtgggctgggctgaacctgtactcacccgcatcaaggagaaccggaagcggatcatctcgccatcctttgataacatcaaatatgacaactttgagatagaagagtacccgctggctgcccagggctttgactgggagctgtggtgccgctacctaaatccccccaaggcctggtggaagctggagaactccacagcgccaatcaggagccctgccctcattggctgcttcattgtggaccggcagtacttccaggagatcggcctgctggacgaaggcatggaagtctacgggggcgagaatgtggagcttgggatcagggtgtggcagtgtggcgggagtgtggaggtcctgccctgctcacggattgcccacattgagcgagcccacaagccctacacagaggacctcaccgcccatgtccgcaggaacgctctcagggtggctgaagtctggatggatgaatttaaaagccacgtctacatggcatggaacataccgcaggaggactcaggaattgacattggggacatcactgcaaggaaggctctcaggaaacagctgcagtgcaagaccttccggtggtacctggtcagcgtgtacccagagatgaggatgtactccgacatcattgcctatggagtgctgcagaattctctgaagactgatttgtgtcttgaccaggggccagatacagagaatgtccccatcatgtacatctgccatgggatgacgcctcagaacgtgtactacacgagcagtcagcagatccatgtgggcattctgagccccaccgtggatgatgatgacaaccgatgcctggtggacgtcaacagccggccccggctcaccgaatgcagctacgccaaagccaagaggatgaagcttcactggcagttctctcagggaggacccatccagaaccgcaagtctaagcgctgtctggagctgcaggagaatagcgacctggagttcggcttccagctggtgttgcagaagtgctcgggccagcactggagcatcaccaacgtcctgaggagcctcgcgtcctgacccaccggggccacttccggctgcctctttgctactgtgtagcacctgctgcaacgttgcctgctgtccacgtggggttgtttggagtctggggaaccaggttagtgggcccccaagaagagctttttatttcctattcaattttcatggagtttatagaaagatgctgattggtaggtgatggtatgatatcaaactattttgcagttgtaaataggggacagatggaaaatatttataactgacaataaaatattattaagaaaagaaaaaaaaaaaaaaa

SEQ ID NO: 31679 - DNA, 1766 bp, Homo Sapiens
gtgaggtgctgcgggaggccccgggcaccatggcccaggccctgggggaggacctggtgcagcctcccgagctgcaggatgactccagctccttggggtccgactcagagctcagcgggcctggcccatatcgccaggccgaccgctatggattcattgggggcagctcagcagagccagggccgggccacccacctgcagacctcatccgccaacgggagatgaagtgggtggagatgacctcgcactgggagaaaaccatgtcccggcggtacaagaaggtaaagatgcagtgccggaaaggcatcccgtctgccctgcgcgcccgatgctggcccctgttgtgtggggcccatgtgtgccagaagaacagccctggcacctatcaggagctggcagaggcccctggagacccacagtggatggagaccattggcagggacctgcaccgtcaattccctctgcacgagatgtttgtgtcgcctcagggccacgggcagcaggggctcctgcaggtgctcaaggcctacaccctgtatcgaccggagcagggctactgccaggcccaggggcccgtggctgctgtgctgctcatgcacctgcccccagaggaggccttctggtgcctggtgcagatctgtgaggtctacctccctgggtactacgggccccacatggaggctgtgcggctggacgccgaggtgttcatggccctgctgcggcggctgcttccgcacgtgcacaagcacctgcagcaggtgggcgtcggacccctgctgtacctgcccgagtggttcctgtgcctcttcgcccgctccctgcccttccccacagtgctgcgtgtctgggatgccttcctcagtgagggtgccagagtactgttccgtgtggggctgacactggtgcgcctggcgctgggcactgcagagcagcgaggggcctgccctggcctcctggagacactgggagcccttcgagccatcccccccgcgcagctgcaggaggaggccttcatgtcacaggtgcacagcgtggtgctgtcagagcgggacctgcagcgggagatcaaggcccagctggcccagctgcccgattccgcgccgggacccccgccccggccacaggtccgcctcgccggggcccaagccatctttgaggcccagcagctggcaggagtgcgacgaggcgccaagcctgaggtgcctcggattgtggtgcagcccccggaggagcccagaccaccgcggcggaaaccccagacccgcggcaagactttccatgggctcctgactcgggcccggggcccccccatcgaggggccccccaggccccaacgaggctccacctccttcctggacacccgcttctgagaggaccatggacttagtgtcccccagtctcaattgcctgatggctgatgccagcccggcaaataggcaccgcactttactcttgggactcggggacttggcttccttcctggcaaggaccaggcagtggggaaggaggaggtcctccgtggtacatactgggtcaggcactagcatggaggagggtcacagagtggggcacgtgaggacccatggaaccgtcctggtgcccaggccctcacaagtaccaaagccagcaccaaaggagtcagggaaggggttggctgagtcaagggaccccagagggcaccaggaataaaatcttcttgaacagaaaaaaaaaaaaaaaaaaaaaaaaaaaaaaaaaaaaaaaaaaaaaaaaaaaaaaaaaaaaaa

SEQ ID NO: 31680 - DNA, 1766 bp, Homo Sapiens; identical to SEQ ID NO: 31679

SEQ ID NO: 31681 - DNA, 1704 bp, Homo Sapiens
gtgaggtgctgcgggaggccccgggcaccatggcccaggccctgggggaggacctggtgcagcctcccgagctgcaggatgactccagctccttggggtccgactcagagctcagcgggcctggcccatatcgccaggccgaccgctatggattcattgggggcagctcagcagagccagggccgggccacccacctgcagacctcatccgccaacgggagatgaagtgggtggagatgacctcgcactgggagaaaaccatgtcccggcggtacaagaaggtaaagatgcagtgccggaaaggcatcccgtctgccctgcgcgcccgatgctggcccctgttgtgtggggcccatgtgtgccagaagaacagccctggcacctatcaggagctggcagaggcccctggagacccacagtggatggagaccattggcagggacctgcaccgtcaattccctctgcacgagatgtttgtgtcgcctcagggccacgggcagcaggggctcctgcaggtgctcaaggcctacaccctgtatcgaccggagcagggctactgccaggcccaggggcccgtggctgctgtgctgctcatgcacctgcccccagaggaggccttctggtgcctggtgcagatctgtgaggtctacctccctgggtactacgggccccacatggaggctgtgcggctggacgccgaggtgttcatggccctgctgcggcggctgcttccgcacgtgcacaagcacctgcagcaggtgggcgtcggacccctgctgtacctgcccgagtggttcctgtgcctcttcgcccgctccctgcccttccccacagtgctgcgtgtctgggatgccttcctcagtgagggtgccagagtactgttccgtgtggggctgacactggtgcgcctggcgctgggcactgcagagcagcgaggggcctgccctggcctcctggagacactgggagcccttcgagccatcccccccgcgcagctgcaggaggaggccttcatgtcacaggtgcacagcgtggtgctgtcagagcgggacctgcagcgggagatcaaggcccagctggcccagctgcccgattccgcgccgggacccccgccccggccacaggtccgcctcgccggggcccaagccatctttgaggcccagcagctggcaggagtgcgacgaggcgccaagcctgaggtgcctcggattgtggtgcagcccccggaggagcccagaccaccgcggcggaaaccccagacccgcggcaagactttccatgggctcctgactcgggcccggggcccccccatcgaggggccccccaggccccaacgaggctccacctccttcctggacacccgcttctgagaggaccatggacttagtgtcccccagtctcaattgcctgatggctgatgccggcccggcaaataggcaccgcactttactcttgggactcggggacttggcttccttcctggcaaggaccaggcagtggggaaggaggaggtcctccgtggtacatactgggtcaggcactagcatggaggagggtcacagagtggggcacgtgaggacccatggaaccgtcctggtgcccaggccctcacaagtaccaaagccagcaccaaaggagtcagggaaggggttggctgagtcaagggaccccagagggcaccaggaataaaatcttcttgaacag

SEQ ID NO: 31682 - DNA, 3082 bp, Homo Sapiens
agcagcagcccgggcggtgggcagccaggagcccccggcccggcccggcccggcccgccgagggccccagcgcaggagccgcgcccggacccaggcgatgccctcctagctagccgtcacgggatggagggcttcatggactcagggacacagacggacgccgtggtggtgctgtccttggctcaggccgccgtgcttggcctggtctccgaaaatgagctctttggagctaccataagcgccgaggccttctacccggacctggggcccgagctttcaggggcagccatgggagagcccgagccaccaggccccgacgtctaccagctggcctgcaacgggagggccttggaggagccggcggaggaggaggtgctggaggtggaggcagcctgtgagaagcacacccggcggaagacgcggccacctgtgcggttggtgcccaaggtcaagttcgagaaggtggaggaggaggaacaggaggtctatgaggtttctgtgccaggtgacgacaaggacgcagggccagcagaagcccccgccgaggcggccagtggcggctgcgacgccctggtgcagagcagcgccgtcaagatgatcgacctcagcgccttcagccgcaagccccggacgctccggcatctgccccgaaccccgaggccggagctgaacgtggccccatatgaccctcacttcccggccccggcccgggatggcttccccgagcccagcatggcgctgcctgggccagaggccttgcccacagagtgtgggttcgagccaccccacctggcccccctgagtgaccccgaggcccccagcatggagtccccggagcctgtcaagccggaacagggcttcgtgtggcaggaggccagtgagttcgaggctgacacggcgggttcgaccgtggaacgccacaagaaggcccagctggatcggctggacatcaacgtgcagattgacgactcctatctggtggaggcgggcgaccgccagaagcgctggcagtgccgcatgtgcgagaagtcctacacgtccaagtacaacctggtgacgcacatcctgggccacaacggcatcaagccacactcgtgcccacactgcagcaagctcttcaagcagcccagccacctgcagacgcacctgctgacgcaccagggcacccggccccacaagtgccaggtatgccacaaggccttcacgcagaccagccacctcaagcgccacatgctgctgcactcggaggtcaagccctacagctgccacttctgcggccgcggcttcgcctaccccagcgagctcaaggcccacgaagtgaagcatgagagtggccgctgccatgtctgcgtcgagtgcggcctggacttctccaccctgacccagctcaagcgccacctggcctcccaccagggccccaccctctaccagtgcctcgagtgtgacaagtccttccactaccgcagccagttgcagaaccacatgctcaagcaccagaacgtgcgacccttcgtgtgcactgaatgcggcatggagttcagccagattcaccacctcaagcagcactccctcacccacaagggcgtgaaggagttcaagtgcgaggtgtgtggccgggagttcaccctacaggcgaacatgaagcggcacatgctgatccacaccagcgtccggccctaccagtgccacatctgcttcaagacctttgtacagaagcagactctcaagacccacatgattgtacactcgcccgtgaagccattcaaatgcaaggtgtgcgggaagtccttcaaccgcatgtacaacctgctgggccacatgcacctgcacgccggcagcaagcccttcaagtgcccctactgctccagcaagtttaatctcaagggcaacctgagccggcacatgaaggtcaagcatggcgtcatagacatcggcctggacagccaagaccccatgatggagctgacaggcactgacccttcagagctcgacggccagcaggagatggaggacttcgaggagaacgcctacagctatgcgagcgtggacagcagcgccgaggccagtgtcctcactgaacaggccatgaaagagatggcctactacaatgtgctatagcgcaagctgggccacccctaacgggggccgggggcgagggcatgggggtgagacccatgggctgcaggctgcacctcctgcagccgagaaacaagctactgccccactgttctgagccctccctccccgagtcatttgcaccactagggacctttagaccaaatggagactgtactactggccccggctgtgagccagcacaggcccaggcatcccagcaagggaaggagagcacgcgaggcccagatctgggtctccctggcctgcttccgtggggagtgggagaagtggggccactggggacaggtcacaagggcaccggccctcggggtctctccaggcccagcagagctcttcaggggtcctgacactggaagaagagaccacttgagccatgtctttttcacggccaactcctgcctctaaggatgtctgagctcccctctggccagtactgcccacctctaccttgtccaggcccccttccccgccctgtcgacggaccgccaggcagggcactctgccttctacctcccggggtctcccatgcgctcctcaagccaggtgtgcacgtggccctggccctggcctgcaggacagctggggggcacccagcccccagaagacccctgtcctacatccctttctggaagtgagtgtccctacagtggattgcaacacatgtcgtccacttcgaccctagctggagtgcctcaccagggggccccactaggaacaaagccaggacaggccccgcgtcaggcacacactaacaaaaccagaagcatggggcagggcagggcggagtgagggcatcacaggggaccaagaagggctgtccttgggggaggcccaggaccacctgtcggggagggggaccgcagtcatttctcattcctcagtgtccaccttgcgacggggatagccacgagtcagcagcttcccggaaagagcaacgtatttt

SEQ ID NO: 31683 - DNA, 4378 bp, Homo Sapiens
ggggcggtcggaacatggcggaccagatcccgctttacccggtgcgtagcgcagcggcggccgcagccaaccgcaaacgcgcggcctactacagcgccgcggggcccaggccgggagccgaccggcacagcaggtaccagctggaggatgagtctgcgcatttggatgaaatgccactaatgatgtctgaagaaggctttgagaatgaggaaagtgattaccacaccttaccacgagccaggataatgcaaaggaaaagaggactggagtggtttgtctgtgatggctggaagttcctctgtaccagttgctgtggttggctgataaatatttgtcgaagaaagaaagagctgaaagctcgcacagtatggcttggatgtcctgaaaagtgtgaagaaaaacatcccaggaattctataaaaaatcaaaaatacaatgtgtttacctttatacctggggttttgtatgaacaattcaagtttttcttgaatctctattttctagtaatatcctgctcacagtttgtaccagcattgaaaataggctatctctacacctactgggctcctctgggatttgtcttggctgttactatgacacgggaagcaattgatgaatttcggcgttttcagcgtgacaaggaagtgaattcacaactatatagcaagcttacagtaagaggtaaagtgcaagttaagagttcagacatacaagttggagacctcatcatagtggaaaagaatcaaagaattccatcggacatggtgtttcttaggacttcagaaaaagcaggttcgtgttttattcgaactgatcaactagatggtgaaactgactggaagctgaaggtggcagtgagctgcacgcaacagctgccggctctgggggaccttttttctatcagtgcttatgtttatgctcagaaaccacaaatggacattcacagtttcgaaggcacatttaccagggaagacagtgacccgcccattcatgaaagtctcagcatagaaaatacattgtgggcaagcaccattgttgcatcaggtactgtaataggtgttgtcatttataccggaaaagagactcgaagtgtaatgaacacatccaatccaaaaaataaggttggtttgttggaccttgaactcaatcggctgacgaaagcgctatttttggctttagttgctctttccattgttatggtaaccttacaaggatttgtgggtccatggtaccgcaatctttttcggttccttctcctcttttcttacatcattcccataagtttgcgtgtgaacttggacatgggcaaagcggtgtatggatggatgatgatgaaagatgagaacatccctggcacggtcgttcggaccagcactatcccagaggaacttgggcgcctggtgtatttattgacagacaaaacaggaaccctcacccagaatgaaatgatatttaagcggctgcacctgggcaccgtgtcctatggcgccgacacgatggatgagatccagagccatgtcagggactcctactcacagatgcagtctcaagctggtggaaacaatactggttcaactccactaagaaaagcccaatcttcagctcccaaagttaggaaaagtgtcagtagtcgaatccatgaagccgtgaaagccatcgtgctgtgtcacaacgtgacccccgtgtatgagtctcgggccggcgttactgaggagactgagttcgcagaggctgaccaagacttcagtgatgagaatcgcacctaccaggcttccagcccggatgaggtcgctctggtgcagtggacagagagtgtgggcctcacgctggtcagcagggacctcacctccatgcagctgaagacccccagtggccaggtcctcagcttctgcattctgcagctgtttcccttcacctccgagagcaagcggatgggcgtcatcgtcagggatgaatccacggcagaaatcacattctacatgaagggcgctgacgtggccatgtctcctatcgtgcagtataatgactggctggaagaggagtgcggaaacatggctcgcgaaggactgcggaccctcgtggttgcaaagaaggcgttgacagaggagcagtaccaggactttgagagccgatacactcaagccaagctgagcatgcacgacaggtccctcaaggtggccgcggtagtcgagagcctggagagggagatggaactgctgtgcctcaccggcgtggaggaccagctgcaggcagacgtgcggcccacgctggagatgctgcgcaacgccgggatcaagatatggatgctaacaggcgataaactcgagacagctacctgcattgccaaaagttcacatctcgtgtctagaacacaagatattcatattttcagacaggtaaccagtcggggagaggcacatttggagctgaatgcatttcgaaggaagcatgattgtgcactagtcatatctggggactctctggaggtttgtctaaagtactacgagcatgaatttgtggagctggcctgccagtgccctgccgtggtttgctgccgctgctcacccacccagaaggcccgcattgtgacactgctgcagcagcacacagggagacgcacctgcgccatcggtgatggaggaaatgatgtcagcatgattcaggcagcagactgtgggattgggattgagggaaaggagggtaaacaggcctcgctggcggccgacttctccatcacgcagttccggcacataggcaggctgctcatggtgcacgggcggaacagctacaagaggtcggcggcactcggccagttcgtcatgcacaggggccttatcatctccaccatgcaggctgtgttttcctcagtcttctacttcgcatccgtccctttgtatcagggcttcctcatggtggggtatgccaccatatacaccatgttcccagtgttctccttagtgctggaccaggacgtgaagccagagatggcgatgctctacccggagctgtacaaggacctcaccaagggaagatccttgtccttcaaaaccttcctcatctgggttttaataagtatttaccaaggcggcatcctcatgtatggggccctggtgctcttcgagtctgagttcgtccacgtggtggccatctccttcaccgcactgatcctgaccgagctgctgatggtggcgctgaccgtccgcacgtggcactggctgatggtggtggccgagttcctcagcttaggctgctacgtgtcctcactcgcttttctcaatgaatattttggtataggcagagtgtcttttggagctttcttagatgttgcctttatcaccaccgtgaccttcctgtggaaagtgtcggcgatcaccgtggtcagctgcctcccgctgtatgtcctcaagtacctgaggcgcaagctctctcctcccagctactgcaagctggcctcctaaggggctgtgcacccccagcgggctggccccagcaccttctgcccttcccagcaccttgtgcccttgccagtgaacgcagggtttgccattgctaccaagcaagcaccacaagaaagggagggtacgccaggcgagcccagggcacagatgctgagacagcctctccttctcagtgcagggacgtcacccctgccaggcaagcccagggcacagatgccaggatggcttctccctctcagtgcgaggcttcacccctgccaggcaagcccagggcatagatgctgagacagcctctccctctcagtgcagggacgtcacccctgccaggcaagcccagggcacagaggccgggacggcctctccctctcagtgtgaggcttcacccatgctaggcaagcccagggcacagatgccgggatggcccctccctctcagtgcgggaacgtcacccctgccaggcaagcccagggcacagatgctgcgatggcctcttcctcttaagtgtggggcctcacccctgcttttctttctttttttgtattgtcaaaattgtatttccatattgaagcagcttgagtttctactgaaaatgagcccgaattatttcactattactgtaaagggttcatcttactctggcattctgagaattagactgaaagtttaatttctgcagttccctcatattcagattctttctttgatgttataacacaaagtcattcctactcaaatgtaataaaattgaggctccacggaggcccgtgtccacatcagctgcagctcccactcagacagacggcctgccccacagcctgccctttgctgaagataccctcgctttatacttgcatttcgcttttcagtaaaaacagtcaagttactgagttctcacataaaaaaaaaaaaaaaaaaaaaaa

SEQ ID NO: 31684 - DNA, 2765 bp, Homo Sapiens
ggcggcagcgcccggcgcccgggctcacctcggccatgagcagcgcagccggcccagacccgtcggaggcgcccgaagagcggcatttcctcagcaccgcggaggcagccgccctggagcgggagctgctggaggattatcgctttgggcggcagcagctcgtggagctgtgcggtcatgctagtgccgtggctgtgaccaaggtggggaaactgaagctcagaggtggcgaggggcctgccctgggtcagagggggatggaagcagagctgcaacccaggtgtgtctggctctggagtaaacccccacacctcgaggggccaggaggatgacacaagggtgatagcaataatcatactatggagtgcttcaccgtgcagccagcagtgctgggcatcagtttcctctgcaacagcataataaatggtactgacgagtcagtccctaaacgtgaacgcctcagaaaactgtcccatacagtcgaggctctagcgtgactgcctcctcttcctcccctgccctcctcatccccctcgcctttctcctccttcctcctcctcctgccccctcctcttaccctcctcctcctttctctctccctcctcctccccttccgcccctttcttctctcctttctccttcctctccctcctcctccccctcctcctgttctccttcctccttcccacttaccctacctcctccccatcctcctcctccccattctctccctcctcacccctcctcctctttttcttcttattaccacggtatactttttaaaaactcaatgtttttcttcatgtggacttaaatgtttgtatttccaaatgaaatagatcccgggtgaggcgcccaaaggagaaggaaaatcaaaaccccagaaagaaacccagtagtcactactcgcctggcgctcagtggccaactgtctggtttttgcactgaaagccccttgtctgtccagaagcccctcagtcccagtcttgggtcttgggctctgggcccggtgtggctgggatcgcaggcatgttcatggcaggtcaggactgcgctaagcctttggggaggatacttgaaaggggagtaatctgctgtctgtgtggttggagcttaaagtacagctggggctcaagagacacccagagtgcctgtcaggcggtggcactgtcatcgcatttgataaaggccaaactgagtctgggagagaaggggctggggccacgcagaatcagggcagggctggggccaaaatgcctggagagacagagtctgagagatacagagatggccagagacagatggagagagacagataacagagagatacagagacagccagagacaaatggagagagagacaaatggagaaagagagccagagacatacagaaagacagagacactagagtctgagagatacagacagacacagagacagccagagacagatggagagagacagagacacaaagagagccagagacacagagagtctgagagatacagacagacacagagacggccagagacggagagagacagagacagacagagacgcagagagtctgagagatacagaaacagccagagacaggtggggagagagacatgaagagagccagagacatacagagagacagagacacacagagagacagagacacggagagtctgagagatacagagagacacagagacagccagagagagacagagaggccccagggcatcgtggctaaggttgggctcccctactccacagcctccaggaggggctgaggtctggaaacatgggcgggggtgggcccgcggtgagaaaggtggaagaatgtctgcaactcaggcggagaataaacaaaccgcactccgggcgacgggcagtggctggatgcacgtttttcctgcaccgacctggcagagcctgagaccgggcctctgcatctccagcggggaaactgaggccccaagaggcccaacccctcatccagaacagctcacctcctgtcctatcctgttgcctccaggcccaagccccatcccttcccctactccgggcctcagtttcctctccaggcaaggaggaatctggactgtgcctgtgcctttgctgtgtcccctaccaccaggcgttcccgttgcccgctctctcccggaagcagaggacggtgctggtcgtgtgtggcccggagcagaacggggcagtggggctggtctgtgcccggcacctgcgggtgtttgagtatgaacccaccatcttctaccccacacgctcgctggacctgctgcatcgggacctgaccacccagtgcgagaagatggacatccccttcctgagctacctgcccactgaggtgcagctcattaacgaagcctatgggctggtggtggatgccgtactgggccccggcgtggagccgggcgaggtcgggggcccctgcacccgcgcgctggccacgctcaagctgctgtccatccccctcgtgagcctggacatcccctcaggctgggacgcagagaccggcagcgattcggaggacgggctgcggcctgacgtgctggtgtctctcgcggcgcccaagcgctgcgctggccgcttctccgggcgccaccacttcgtggccggcaggttcgtgcccgatgacgtgcgccgcaagttcgctctgcgcctgccgggatacacgggcaccgactgcgtcgcggcactgtgaccgccacccgcggccacaccgcagggaccctcgccaataaacagccctcccacc

SEQ ID NO: 31685 - DNA, 2765 bp, Homo Sapiens; identical to SEQ ID NO: 31684

SEQ ID NO: 31686 - DNA, 1029 bp, Homo Sapiens
cctccctccacggatgcgcttaaaaggcggtggcggtggcggcagcgcccggcgcccgggctcacctcggccatgagcagcgcagccggcccagacccgtcggaggcgcccgaagagcggcatttcctcagggccttggagctgcagcccccacttgccgacatgggaagagcggagcttagctcaaatgctaccacctcccttgtccagaggaggaaacaggcctggggaaggcagtcatggctagagcagatttggaacgcagggcctgtttgccagagcaccgcggaggcagccgccctggagcgggagctgctggaggattatcgctttgggcggcagcagctcgtggagctgtgcggtcatgctagtgccgtggctgtgaccaaggcgttcccgttgcccgctctctcccggaagcagaggacggtgctggtcgtgtgtggcccggagcagaacggggcagtggggctggtctgtgcccggcacctgcgggtgtttgagtatgaacccaccatcttctaccccacacgctcgctggacctgctgcatcgggacctgaccacccagtgcgagaagatggacatccccttcctgagctacctgcccactgaggtgcagctcattaacgaagcctatgggctggtggtggatgccgtactgggccccggcgtggagccgggcgaggtcgggggcccctgcacccgcgcgctggccacgctcaagctgctgtccatccccctcgtgagcctggacatcccctcaggctgggacgcagagaccggcagcgattcggaggacgggctgcggcctgacgtgctggtgtctctcgcggcgcccaagcgctgcgctggccgcttctccgggcgccaccacttcgtggccggcaggttcgtgcccgatgacgtgcgccgcaagttcgctctgcgcctgccgggatacacgggcaccgactgcgtcgcggcactgtgaccgccacccgcggccacaccgcagggaccctcgccaataaacagccctcccaccacc

SEQ ID NO: 31687 - DNA, 4563 bp, Homo Sapiens
gaggggcagctctgggaaagtcctaggggtgggggcagtctccacagcctcccacaagggagttaccaccttcccgcacttctgggtacaagtctcctgctctggctgtattccacagttagaacttcatatctttggcttagagctgaattttctgttaccatgtggatgctccaggtgaaggggcccgctcctgcttaaaaacaccatgcatgcagactgctgctgggaatgtgacagttggctgttggagagaagggggcactggcattgagagacctccagactggacatggccctgagtccaggggctaacctggtcttccatgaagacccaaagatgacaccaagtcccccctcctgtggggccccgggattagggtctggtaccatccctcagccccacccagacatggctcaggtgcctatgttgaatctgctcccaagtcctggcttggctctcgttccagatcttaatgattctttgagtccagtctcaggggaggcctcaggcctggtgtctgaaaacacccccagacctgatgacagcagagctatcgctccagcctccctccagatcaccagttcttgttctggtgaagccctggacctggattccaaggatgtctcaaggcctgactcacaggggcgcctctgtccagcctcaaaccccattctgagccctagctctactgaggcccctcgtctgagctctgggaaccaccctcagtcaaattctgaagatgccttcaagtgcctctcaagtaagattttcaagttgggtcagagaaactccaacccttctaggcatgaattaaacccatttataaggcaccattccagagaaggtctggttctgggccactgcatctctaggccaagctcaaaagcactccttattccaacctcaaactcttctctggaccttgactccaatccattgctcaacatgggctcaagaaacacctccaagctgaacctgaatgtagctccagattctcatgggaccctaatcccagacacaaatgagaccatcactttggcttcacataatatctctgagtctgtttcaaaaggagcctttagtaccacctggagcacaagttcaaaggaaaccatgaatgtggcttccagcggccactccagatctgatttgagcgtgaccatcactcaagcctcgtatgtgaccctgattcctggctccagctatggtatcagcctgcactccagcacccatgggcccaactccaccatctctccaccctcatgcatgactctaatcctgggttccaatgagactctgagcctggactccagcctcctgttcagcgacacctccaccttgacgctgagcagtcagcaggatgatgccaaggacaacagcatccacactgtgcccctggaggagaatctggagagttggagtgagatggccagcattaaggtgggccagttcccgctgggattccccatctccaaccccgcaggcaaggacgccgtgaccttgcaaggcatccctgagggagcctttgatgaagtgacctcatgcctggtgaaggtgccagagaagacagaaggtggcaacaacatggctctggttgagaatgtcaccacccttcagaagagccaggatctgctggaggcagaaggagaaaagaagaccatgataaagaagattatgaggcagatccaggaggagccactggattctctctcaagctccgtccgcaagcaggccatggagatcctgacccagctgagccacacccagcccaccctgggcatgcgggagaggtcggagctggtgaacgtgtgtgtgcacagcgtgttctccctgccctccgtgcaggcgatgcaggagaaggacgaggccaaggctgagaccatccaggctctttaccatcagaccctggaggccctgcagacactgctcaaagccctctttatcgaggaccccactcctgctgggctgaagagcatcttggaggccctggggccttggatgaactctgggaaggcccatgagcgagcacgggctgtgaacaccaatgtctctgtgttgaaccacatgcttctaactctgcctttctttatgcccttggggttcccggcgctggggcttctgctggggagactcatccttcacattggggatcctgatgaggagattggctgtgaggctctggacggcatcatcatcctctacactattctggagctccaaaaacgagccagagataaggaagagaccaacaaaaaggagctatatgagagcaacaagcatttcctggggccctacaaccctgtgagcccgtgccagaacattctgcgggtgatcgaggaatttggagacttcctggggccccagcagataaaggacctgctgctggccgccctggaagggctgaaaggcagctcagaggctccagggaaggactccagggagatgatgcagctggcctcggaggtcatgctcagctcggtgctggagtggtaccgccacagggcgctggaggtgatcccagaaatcatgcaaggcatctacatgcagctgagccacatccaggagcctcgggcccgccaggtggccctgctgcccgtctccctcctggctagctccttcatgaccgaggttgtggtggccctgctcatgtgccccctcccactgaacagcaatggagcagagatgtggaggcagctgatactgtgtaagcccagctgtgatgtccgagacctcctggatctgctcctgggcagcctgaaggagaagcccgtcaccaaggagggccgggcttccatcgtgcccctggcggcagccagcggcctgtgcgagctcctgtccgtcaacagctgcatgggccgtgtgaggcgcatctaccctcagctgctcctggccctgctcattcaggtccattaccacatcggcctcaacctgcctggctgcgtggctcctcccaaggacaccaagaagggtgcacagccctctcccttcgtacctgtgcgctgggtggtgaaagtggtgaaaaccctgctactgaggatgggctgctcttatgagaccacgtttctggaggaccagggtggctgggagctcatggagcaggtggagagccaccaccgcggagtggccttgctggcaagggccatggtgcagtactcctgccaggagctgtgccgcatcctctacctgctcatcccgctcctggagcgaggcgacgagaagcacaggatcacggccaccgccttcttcgtggagcaaccctgcgaagaaggaattgtgatactcatgcttaggccacaggatctcatgggaaaggcaacaacaagcagtcacaggggctcggagctggagagtgacacactcagctttgccacatggtgctgatggacatcagacggagacttccagcaatctgttggttttgcaagtctgaagctccgggcagagctgagcctgctcctccagatggagcaggtgcgccggatccccgaggaatactctctggggcggatggcagaaggcctgagccaccacgaccccatcatgaaggtgctgtccattcgaggcctggtcatcctggcccgcaggtctgagaagaccgccaaggtgaaggccctcctgccctccatggtgaagggcctgaagaacatggatgggatgctggtggtggaagcggtccacaacctcaaggctgtcttcaaggggcgggaccagaagctgatggacagtgcggtctatgtggagatgctgcagatcctgctgccgcacttcagcgacgcacgagaggtcgtgcgctcctcctgcatcaacctgtatgggaaggtggtccagaagcttcgggcaccacgcactcaggccatggaggagcagctggtcagcaccttggtgcccctactgctgaccatgcaggagggcaactccaaggtaagccagaagtgtgtgaagaccctgttacgctgttcttacttcatggcttgggagttgccaaaaagagcttatagccggaagccctgggacaaccaacagcagacagtggccaaaatttgcaagtgccttgtgaacacccaccgagacagcgccttcatattcctcagccagagcctggagtatgccaagaactcacgggcctccctccggaagtgctcagtcatgttcatagggtccctggtcccctgcatggagagcataatgacagaagatcgtctgaatgaagtgaaagctgctctggataacttgagacatgacccagaagcatcagtgtgcatctacgcagcccaggtccaggaccacatcctggccagctgctggcagaactcctggctgccgcacgggaactcatgggtgtgttactcagccaccacccaccgctggagccccagctgtgagaacctgcccacttcccaccagcggcgctcctggatcatgcaggcactgggctcctggaagatgtccttgaagaagtgacgtccctgagccccaaaccctcctcagggtggttgagttccagccatgctccctataaatgtcatgtggcttacctctcaaaaaaaaaaaaaaaaaaa

SEQ ID NO: 31688 - DNA, 7484 bp, Homo Sapiens
ctgtcccggccgcagccccacgccggctgcagctccgcgagccgagccggatctcgagcggggtacacgggctgaggcggcggcggcggccccgccccggggctccattgttaaggcggctgcggctctgtcggctgttcagctgcgctccagtcggcccaggcgccgcggcgaggagcgagcgctgcgaggtggcggcctgagcaatggaagagttaatagttgaacttcgtctctttcttgaactcctggaccatgaatatctaacctcaactgtcagggagaaaaaggcagtgataaccaacattctgctaagaatacagtcatccaaaggttttgatgtgaaggaccatgctcagaagcaggagaccgctaacagcctgccagcccctcctcagatgcccctgccggagatccctcagccctggctgcctcctgacagtgggcctccaccattgccaacatcctccctcccagaaggttattatgaggaagctgtgccgctgagccccggaaaagctccggaatacatcacatcaaattatgattccgatgcgatgagcagctcttatgagtcgtatgatgaagaggaggaggatgggaaggggaagaaaacccggcaccagtggccctccgaggaggcctccatggacctggtcaaggacgccaaaatctgcgccttcctgctgcggaagaagcggttcggccagtggaccaagttgctctgcgtcatcaaagacaccaaactgctgtgctataaaagttccaaggaccagcagcctcagatggaactgccactccaaggctgtaacattacgtacatcccgaaagacagcaaaaagaagaagcacgagctgaagattactcagcagggcacggacccgcttgttctcgccgtccagagcaaggaacaggccgagcagtggctgaaggtgatcaaagaagcctacagtggttgtagtggccccgtggattcagagtgtcctcctccaccaagctccccggtgcacaaggcagaactggagaagaaactgtcttcagagagacccagctcagatggggagggtgttgtggaaaatggaattaccacatgtaatggaaaggagcaagtgaagaggaagaaaagttccaaatcagaggccaagggcactgtgtcgaaagtcactgggaaaaaaatcaccaagatcatcagtctgggaaagaaaaagccgtccacagacgagcagacctcctcagctgaggaagatgttcccacctgcggctatctgaacgtgctctccaacagccgctggcgagagcgctggtgccgagtgaaagataacaagctcattttccacaaggacaggaccgacctgaagacccatattgtgtctattccgctccgtggctgcgaggtgatcccgggtttggattctaaacatcctctgacgttccggctgctgcgcaacggccaggaggttgcagtattggaggcatcttcttctgaagacatgggcaggtggattgggattttactcgcagagacgggatcgtccacagacccggaggctctgcactatgactacattgatgtggagatgtctgcaagtgtcattcagacagccaaacagaccttctgtttcatgaacaggcgtgttatatctgctaacccatatctagggggcacctccaacggctatgcccaccccagcgggacggcacttcattatgacgatgtcccgtgcatcaacggctcgctcaagggtaaaaagccccccgtggcgtctaatggggtcacaggaaaagggaagactctgagcagtcagccaaagaaagcggatcccgcggctgttgtgaaaaggacgggttcgaatgctgcccagtacaagtatggcaagaaccgggtagaagcagatgccaagcggctacagaccaaagaggaggagctgctgaagaggaaagaggccctgcggaataggctggcccagctccgcaaggaaagaaaagaccttcgagcggctattgaagtgaacgccggcaggaagccgcaggcgatcctggaggagaagctgaagcagctggaggaggagtgccggcagaaggaggcggagcgtgtcagcctggagctggagctgacggaggtcaaggagagcctgaagaaagcgctggcgggcggagtcaccctggggctggccatcgagcccaagtcagggacatcgagtccacagtctccagtgttccggcaccggaccctggaaaactcgcccatctccagctgtgacaccagtgacaccgagggccccgtgccggtgaacagcgcggccgtcttgaagaagagccaggctgccccgggcagctccccctgccgagggcatgtgctgcggaaggccaaggaatgggaattgaagaacgggacctaggggacagcagcaccactccagcctcagagactgcacacccccttgcctgtatcctcatctgtgtgacggcaggaagctctgcccagagtggcctcagctgcacgactccagaggctccacgactgagctctgaggccagtgcctgtcccccaggcccacttgtattctttctactgtaaaatggcgcctttaaaaaagatgtaagactttggttcccaactttgttaaaaaacaaaaaaagtgatggaaaggtgtttgaaaggatgctatcaggcgaagtgacatctttctaaccagataggccattgctttcaccgattccaacccagccctggactgaggatggatggttccatgagcccccagatgaaaacctggattcgacagggaagagcttggatccccggctgccccgggcatgagtgtggctggccatgggcactgggctcgccttgcacgcccaccaggagggccaggggcatacgcagtcctgacgtggactttgtgtcttggcgtaccctctccacgtgcccgtccccctcgtcatcagaggtaaaggcatgagaaaatcgcgctgtgaaacgttttttaccttttattattattttttggacagatgcttttgtcaccaagacatgaaaagctgccattcttcttaacctgttttttaggaatgtctttttactgtgtgtcacacttagatcaaggagttttcagaggttccttattttattaattaattatttgtgctgcttttgacaggtagcagagggttttaatacttcactaacagtacaccctcctcccccttgggctagcatccccagcccttaatccacgtcggagccggcaggtgcttctcacaccaggagcctctgggggcaggggctggctcctcgccgctgtacaggacgtttactgctgcttggggccagggcagtcctttgaaagggaagcaagttccggaatttgttcgctcatggaactataacaccttagagcaagaggcaggaattccagggcctcctgcccctccccttcctccagcttgtcaagttaaaccactaatgtgttggtgggcctggccgtgctgcctctcctgagtagggtgggtgcaagtagggcctctttcccagctttcttgcttgccttctgtgcaatatttcttggagaatttggatgcctaaggcataaaggaaaaaaacagagttcatagtttgagctggtatttaccccctgggtttaaaaatcagattaacttcttggtctcccggaggctgctgtcaggaattctccagtacgggaagatgcagtcacttatgacgaaataagtcacccctgaacgcctccgcaggcagattcatggagaccagtcccagtagcaaccgccccttccccaagcatagaatacagaggtgccatacttggtgtaagccttccttctgtccactgtccagaatgtcctttttcacacagaggaagagatggcgggaaaacactgactgactccttgggtttcccccagacatactttcagagcgctagctgtgtggtgcacgggactttacagttaggattcatgtttaaggtggtggcgcttgaggcctgcaagggccacgttggattactgaagcggaaagcggtctcccatgtataagaaaaagttttacaacacgaattggaagctgcttgagtccacctgaacttgaattgattgcaaagccatctgccgggaacggttttgggttcctgagccatcagccagcctttctttcccctctgatgcacgttcctcccggcctagtccgtggaggcccatcacaccagcatccgtgacgccagcttcccactaggacatccaggcaggtcgggcggggacgccacacacctcagggccgtccgctgcattgccatagaggagccctccctccagtggtcacttcccaccattgcaggcagacttcccaccattgcaggcagctgggcccacttcatatcacacaaaatgaattttctataaagggaaaaaagtttgctcctccatagatttttgctgccttcgggtcaaatagtttccctggttgacactcttgggccactctgattggcagcctgctttgccaaagagaactgtgtgaggttttggtggttagtaagagaagggggagatggccagcctgaagtcacggtcctggcccagcacaggtgggcagcagcgagctggcaggtgaagtgtgagcagcacgcaaagtgtcacgtgggccttagccgtcacccaccagcttcctcaccaggcaaggaggccccggagccttagcagggacttgcccaacggcacagctgattggtgctcgactcccagcatgcatattttgttgtaaaaacccaggtttgtaattcacatccacaaccctaagccttttaaagcggaggcaaacgttaacaaaccccatcgtggtccatggagcctttcaaaatgggtgccctggaggggcctgacagtgggttccttccatggcggatactcccttgaaatttcacattccatcaaagtttaaagcatttacttcagaataagttatttatgtgtatatgttcaataaatatagtttttaatttatatctgtacatattagacacacgcgagccatcttgccagaattctgacagtgatgtcattttattcccctcccaaaacatgccccaggaacaagcaccccttgcctctgtggcagctgcgagtgtgtctgatttcataacgaagccaggctgagggcaagaggcccgacaggcaggccagggtccccggagaagccggatttcttcgcaatgtcactggtacttagcagatggtcgtgttcacaggggctagccacctgtactacggtgccgaccgcaatgcgaggaatgtggtggccacgcgatggagctggccggaggacaggtcaggtgagggggccgacccctgcggggctcagggctccttccattctaaccttgagccacagtgtcactcttcagggctctgctcctggctctattttgttaaggtgtcatcagccttcaacctccatttatatatttttataatgttaagccactgaccaactttttcatagaaacaactatcagattcgagggctccctttgtccccctgacctgggcacaggcatgggcgatggctccctcttcccagaatctgcggggaactggggcaaggcccatctgtctgcaaggctggtagctctctccctcggcttccagagtccacggcagttgcaaggtaaccagtgtggatctgctgagtcaccccaggcaccagacttaccccaggagcatgggccactgtccatggggccttccttgagaccttcccttggggctggcgggcggcggcttaccagctgggtcagtcccatctcgcccctctgtgcctatgccctggcgttgccaggcttaaccttcccctgtatcttactcatcccagaattattactggccatttctaaatagacaaaaactaccctaaaatgtggagatttactccttttgaaaagtctgtttcaaaaagtgtggcctcagctctggaggccacccccaggaaggagtttgaggttcattgtcattatggccacagtttggtgcttgtgcacgggactcaaagggcagcgtcgaagctggggttaggtgtagggttgtgagcaaagctcccctgtttgtggccacaccttccctttccaaaaaggctattaattctactcacccactatttggggggatgtaaattttgcccacagactttgccacccaggtgaggtgctgtgttcatgcacggaactgatgtcattagacaccatccaaggatgggcagcctgcagtgtggccggcgactgccatccagagaaaaggcaccttgtgccacagggcggggccgacaccctgagctcacaggtggcccctgcattcaggtggatgtccatccttgaaacagcctcttctgggaacacagcactggaggtctccaggcatcagggttggccggcagggtgccctgcagcttacataaaggtcgtggcaatgtttcaatgttaaactaaactattgccttcctcttacttttcctaaaatgattttctaatgggaacagtcacttcaagttcatgacatagtttgaaggaggataattcattttttcctggttgtcactgtcttcttatccccttggtgggctgggttcatactgtgaaataaactaaaatgaaaccaaaacgttcctgccgtaaatacgtggcacagcactgcagaaaaagcagtcacctctattcgtgagtccccaagccatagcagggcgtctgtaaaagaagggaaactgcacccaggaagtggtgggcgtcagacgcatcctttcgcccgtagttcatgaaatagttccggctttggtcttccagaaaatctcaacttcaccgtgcacaagtgttaccgggtctttttagtgtagccatggaagatactttcaaaaggacatcttcagatcataagtcttaggaccaaaggtgtttttaatgagataatctttttgattttctaacaagaaaggaaatattcactttacattttaacatcaacttttaagtgatattcagaattaattgaccatggtgatacgttgtaaaatgttttcatattaagaatgtaattatttccttattgtattttttaaaagctaaagtcatatttaaaattctctttgaaagaaacaggcaaagaaacagcaaagatttttttaaattaaatatgttagtagtgcccacttcaaatgactgtaaatatattttcactgtttctcaatgtatttaattcataaagtaaaaattttatgaaaagaaacttgcaaggaaaatcctagttttcagtccactcgccccactttgtagtagcttcactgaatttcctgctttcctggttgaattttctactgtttcacgtggtgtaaccctagactggcgcccttggcgtgcccctttgtgtatgaataaacttctctcccccaaaaaaaaaaaaaaaaaaaaaaaaaaaaaaaaaaa

SEQ ID NO: 31689 - DNA, 5045 bp, Homo Sapiens
gggagcgcgcgtgcgcgcggccgtgcagcctgggcagtgggtcctgcctgtgacgcgcggcggcggtcggtcctgcctgtaacggcggcggcggctgctgctccagacacctgcggcggcggcggcgaccccgcggcgggcgcggagatgtggcccctggtagcggcgctgttgctgggctcggcgtgctgcggatcagctcagctactatttaataaaacaaaatctgtagaattcacgttttgtaatgacactgtcgtcattccatgctttgttactaatatggaggcacaaaacactactgaagtatacgtaaagtggaaatttaaaggaagagatatttacacctttgatggagctctaaacaagtccactgtccccactgactttagtagtgcaaaaattgaagtctcacaattactaaaaggagatgcctctttgaagatggataagagtgatgctgtctcacacacaggaaactacacttgtgaagtaacagaattaaccagagaaggtgaaacgatcatcgagctaaaatatcgtgttgtttcatggttttctccaaatgaaaatattcttattgttattttcccaatttttgctatactcctgttctggggacagtttggtattaaaacacttaaatatagatccggtggtatggatgagaaaacaattgctttacttgttgctggactagtgatcactgtcattgtcattgttggagccattcttttcgtcccaggtgaatattcattaaagaatgctactggccttggtttaattgtgacttctacagggatattaatattacttcactactatgtgtttagtacagcgattggattaacctccttcgtcattgccatattggttattcaggtgatagcctatatcctcgctgtggttggactgagtctctgtattgcggcgtgtataccaatgcatggccctcttctgatttcaggtttgagtatcttagctctagcacaattacttggactagtttatatgaaatttgtggcttccaatcagaagactatacaacctcctaggaataactgaagtgaagtgatggactccgatttggagagtagtaagacgtgaaaggaatacacttgtgtttaagcaccatggccttgatgattcactgttggggagaagaaacaagaaaagtaactggttgtcacctatgagacccttacgtgattgttagttaagtttttattcaaagcagctgtaatttagttaataaaataattatgatctatgttgtttgcccaattgagatccagttttttgttgttatttttaatcaattaggggcaatagtagaatggacaatttccaagaatgatgcctttcaggtcctagggcctctggcctctaggtaaccagtttaaattggttcagggtgataactacttagcactgccctggtgattacccagagatatctatgaaaaccagtggcttccatcaaacctttgccaactcaggttcacagcagctttgggcagttatggcagtatggcattagctgagaggtgtctgccacttctgggtcaatggaataataaattaagtacaggcaggaatttggttgggagcatcttgtatgatctccgtatgatgtgatattgatggagatagtggtcctcattcttgggggttgccattcccacattcccccttcaacaaacagtgtaacaggtccttcccagatttagggtacttttattgatggatatgttttccttttattcacataaccccttgaaaccctgtcttgtcctcctgttacttgcttctgctgtacaagatgtagcaccttttctcctctttgaacatggtctagtgacacggtagcaccagttgcaggaaggagccagacttgttctcagagcactgtgttcacacttttcagcaaaaatagctatggttgtaacatatgtattcccttcctctgatttgaaggcaaaaatctacagtgtttcttcacttcttttctgatctggggcatgaaaaaagcaagattgaaatttgaactatgagtctcctgcatggcaacaaaatgtgtgtcaccatcaggccaacaggccagcccttgaatggggatttattactgttgtatctatgttgcatgataaacattcatcaccttcctcctgtagtcctgcctcgtactccccttcccctatgattgaaaagtaaacaaaacccacatttcctatcctggttagaagaaaattaatgttctgacagttgtgatcgcctggagtacttttagacttttagcattcgttttttacctgtttgtggatgtgtgtttgtatgtgcatacgtatgagataggcacatgcatcttctgtatggacaaaggtggggtacctacaggagagcaaaggttaattttgtgcttttagtaaaaacatttaaatacaaagttctttattgggtggaattatatttgatgcaaatatttgatcacttaaaacttttaaaacttctaggtaatttgccacgctttttgactgctcaccaataccctgtaaaaatacgtaattcttcctgtttgtgtaataagatattcatatttgtagttgcattaataatagttatttcttagtccatcagatgttcccgtgtgcctcttttatgccaaattgattgtcatatttcatgttgggaccaagtagtttgcccatggcaaacctaaatttatgacctgctgaggcctctcagaaaactgagcatactagcaagacagctcttcttgaaaaaaaaaatatgtatacacaaatatatacgtatatctatatatacgtatgtatatacacacatgtatattcttccttgattgtgtagctgtccaaaataataacatatatagagggagctgtattcctttatacaaatctgatggctcctgcagcactttttccttctgaaaatatttacattttgctaacctagtttgttactttaaaaatcagttttgatgaaaggagggaaaagcagatggacttgaaaaagatccaagctcctattagaaaaggtatgaaaatctttatagtaaaattttttataaactaaagttgtaccttttaatatgtagtaaactctcatttatttggggttcgctcttggatctcatccatccattgtgttctctttaatgctgcctgccttttgaggcattcactgccctagacaatgccaccagagatagtgggggaaatgccagatgaaaccaactcttgctctcactagttgtcagcttctctggataagtgaccacagaagcaggagtcctcctgcttgggcatcattgggccagttccttctctttaaatcagatttgtaatggctcccaaattccatcacatcacatttaaattgcagacagtgttttgcacatcatgtatctgttttgtcccataatatgctttttactccctgatcccagtttctgctgttgactcttccattcagttttatttattgtgtgttctcacagtgacaccatttgtccttttctgcaacaacctttccagctacttttgccaaattctatttgtcttctccttcaaaacattctcctttgcagttcctcttcatctgtgtagctgctcttttgtctcttaacttaccattcctatagtactttatgcatctctgcttagttctattagttttttggccttgctcttctccttgattttaaaattccttctatagctagagcttttctttctttcattctctcttcctgcagtgttttgcatacatcagaagctaggtacataagttaaatgattgagagttggctgtatttagatttatcactttttaatagggtgagcttgagagttttctttctttctgttttttttttttttttttttttttttttgactaatttcacatgctctaaaaaccttcaaaggtgattatttttctcctggaaactccaggtccattctgtttaaatccctaagaatgtcagaattaaaataacagggctatcccgtaattggaaatatttcttttttcaggatgctatagtcaatttagtaagtgaccaccaaattgttatttgcactaacaaagctcaaaacacgataagtttactcctccatctcagtaataaaaattaagctgtaatcaaccttctaggtttctcttgtcttaaaatgggtattcaaaaatggggatctgtggtgtatgtatggaaacacatactccttaatttacctgttgttggaaactggagaaatgattgtcgggcaaccgtttattttttattgtattttatttggttgagggatttttttataaacagttttacttgtgtcatattttaaaattactaactgccatcacctgctggggtcctttgttaggtcattttcagtgactaatagggataatccaggtaactttgaagagatgagcagtgagtgaccaggcagtttttctgcctttagctttgacagttcttaattaagatcattgaagaccagctttctcataaatttctctttttgaaaaaaagaaagcatttgtactaagctcctctgtaagacaacatcttaaatcttaaaagtgttgttatcatgactggtgagagaagaaaacattttgtttttattaaatggagcattatttacaaaaagccattgttgagaattagatcccacatcgtataaatatctattaaccattctaaataaagagaactccagtgttgctatgtgcaagatcctctcttggagcttttttgcatagcaattaaaggtgtgctatttgtcagtagccatttttttgcagtgatttgaagaccaaagttgttttacagctgtgttaccgttaaaggtttttttttttatatgtattaaatcaatttatcactgtttaaagctttgaatatctgcaatctttgccaaggtacttttttatttaaaaaaaaacataactttgtaaatattaccctgtaatattatatatacttaataaaacattttaagctaaaaaaaaaaaaa

SEQ ID NO: 31690 - DNA, 3775 bp, Homo Sapiens
ccccgccccctgcgctcacctgcccgcgcgctcgccttccggggacccggggcccatggacacatacacccagccctgctgtcccgcgcgccagctcaccagccctacccaagggacatcattcacgcctgggcgcctccgccgggctccgggagcccaaggtcgcggctgggccagcgctgagcgtcagaggacgagagcaggggcctccccggtcgccccagcaggcccaggcacataggtgcccagagatccctggcttctgatcgcccggaagactaagagctttagttttggtccagaaagcattttcaaggagctggtcaagcatggctttagcagataagagacttgagaacttacagatctacaaagttcttcaatgtgtgcggaacaaagacaagaagcagatagagaagctgaccaagcttggataccctgaactaatcaattatacagaacccattaatggacttagtgctttgcacttagcctcagtttccaatgatattgatatggtcagctttctccttgaccttggtgctcaccctgatgtgcaagaccgaatgggctgtactcccacaatgagggctgcagaactgggccatgaattgtcaatggaaatattagcaaaggcaaaggctgatatgactatagttgataatgaaggaaaaggtgttttgttttactgcattttaccgactaagcggcattatcgctgtgctctgatcgcccttgaacatggtgcagatgtcaacaattctacctatgaaggaaagccaatattccttagagcttgtgaagatgcacatgatgttaaagatgtgtgcctgacatttttggaaaaaggagccaatcctaatgcaatcaactcatccacaggccgcacagctttaatggaagcgtcaagagaaggggtagtggaaatagttcgaggcatattggaaagaggaggtgaagtgaatgcatttgacaacgacaggcatcacgctgctcattttgctgctaaaggaggctttttcgatatattgaagcttctttttgcctacaatggagacgtggggctgatttcgataaatgggaacacaccacttcattatgctgccatgggtggttttgcagactgctgtaaatatatagctcagcgaggatgtgacctgaaatggaagaatttagatcataaaacgcccagggctgtggctaaggaaggcggcttcaaagcagcaagcaaagaaatacgccgagcagagagaatcgctaataaactagccaggccaggagccaaaaatccaaatccactgtgggcccttagactgcacgattggtccgtagaacgtgaggctttcctccgggaagcctttgcggttttagacaggggtgatggaagcatcagcaagaacgacttcgtgatggtgttggaggaaaggcaggattatgcaagctcagaacagctggctgccatcgctcaccttcatgagaaaacccggggaggaggggtcaatattaatgaattctttaaaggaaccagatatttaaacaagtcttttgtcttaggatcgtatggacctaagaaaaaggaaaaagggatgggcaaaaaaggaaagaaagggaaatttgtcttaccccttccaatctgtgtcattcctgagtacgcgtttccacgccggcaggatggtgggccaccgtattacatgattgagacctacaagaatgtcactgatagcagccggtttaatagagatcatcccccagaacatcccattcaggatgactctgtttggtacattgatgattcagagaaggtattttcaaacattaatattatcaccaaagcaggggatctggcttctctgaaaaaggcctttgaatcaggaatacctgtggatatgaaggataattattacaaaactccgctaatgacggcgtgtgcaagtggaaacatagatgtggtcaagtttcttcttgaaaaaggagctaacgttaatgcaacagataactttctgtggactccacttcattttgcatgccatgcaggccaacaagacattgttgagcttcttgttgaatctggagctttaatagatgcagcttcaatcaacaactcaactcctttaaatagagccattgaaagctgcagactggatacagtaaaatacctacttgatattggtgctaaattccagctggaaaatagaaaagggcatagtgccatggacgttgcaaaggcatatgctgattatagaataattgatctgattaaagaaaagctagataacttgccgaaaccagcagaaaatcaaaaactaaaaggcaagacacctcctatactgaagactgaaggccctgaaattaagaaagaagaggaactgctgtcatcaatttatggtgtaccaaccacatcagagggaaagaaagtacagaagggtaatgtggttcatctgaattcattgattaccagtggttatactaagaaagtggatatcacatttattccacggaggatttggagtcctgaagccacaacagcagagctgatcaggaagagggaactacggcgagagaggtttacacatgaggtggacttcgacgattttatgatgccttttcagaagaacatcacagagaaagctcgagcactggaagctgccttgaagacctaagtcatagcagttatttcttggggtaaatgctttgaggcccagggaccaatctttggagaaagtagatatttccatcaaagccaaagcaatccatacaccaagaacttgttaccaagaatttctttttgctttaacaactataaatattcttagctgtctagagaaaagatgtatgttattttgaaatgaatggtatgtcattctggataaatccccaagcccctttatgaatgtagtgaaatacatggcatgtgggttataaacgttgctgtcaaaagatttaccaggtctacaccattatgcttattatttttttaattatcctttttatttattaaatagagacagagtctcactatattgccccagctggtctcgaactcttgagctcaggcagtcctcccaacttggccgtcgaaagtgctgggattataggcatgagctactgtgcccagcctgcttattgaagatacatttctagtggaaattgatgaaacaatttaggttttggaaaaagaagtaatatttaatcttttaaggaaggagtttatttctcacatgccattataaactatgtgtattagataccttgggttgaatacacttttaacagccctagatcgatagccctagccctagatagatagccctagccctagatagatagctattaggttggtgcaaaagtaattgtggtttttgccataacctttaattgcagcaaaaactgcaattacttttgctccaacctgacagctaggtatctagctagctagaaaggcagatagacagatatatagatgatagatagatagatgatagatagatagatagatgatagatagatagatagatagatagatagatagatagatagagatttattgcaaataattggtttacataattttgggccccagatggttaagtgctaaatttgtagggtaggctatcaggaagtgcaggctggaaacatgcaggagctgtccctgaagtccacaagtggaatttcttcttcatcatggaaacctcagttttgttcatacacctaaatacttcagtatgtctttcctaaaataaaaggcatccatttacctaaaaaaaaaaaaaaaaaa

SEQ ID NO: 31691 - DNA, 1105 bp, Homo Sapiens
gcagcgcgggagcacagtggagcgcagatcgcggacccgagcgggcatgtccccgcgcgcgggagcctccgtttgcggccgggcccgggcggctgtgaacttagcagcgggctcctgcggccccgtcactgccatgtagtcgctggcggggctccctgcagcccgggagcggcagtgccagtgagcctgagcccaggagcccgcgtcttccccgggaggcgctgagtgcgcgccgcgcccccgccgctcgggaggcactttgggccagacagggaaatgggggagaaagtttcggaggcgccagagccggtgccccgcggctgcagtggccacggcagccggactccagcctctgcgctggtcgccgcgtcctctccgggtgcttcctcggccgagtcctcctcgggctcagaaactctgtcggaggaaggggagcccggcggcttctccagagagcatcagccgccgccgccgccgccgttgggaggcaccctgggcgcccgggcgcccgccgcgtgggctccggcaagcgtgctgctggagcgcggagtccttgcgctgccgccgccgcttcccggaggagctgtgccgcccgcgccccggggcagcagcgcgtcccaggaggagcaggacgaggagcttgaccacatattatcccctccacccatgccgtttcggaaatgcagcaacccagatgtggcttctggccctggaaaatcactgaagtataaaagacagctgagtgaggatggaagacagctaaggcgagggagcctgggaggagccctgactgggaggtaccttcttccaaacccggtggcgggacaggcctggccggcctctgcagagacgtccaacctcgtgcgcatgcgcagccaggccctgggccagtcggcgccctcgctcaccgccagcctgaaggagctgagtctccccagaagaggaagtttgatagattcccagaagtggaattgcttggtcaaacgccctgtgtgtccaaatgctgggagaacatcaccccttggatgaattgccaccacattaaataaaacatatccaaagctcaaaaaaaaaaaaaaaaaaaaaaaaaaaaaaaaaaaaaaaa

SEQ ID NO: 31692 - DNA, 1111 bp, Homo Sapiens
gcagcgcgggagcacagtggagcgcagatcgcggacccgagcgggcatgtccccgcgcgcgggagcctccgtttgcggccgggcccgggcggctgtgaacttagcagcgggctcctgcggccccgtcactgccatgtagtcgctggcggggctccctgcagcccgggagcggcagtgccagtgagcctgagcccaggagcccgcgtcttccccgggaggcgctgagtgcgcgccgcgcccccgccgctcgggaggcactttgggccagacagggaaatgggggagaaagtttcggaggcgccagagccggtgccccgcggctgcagtggccacggcagccggactccagcctctgcgctggtcgccgcgtcctctccgggtgcttcctcggccgagtcctcctcgggctcagaaactctgtcggaggaaggggagcccggcggcttctccagagagcatcagccgccgccgccgccgccgttgggaggcaccctgggcgcccgggcgcccgccgcgtgggctccggcaagcgtgctgctggagcgcggagtccttgcgctgccgccgccgcttcccggaggagctgtgccgcccgcgccccggggcagcagcgcgtcccaggaggagcaggacgaggagcttgaccacatattatcccctccacccatgccgtttcggaaatgcagcaacccagatgtggcttctggccctggaaaatcactgaagtataaaagacagctgagtgaggatggaagacagctaaggcgagggagcctgggaggagccctgactgggaggtaccttcttccaaacccggtggcgggacaggcctggccggcctctgcagagacgtccaacctcgtgcgcatgcgcagccaggccctgggccagtcggcgccctcgctcaccgccagcctgaaggagctgagtctccccagaagaggaagttttctcactcccaggagcctgagtccaaccccatccagcccaggcagtccttgtagtcctctcttggcctttcacttttggagccctgtgtgtccaaatgctgggagaacatcaccccttggatgaattgccaccacattaaataaaacatatccaaagctca

SEQ ID NO: 31693 - DNA, 3271 bp, Homo Sapiens
attggctgtgagggttgaatgtaagatggcgcccagggagctgtgaggagaaaaccctgtcggtcttggagcgacgacggcagaaccagggtccctggcggtgcggcggggccggcgggtgcagcggaggcggcggcggcggcggcagtgacgtcgccgggaaccctaaggactctgcaatatgaataattccctagagaacaccatctcctttgaagagtacatccgagtaaaggcacggtctgtcccgcaacacaggatgaaggaatttctggactcactggcctctaaggggccagaagcccttcaggagttccagcagacagccaccactaccatggtgtaccaacagggtgggaactgcatatacacagacagcactgaagtggctgggtctttgcttgaacttgcctgtccagtcaccaccagtgttcagccacaaacccagcaagaacagcagatccaggttcagcagccgcagcaggttcaggtccaggtgcaggtacagcagtctccgcaacaggtctcggctcagctctccccacaactcaccgttcaccagcctactgagcaacccatccaggtccaggtgcagatccaaggccaggcaccacagtcagcagccccctccattcagaccccgtctctgcagagtcccagtccctcgcagctgcaagcagctcagatccaggtgcagcacgtgcaagcagcccagcagatccaggctgcagaaatcccggaggagcacatcccacatcagcaaatccaggctcagctggtggctggccagtctcttgctggtggtcagcagatccaaatccagaccgtgggtgccctttccccaccaccatcccagcagggctcaccccgggaaggggagcggcgggttggcacggccagtgtcctccaaccagtgaagaagcgcaaagtggacatgcccatcactgtgtcctacgccatctcagggcagccggtggccaccgtgctggccattccacagggccagcagcagagttatgtgtctttgaggccagacttactgacagtagacagtgcccacctgtacagtgccactgggaccattactagccctacaggagaaacctggaccatccctgtttattctgcccagccccggggggaccctcagcagcagagcattacccacattgccattccccaggaagcctacaacgcagttcacgtcagtggctcacccacagccctggcagctgttaagctggaggatgacaaggagaagatggtgggcaccacatctgtagtgaaaaactcccatgaagaggtagtgcagacccttgcaaactctctctttccagcacagttcatgaatggcaacatccacattccagtggctgtgcaggctgtggcaggcacgtaccagaatacggctcaaactgtccatatatgggacccccaacagcagccgcagcagcaaactccccaggaacagacaccaccaccacagcagcagcagcagcaactccaagttacttgttcagctcaaactgtccaggttgctgaagttgaaccacagtcacagccacagccttccccagaacttctgcttccaaattctttgaagccagaagaagggcttgaagtatggaaaaactgggcccagaccaagaatgctgaactagagaaggatgctcagaacagattggcacccattgggaggcgccaactgctgcgattccaggaagatctcatctcctctgctgtggcagagttgaattatgggctctgtctaatgacacgggaagctcgaaatggagaaggtgaaccctatgacccagatgtgctctactatattttcctgtgtattcaaaagtatctttttgaaaatggaagggtagatgacattttctccgatctttattatgttcggttcacggagtggctacatgaagttctgaaggatgttcagccccgggtcactccacttggctatgtcttgcccagccacgtgactgaggagatgctatgggagtgcaagcagcttggggctcactccccctccaccttgctgaccaccctcatgttctttaataccaagtacttcctattgaagacagtggaccagcacatgaagctggccttctccaaggtcttgcgacagacaaagaagaacccctctaatcccaaggataaaagcacgagtatccggtacttgaaggcccttggaatacaccagactggccagaaagttacagatgacatgtatgcagaacagacggaaaatccagagaatccattgagatgtcccatcaagctctatgatttctacctcttcaaatgcccccagagtgtgaaaggccggaatgacaccttttacctgacacctgagccagtggtggcccccaacagcccaatctggtactcagtccagcctatcagcagagagcagatgggacaaatgctgacgcggatcctggtgataagagaaattcaggaggccatcgcagtggccaatgcaagcactatgcactgagatgccttggccatggcacaagagaaaccagccaggaaaaaccagacagactttcacactaaagaagaggcctccatttttttttttcttttttttattggtgtagttacgaagcctttcaggctgcttctgtttaaaatataaaagaaaactttgccccctttgcatcttcataaacctgctgcggcagactcctcagccgatggtggctctgggtttccttgagtgtcatatgtcctagaaagttgctggctgactcttttttgtctggggcctggggaaagggcttggactgtgaaaagaaatgtggcccctttccatcttcaagagagatggaattaatgatggatggaccctggagggaatctccccagccgacttccactgggctgacagactttgctgaccacaggggaacgatgttcttttctttcttcatgatcagacataaacttagcatcttaatggaagaaaaatgaggggaacttcaattatgatttattaaagacaatttctattacaccctcctttatgacaagtgacattttagatgtaaaagtaaaaactttaccatgccttttttttttttgttggcctaacattgaggccttaaaacctgaggctcctgtgcctgatggaattcttgtaacatacacttgtgtatcatataaagataccactctgtttctcttatgtattcttactctagttgtttattaagaatgacaagcacgtcttttcaaaaaaaaaaaaaaaaaa

SEQ ID NO: 31694 - DNA, 3862 bp, Homo Sapiens
gctgagaggcgcgtactgtgcttgctttttgcagtacctgctgcggccgctttcggcatggaggaaatttatgcgaagtttgtgtcccagaaaatcagcaaaacccgctggcgaccgctgcctccgggaagtttacagaccgcggagacgttcgctacaggatcttgggacaatgaggaaaattatatttcactgtggtctattggagattttggaaacttggactctgatggagggtttgaaggagaccatcagttattgtgtgatatcagacaccatggtgatgtaatggatttacagttttttgaccaggaaagaattgtcgctgcttcatcaacaggatgtgtaacagttttccttcaccatccaaataaccagactctgtcagtcaaccagcagtggactacagctcactaccacacaggccctggcagtccttcctatagcagtgcaccatgtacaggtgttgtgtgcaacaacccagaaatcgttacagttggagaggatggtcgaataaatctcttcagagctgatcacaaggaagctgtaagaaccatagacaatgcagatagtagtacactccatgctgtaacctttcttcgaactcctgagattcttactgtaaattcaattggacagttgaaaatatgggatttcagacaacaaggaaatgagccttctcagatattgtcactgactggtgaccgagtgccactccactgtgttgatagacatcccaaccaacagcatgttgtagctactggtggccaagatggaatgttgagtatttgggatgttagacaaggtactatgcctgtatctctgctgaaggctcatgaagctgaaatgtgggaagttcactttcacccatccaacccagaacatctttttacctgctctgaagatggatccctctggcactgggatgcttccacagatgtacctgaaaagtcgtcactctttcaccaaggaggaagaagcagtacttttttgtctcatagcattagtaaccaagctaatgttcaccagtctgtcattagctcctggctcagcactgatcctgcaaaagaccgaattgaaatcacaagcttacttcccagtaggtctctgtctgtgaacactttggatgttttaggtccttgtcttgtttgtggaaccgatgcagaagcaatttatgttactagacatcttttttcgtagaagtactataattataagatttcagatagaacatgcaattagccttttgaaatccaacttctgtgcaaaattttagtatcagaaaatacgagatttgcaggggaaacatcagtaaactaccattaatgtcaatgcccagttttgacttttgttagcctgacactcccaaacagttgtagaatccgatagatgactgatggcaaaagattgtgaacatgtggaagaaaatcagtgggattctggtgctgatgaataggttgccttcagagtattattgacagacagcttgtggaactaattctttatttttgatgttgtgggaattaacacatcaatggtggttatgggaactaccaatgggttcctacaatttttatcagtagtatgtggcatatacaccttcctagtggcagttgccaatgttaatgattattctttttattgcaagtatttcctatgatccttccacactttatttccttaataataataaactttttcagaaagaattgagtagagcaaaaatgacaaagatgtgtagctgtgttcaatttttttttttttttttttttgaggcagagtcttgctctgctggagtgcggtggtgcaatctcggctcactgcaacctccacctcccaggttcaagcaattctcctgcctcagtctcctgagtagctggaactacaggtgtgcgccaccacgcccagctaatttttgtaattttagtagagacagagtttcaccatgttggccaggatggtctcgatctcttgacctcatgatccacccgcctcgacctcccaaagtgctgtgattacaggtgtgagccactgcacccggcctgaaatttttttaaggtgaaaatgttttgacaagttcctttttcagaataggtttttgagcagaactctttcagcttgttagacccaactttgcttttgtttagcttcacagcatagctgaaagttgccaaactggacattgtgcaataaagtagaattctatattgataagcaaactatttccaaactaaaaatgtgatagataaaagtgtgattaatcaaatgatatgatcagagtaaagaattttgccattttgatccttttactttgttttagccacctatagtgttaccaaccatctttatccttgtctgcagggataataatgaactaatgtagtgttttaagataatttaatgatactatctttccaaactttgttagattttaaatgtattattgacctgagaccttaatgacaaatcactgctattagacaattgaagtgttcatttactttgtaattccaataatcatagttatggaattatggtaaggttttgcttttctgtcctaataaatatatatattttttgagatggagttttgctcttgttgctgaggctggagtgaaatggcatgatctcagctcactgcaacctccgtctcttaggttcaagcaattctcctgcctcagcctcccgagtagctgggattacaggtgctcaccaccacacccagctaatttttgtatttttagtagagatggggtttcactgtgttggccaggctggtcttgaactgacctcatgatccacctgcctcagcctcccaaaatgctgggattacaggcttgagccactgctcccggctgatttttgtattagtagagacgacagggtttcaccatgttggccagggctggtctcgaactcctgaccacaggtaatcagcccgcctcggcctcccaaagtgctgggattacaggcgtgagccacttagtatttgtaaccataagagaaagtatattttaacagcattacatttcatgccaattgacaagttttgccaattttaataagaaactaagctttatgtaatgtaacaccgtaatttatgaatttgttcattgtcactgcctttattcatgaaactgtcaaatagagtgtctttcaagggttgcaggatcttagagatagaaagtaccttggtgatcatctccagcctaaatttcatcatcccttctatggtattcccaacaaattatcatccaacctatacttaaaaacatatggtggccaggcatggtggctcacgcctgtaatgctagcactttgggaggccgaggtgggtgaagcacctgaggtcaagagttcgagatcagcctggccaacatggcgaaaccccgtctccactaaaaatgcaaaaaaaaaattaaccgggcgtggtggcaggcatctataatcccagctacttgggaggctgaggcaggagaattgctcaaacccgggaggcagaggttgcagtgacccaagatcgtgccacttcactccagcctgggcaaaagagcaaaacgccatctcaaaaaatatacatatataaggagataaagtttcccattttccaatacagtttcacatttgaacagccctaattgatacaactttatggcagggttttagtgtgtgagtgggatccaaaacactcaatcctgtaaaagggtacagtcctattgtatgttaacacactgatgatgtgagcctgtgagatgagccaatcaccagttgttatgttcgaatctgctttgtgttgggacgctttaatgtcagggtttcactaaataaatgaattttcatatactgaaaaaaaaaaaaaaaa

SEQ ID NO: 31695 - DNA, 8637 bp, Homo Sapiens
gaggcggtggcggcggaggcggcaccgattgctgtgtcggccccagtgcggccgaagtcgcggtagagcgtagccccacgcccctcccccgtccgcgccctccctctttccctggggatggagaaggcgacggttccggtggcggcggcgacggctgcagaaggagaagggagccccccggcggtggcggctgtggcgggcccccccgcggcggcggaggtcggcggcggcgttggcggcagcagcagagctcgctcggcctcgtctcctcgtgggatggtgcgagtctgcgacctgctcctgaagaagaagccgccgcagcagcagcaccacaaggccaagcgtaaccggacttgccgaccccccagcagcagcgaaagcagcagcgacagcgacaacagcggcggcggtggaggcggcggtggaggcggaggtggcggcggcggcaccagcagtaacaacagcgaggaagaagaggacgacgacgacgaggaagaggaggtttctgaggtggagtctttcattttggatcaggatgatttggaaaatccaatgctggaaacagcttccaagttgctcttatcaggtactgctgatggtgcagacctcaggacagtagatccagaaacacaggctagactggaagctttactagaagctgcaggaataggaaaattgtccacggctgatggtaaagcctttgcagatcctgaagtacttcggaggttgacatcgtctgttagttgtgcgttggatgaagctgctgctgcacttacccgtatgagagctgaaagcacagcaaatgcagggcagtcggacaaccgcagtttggcagaagcctgttcagaaggagatgtaaatgctgtgcgaaagttactcattgaagggcgaagtgtaaatgaacacacagaggaaggggagagcctcctttgtttagcttgttctgctggatactatgagcttgcacaggttttgttggcaatgcatgcaaatgtggaagataggggaatcaaaggtgacattacacctttaatggctgctgctaatggaggacatgtcaaaattgtgaagttgctgctagctcataaagcagatgttaatgcacagtcttcaacaggcaatacagcacttacatatgcttgtgctggaggctatgtagatgttgtaaaggtgctcttggaatccggtgctagtattgaggaccataatgaaaatggtcatacccctcttatggaagctggaagtgctggacatgtggaagtagccagattgctgctagaaaatggggctggcattaatacgcattctaatgaatttaaagagagtgcccttaccttagcttgttacaaaggacacttagagatggtgcgatttcttttggaagcaggcgcggatcaagagcataaaacagatgaaatgcacactgctctgatggaggcttgcatggatggccatgttgaagtagctaggttacttcttgacagcggtgcccaagtgaacatgcctgctgattcatttgagtcaccattaactttggctgcatgtggtgggcatgtggaacttgcggctttacttattgaaagaggagctagcctggaagaggtcaatgatgaaggttatacaccattgatggaagcagctcgagaaggacatgaagaaatggtggcattacttcttggtcaaggagcaaatatcaatgcacagacagaagaaactcaagaaactgccttgactctggcttgctgtggaggctttctggaagtggcagactttctaattaaggcaggagccgatatagaactagggtgttctacccctttaatggaagctgctcaagagggtcatttggagttagttaaatacttattagctgcaggagctaacgttcatgcaacaacagcaacaggggatacagcactaacatatgcctgtgaaaatggtcatactgatgtagcagatgtcttacttcaggcaggcgcagatctggaacatgaatctgaaggtggaagaactcctttaatgaaagctgcaagagctggtcatgtttgtactgttcagttcttaattagtaaaggagcgaatgtgaatagaaccacagctaataatgaccatactgtactgtccctggcttgtgcagggggtcatctggcagtggtggaactacttttggctcatggggcagatcctactcaccgtttgaaagatggctcaactatgttgatagaagcagcaaaaggtggccatacaagtgttgtttgctatctcttggattatcctaataacttgctttcagcccctccaccagatgtcactcagttaactcccccatcccacgatttaaatagggctcctcgtgtaccagttcaagcactgcccatggttgttccacctcaggagcctgacaaaccacctgccaatgttgccaccactcttcccatcaggaataaagcagtcagtggaagagcatctgcaatgtcaaacactcctacccacagtattgctgcatccatttcccaacctcagactccaactccaagtcctatcatctctccttcagccatgcttcctatctaccctgccattgatattgatgcacagactgagagtaatcatgacacggcgctaacacttgcctgtgctggtggccacgaggaactggtacaaacactgctagagagaggagctagtatagagcaccgagacaagaaaggttttactccactcatcttggctgccacagctggtcatgttggtgttgtggaaatattgctggacaatggtgcagacattgaagcccagtctgaaagaaccaaggacacaccactctccttggcttgttctgggggaagacaggaggtggtggagctattgttagctcgaggggcaaataaagagcacaggaatgtttctgattacacacctctaagtctggctgcttctggtggctatgtgaacatcatcaaaatattactaaatgcaggagctgagattaactctagaactggtagcaaattgggcatctctcctctgatgttagcagctatgaatgggcatacagctgctgttaagctcctgttagacatgggctctgacataaatgctcagatagaaaccaatcggaacactgcccttactttagcctgcttccaaggaagaactgaagtggttagtcttctgcttgatagaaaagcaaatgttgaacacagagctaagactggtctcacaccactaatggaagctgcctctggtggatatgcggaggtgggccgagttcttttggataaaggtgctgatgttaatgcccctccagttccctcctcaagagatacagctttaaccatagcagcagataaagggcattacaaattctgtgagcttcttattggcaggggagctcatattgatgtacgtaacaagaaggggaacactccattgtggctagcagcaaatggtggacacctcgatgtggttcagttactggtgcaagcaggtgcagatgtggatgcagcagataaccgcaagataactcctcttatggcagcatttagaaagggtcatgtgaaggtggtgcgctacttagtcaaagaagtcaatcagtttccatcagattctgaatgtatgagatacatagcaaccatcactgataaggagatgctgaagaagtgtcatctttgtatggagtcaatagtacaagccaaagatagacaggctgctgaagcaaacaaaaacgccagcattttgttagaggagttagacttggaaaagttaagggaagaaagtcggaggctggctttggctgcgaaaagagaaaaaagaaaagagaagagaaggaagaaaaaggaagaacaaagaaggaaactagaagaaattgaagccaaaaataaagagaactttgaactccaagctgctcaagaaaaagaaaagcttaaagttgaagatgagcctgaagtcttgacagaacctccaagtgccacaaccactactaccataggtatatctgcaacctggacaactttggcaggttctcatggtaaaagaaataataccataactacaaccagttcaaagaggaaaaacaggaaaaataaaattactccagaaaacgttcaaattatatttgatgatccactaccaatttcatacagtcagccagagaaggtgaatggagagtccaagagcagcagtaccagcgagagtggggacagtgataacatgaggatttccagctgcagcgatgaaagtagtaacagcaacagcagtcgtaagagtgacaatcattcaccagctgtggtcactaccactgtgagcagcaaaaagcagccatcagttcttgttacatttccaaaggaagagagaaaatctgtttctggcaaggcttcaataaaattgtcagaaactatcagtgaagggaccagtaattctctatctacttgtacaaaatctggtccatctcccctttcttctccaaatgggaagttaacagtagcaagtcctaagcgtgggcaaaagagggaagaaggatggaaagaagttgtaagaaggtcaaagaaagtatctgttccatcaactgtgatatccagagtgattggaagaggaggctgtaatatcaatgctattcgggagtttactggtgcacacatagatattgataaacagaaagacaagactggagaccggataatcactataaggggtggcactgaatcaacaagacaagcaactcaattgattaatgctttgatcaaggatccagacaaagaaattgatgaacttattccaaagaatcgtttgaaaagctcctcagcaaattccaaaatagggtcatcagcacctaccaccactgctgctaacacttccttaatgggaattaaaatgacaactgtagctctgtcatcaacatctcaaactgccacagcactcactgtgcctgcaatttcttctgcatccactcacaaaaccattaagaacccagtgaataatgtgaggcctggttttccagtttctcttccattagcatatcctcctccacagtttgcacatgctttgcttgctgctcagactttccagcagatccgtccaccaaggttgcccatgacccactttggaggtacttttccaccagctcaatccacttggggtccgtttcctgtcaggcctttgagccctgccagagctactaactcgcctaagcctcacatggtgcctcgccatagcaatcagaatagcagtggttctcaggtgaattcagcaggttctttaacttcaagcccaacaactacaaccagttcatcagcttcaacggtgcctggtacatctacaaatggcagtccaagttcaccttctgtccgaaggcagctttttgtcacagttgtgaagacatccaatgccaccacaacaacagtcacaaccacggcaagcaacaacaacactgcacccacaaatgccacatatcctatgcctactgccaaagaacactatccagtatcatccccatcttccccatcaccaccagcccagccaggaggggtttctagaaacagccctttggattgtggatcagcatctccaaataaagtggcatcttcctccgaacaggaagcaggtagtccaccagtagtagaaacaacaaacactagacctccaaacagcagcagttcttctgggagttcatcagctcattctaatcagcaacaacctccgggatctgtttctcaggaaccaagaccacctcttcagcagtctcaggttcctcccccggaagttagaatgactgttcctcctttagcaacaagttctgctccagtggcggtgccttctactgccccagtgacttaccctatgcctcagacaccaatgggatgcccccagcctactcctaaaatggaaacccctgctattagaccaccccctcatggcacaactgcccctcacaagaattcagcttcagtgcaaaattcatctgttgcagtcctcagtgtcaatcacattaaaagacctcacagtgttccctcttctgtccagctaccttcgaccttaagtacacaaagtgcttgtcagaattcagtacatccagcaaataagcctattgctcccaatttcagtgcccccttaccatttgggccctttagcacattgtttgaaaacagccctacttctgctcatgccttctggggaggatctgttgtttcatctcagtcaacaccagaatctatgctatcaggaaaatcctcatatttgccaaattcagatcctttacatcagtctgatacttccaaagctccaggttttagaccaccattacagagacctgctccaagtccctcaggtattgtcaatatggactcgccatatggttctgtaacaccttcttcaacacatttgggaaactttgcttcaaacatttcaggaggtcagatgtacggacctggggcaccccttggaggagcacccgcagctgctaactttaacagacaacatttttccccgcttagtttgttgactccgtgttcatcagcatcaaatgattcttctgcacagtcagtatcctcgggagttcgtgcaccatctcctgccccatcatcagtaccgttagggtcagaaaagcccagcaatgtgtctcaggacaggaaagttccagtccctattgggactgaacgttctgcacgtatcaggcaaactggaacgtcagctccatctgttattgggagcaatttgtctacatcagtaggacatagtggcatctggtcctttgaagggattggtggcaatcaagacaaagtagactggtgtaaccctgggatgggaaatcctatgatccacagaccgatgtctgacccaggagtattttcacaacatcaagcaatggagcgagatagtacaggaattgtaactccttctggtacattccatcagcatgttcctgcaggctacatggactttcctaaagttgggggtatgcctttttctgtgtatgggaatgcaatgattcctccagtagcacctatccctgatggtgctggaggacccatatttaatggccctcatgctgcagacccttcttggaactcactgataaagatggtttccagctccacggaaaataatggccctcaaacggtgtggactggaccctgggcacctcacatgaacagtgtgcatatgaaccagcttggctgatgaggatcagcttgttagcctgcagattccttttcatttggaggaaatcacaagtggccgaaaaaaaaaattatgctcccaaatcattctactgatgtgcttgactgaagtgtgtaggctttttgcagaagatcttactaactgacctattttctgtgaacatttgtgactgcccattccccatcatcatccgttttaccttagttagcatttttcttatcatttttctttttttctttccctcttcccctttggacataactttctgttgaagctgttctttggctggttggttttagtactgtaaactgcttctgagcaaacacggaaatttagcaaaattatgtaaacttgatcctgaagttttagaatggcaaataaatgtacaattgtttacataacagaaaaggctaagcagaaagtaaatttcaatatgtcagtatagaggctctactttatgtagacttaaattaatgtgagatatgtaccttcatattcagaaatctggatgtttccttcatacattaaactattaataagcataacttttctactggtgtaatttaagtataaagtaaaataatgggcattatcattggatgtttccccacattggcttttaaaatacccatcttgctttctttttggtttatttgtagcaaggcacatatagaagaagaaatttctggcttttccatgttgttttattaccttttctcacttttaaaactaatacagacttatctcctcactcctttttctctccttacctttaccactaataccagtaaaattatctttctgatagtgaaaaggttctgtcaagattttcactgtaatggctgctacagagatggaccatcttcatcatcaccagtggtttcttctaattataaaatgtttaaactttctgagaatttaaaaagccaccactgttcccagtcagcatatacaagctcttaatattctgtttattaaataattcaatgtactattttatattggatgatattgattcttaacattggcttttcagtcatcaacagtcaacataaaaatttcaattttcagtaatttagtggaaaatatcttatttcttttttcaattttaaaggcttcctgcttttttacccttgtatattatcagtgaaaaggatcaacagttaatttgagccaagtaataaaagaaattctgcatttgtcacgaagacaatttatggtagacagataaatacacagattacagtgtaaagtctccatttaacctgtttataaaagatacaaggccacactaaactactcagtgggatttatatattccatccacttgaaacaataaacagtaatgtatccaagaagattatgtgtcctaccctgtctcatggaaaaattaattatatggttgaaatgtaaaagaaagtaagcataaaaatcgagtaatgtataaaaaaaaaaaaaaaa

SEQ ID NO: 31696 - DNA, 4980 bp, Homo Sapiens
cagacccggaagtggatcgtgcggagcaagcatcacaccatggcgtatgagtgttcctctgtgtagactcaacctgcgcctcgccgtcccccattcgcacacccgatgcccgggggtcgctacggacttaaaatctccgcaccgcaccctccacctcagaaacgttcctggatccgaacactgccccctgacgacctagagagatcccggctcccagcccactgagtggcttcagcctcgctggcgcctgccccgggccccgcctacaggggacccagctcttcttgcagccactggaagctgatcacctggagtgaagacctcacacgaagaagtctggaagaagaggaagaggaaagaaaaggagtcagggatggcccttactcaggtacggttgacatttagggatgtggccatagaattctctcaggaggagtggaaatgcctggaccctgctcagaggatcttatacagggacgtgatgttggagaactactggaaccttgtttctctgggactgtgtcattttgatatgaatattatctccatgttggaggaagggaaagagccctggactgtgaagagctgtgtgaaaatagcaagaaaaccaagaacgccggaatgtgtcaaaggcgtggtcacagatatccctcctaaatgtacaatcaaggatttgctaccaaaagagaagagcagtacagaagcagtattccacacagtggtgttggaaagacacgaaagccctgacattgaagacttttccttcaaggaaccccagaaaaatgtgcatgattttgagtgtcaatggagagatgacacaggaaattacaagggagtgcttatggcccagaaagaaggtaaaagagatcaacgcgacagaagagacatagaaaacaagcttatgaacaatcagcttggagtaagctttcattctcatctgcctgaactgcagctatttcaaggtgaggggaaaatgtatgaatgtaatcaagttgagaagtctaccaacaatggttcctcagtgtcaccacttcaacaaattccttctagtgtccaaacccacaggtctaaaaaatatcatgaacttaaccatttttcattactcacacaaagacgaaaagcaaacagttgtggaaaaccttataaatgtaatgaatgtggcaaggcgttcactcagaattcgaaccttacaagtcataggagaattcatagtggagagaagccttacaaatgcagtgagtgcggcaaaacctttactgttcgttcaaatctaactattcatcaggtcatccatactggagaaaaaccttacaaatgtcatgagtgtggcaaggtcttcaggcacaattcataccttgcaactcatcggcgaattcatactggagagaaaccttacaagtgtaatgagtgtggaaaagcctttagaggacattcaaacctaactacccatcagttaattcatactggagaaaaaccgttcaaatgtaatgaatgtggcaagctcttcactcaaaattcacaccttataagtcattggagaattcacactggagagaaaccttacaagtgcaatgagtgcggcaaagcctttagtgttcgttcaagcctagcaatccatcagacaatccacactggagaaaaaccttacaaatgtaatgaatgtggcaaagtctttaggtacaattcatacctcggaaggcatcggagagttcatactggtgagaaaccttacaagtgtaatgaatgtggcaaagccttcagtatgcattcaaacctagctacccatcaggtcatccatactggaacaaaacctttcaaatgcaatgaatgcagcaaggttttcactcaaaattcacaacttgcaaatcatcgaagaattcatactggagagaaaccttacaagtgtaatgagtgtgggaaagccttcagtgttcgttcaagtctgactacccatcaggcaatccattctggagagaaaccttacaaatgtattgaatgtggcaagagcttcactcaaaaatcacaccttagaagtcatcggggaattcattctggagagaaaccttacaagtgtaatgaatgtggtaaagtcttcgctcaaacatcacaacttgcaaggcattggagagttcatactggagaaaaaccttacaagtgtaatgactgtggcagagcctttagtgatcgttcaagcctaacttttcatcaggcaatacatactggagagaaaccttacaaatgtcatgaatgcggcaaggtttttaggcacaattcataccttgcaactcatcggcgaattcatactggagagaaaccttacaagtgtaatgagtgtgggaaagcctttagtatgcattcaaacctaactacccataaggtcatccatactggagagaagccttacaaatgtaatcaatgtggcaaggtcttcactcagaactcacaccttgcaaatcatcaaaggactcacaccggagagaaaccttaccgatgcaatgagtgtgggaaagccttcagtgttcgttcaagcctaaccacccatcaggcaatccatactgggaaaaaaccttacaaatgtaatgaatgtggcaaggtctttactcaaaatgctcacctggcaaatcaccgaagaattcatactggggagaaaccttacaggtgtacagagtgtgggaaagcctttagggtaagatcaagtctaactacccatatggcaatccacactggagaaaagcgttacaaatgtaatgagtgtggcaaggtcttcaggcagagttcaaatcttgcaagtcatcacagaatgcataccggagagaaaccttacaaatgagtgtggtgaggtcattaggtacaattcactcctttcacatcagttaatttcattcttgacagaatccttacaaatgtagtgacagtggccaatccctcatgagttgaagcattaatagatatgagaggccataagcaagagacatcatgtaaacatatgtggcagagggtctatccaggcctcgcaggttactaggcatcaagatttatatctttgatgaaacgaaacaaatgtaatatgcatcctgaggccattacccagtgaccgatggtaagtgaggattcctaggaggaataacagtctctggtttccctgtttgcctttgatattatacactgtagaatactcacaagtccaaatatgctaaaaattatatatttttaactcacatacgaaaaggttgcaggatatttgtaggcagtcagttaccttcaccttatgaaatgtttcactgagttatttgaggttttttggaaagcctactattgcgtttcaatgtgaactttgaaatcttattgtgcatccttacacaccttccatggtgctttcttggaaagatcattgggatggaaggatcattgattgggtgaagatcattgattaggtgaaggattatttctatccaatttgtgaagaaggaggactttgcttttaaaattaagtatcatctgaattagcatttgggagtggcgaaaaacaatgtaaaactatgatgtcactcaccattctgataatgttcagggtgcctttctcctaccaggagagtactgtggcttagaggaaagaaatggtctatcaactgaacatgaaatggagcaggccaagaccttaggacattgggatttttgtgggaggagagtaataggtaattagacactgattgtgtggtagaaatactgcaggggaaaaggtcgccctcttatgcatcaaagagcaatacctgttgtttagcaaagagtgatgaaaaattgatcttgttttgaaattgaagagagaggccaggcgcggtggctcacacctgtaatcccagcactttgggaggctgaggcaggtggatcacctgaggtcgggagttcgagaccagcctgaccaacatggagaaaccccaattgtactaaaaatacaaaattagccgggcgtggtggcaggtgcctgtaatcccagctacttgggaggctgaggcaggagagtgcttgaacccaggaggcggaggttgtggtgagccaagatcatgccactgcactccagcctgggcaacaagaacaaaactccatctaaagaagaaaaagaaaaactgaagagagagtagttgtcagagtgaagagtttaatcaacagaagtagagtaacatattctttagtagaactcacattatctgcttgaagcacattttgctaatgttttattcagaatgtatcatagatataatgttttaactaataaaatagaatggtttttctctatgaatgaatcacattctttctgccaacatagttttatcctgtctcagtaggatactccataacacaatagcagtacaccactaggctcttaaacgatcaagaacaatttttttcatggtgaaatcaaataacgcagttttggaaacctataaccgcattttgtgcttgaattacgtgccccacactgtggcttaggatacttattggggtataatgaaaatcttactgaaagttaatttcacattcttacaccccaaaatctgcattgccattgatgcatatgcaccacattattatatttccacatcagtttcttgtgtgccaaataagacccatgctatgcatcttggtttccatgaagtgaaaatacatagtaagaatgcgagaaatataaatcaggccaggcacggtggctcacacctgtaatcccagtactttgggaggccaaggcaagcagatcacctgaagtcaggagagaccagcctggccagcatagtgaaaccccatctctactaaaaatacaaacttagctgggcttagtggtgcatgcctgtagtctcagctacttgggaggctgaggcaggagaattgcttgaatccaagaggcagaggttctattaatggagatcattccattacactccagcctgggcaccaggaacgaaactcgttctcaaaaaacaaaac

SEQ ID NO: 31697 - DNA, 4845 bp, Homo Sapiens
gagaatcgtgagggtggccaagtccagtttggacctctgacccttgggcagcacctcccgacagccggctcgggacccaactctgcgagccaggtgaaaatgagttcttcagtaagaagaaaaggcaagccaggcaaaggaggtggaaaagggtcttctagaggaggaagaggaggcaggagtcacgccagtaaatctcatgggagtggtggcggtggcggtggtggtggtggtggaggtggcggcaacagaaaggcctccagtagaatatgggatgatggagatgacttttgtatcttcagtgaatcaaggcgcccttccagacctagcaacagtaacataagcaaaggagagtcacgcccaaaatggaaacccaaagccaaagtaccccttcagactctacatatgacttctgagaatcaagagaaagtgaaagctcttctccgagacctgcaagaacaagatgctgatgctggatctgaaagaggcctttctggggaggaggaagatgatgagcctgattgctgtaacgatgagcggtactggccagctggacaggaaccttccctcgttcccgacttggatcctttggaatatgctggcttagcctcagtggagccttatgttccagaatttacagtctccccatttgcagtgcaaaaactttccaggtatggtttcaatactgaacgctgtcaagcggtcctgaggatgtgtgatggagatgtgggagcatcactagagcatctccttacccagtgtttttcagagacatttggagagaggatgaagatctctgaggcagtcaaccagataagcttggatgagtgtatggaacagcgacaggaagaggcatttgctctcaagtccatctgtggagaaaaatttatagaaagaattcagaacagagtctggaccattgggttagaactggagtatctgacaagtagattccgcaaatccaagccaaaagaaagtaccaaaaatgtacaagagaattcacttgaaatctgtaaattttacctcaaaggaaattgtaaatttggatcaaaatgcagattcaaacatgaagtgcccccaaatcaaattgttggaagaatagaaagaagtgtagatgattctcatcttaatgctattgaagatgcatcttttttatatgaacttgaaattcgattttctaaagaccacaaatatccctaccaagctccgctcgtggcattttattccaccaatgagaacctacctctggcttgtcgtttacatatttctgagtttctttatgacaaggccttgacatttgcggaaacttcggaacctgtcgtatattctttgataacccttttagaggaagagtcggaaatagtcaagttactaacgaatacccaccacaagtatagtgaccctcctgtgaactttctgccagtaccctctaggaccagaataaataatcctgcctgtcataaaacagtgattccaaataattcttttgtttctaatcaaattccagaagttgaaaaagcatcagaatctgaggagtcagatgaggatgacggtcctgcacctgttatagtagagaatgaaagctatgtgaaccttaagaaaaagatttccaaaagatatgactggcaggcaaagtcagtacatgctgaaaatggtaaaatctgcaagcagttccgaatgaaacaggcttccagacagttccagtccattctgcaagagaggcaatcactccctgcttgggaagaaagagaaaccattcttaacttattgcgtaagcaccaggtggttgtcataagtggtatgactggatgtgggaaaaccacacaaattccgcagtttattctggatgattctctgaatggaccacctgagaaggtagccaacatcatctgtacccaaccccgacgaatctctgcaatctctgttgctgaacgcgttgctaaagaaagagcagagagggtgggtctgaccgtgggataccagattcggttagaaagtgtcaagtcctcagccaccagactgttatactgcaccacgggagtgctgctgagaaggctagaaggagatacagctctacaaggagtttcccatatcattgttgatgaagttcatgagaggacagaagaaagtgacttcttgctgctagttttgaaggacattgtatcgcagaggccaggtcttcaagttattttaatgagtgcaactctaaacgctgagcttttttcagactattttaattcctgccccgttattactataccaggtcgtacatttcctgttgatcaattttttttggaagatgcaattgctgtgacaaggtatgtattacaggatgggagcccatatatgcggtccatgaaacagatttcaaaggaaaagcttaaagcaaggcggaacagaactgcatttgaagaagtggaagaagacctaaggctctcccttcacctccaggatcaggattctgtcaaagatgcagtgccagatcaacagttagattttaagcagctcctggcccgctataaaggggttagcaagtcagtcatcaaaacaatgtccatcatggattttgaaaaggtgaatcttgaattaatagaggccttattagagtggattgtggatggaaagcactcctaccctccaggtgctatacttgtatttttaccaggactagcagaaatcaaaatgctttatgaacagctacagtctaattctcttttcaacaacagacgtagtaatcgatgtgttattcacccacttcattcatctttatccagtgaagagcagcaggctgtgtttgtaaaacctcctgcaggagtaactaagattataatttccaccaacattgctgagacatccataaccatcgatgatgttgtctatgttatcgattctgggaaaatgaaagaaaagagatatgatgccagcaaagggatggaaagtctagaggacacctttgtatctcaagctaatgctctacaaaggaaaggccgagcaggccgtgttgcatctggggtctgcttccatttattcactagccatcactacaatcaccagcttttaaaacaacagctaccagaaatacaaagagtgccattggaacagctgtgtctaagaattaaaattttagagatgtttagtgctcataatctccagtctgtgttctctcggctcattgaacctccacacaccgattctcttcgtgcctcaaaaatacgattacgagacttaggagcattaactccagatgaaagattgacccctcttgggtatcatttggcctctctgcccgtggatgtgagaattggcaaactaatgttgtttgggtctatcttccgctgtttggatcctgctctcaccattgctgccagtttggcttttaagtctccgtttgtatctccctgggataaaaaagaagaagctaaccagaaaaagctggaatttgcattcgcaaacagtgattatctggcccttctacaagcgtataagggatggcagctaagtacaaaagaaggcgtgcgtgcaagttataattactgcagacaaaacttcttgtctggaagagttctgcaggaaatggccagcctcaaacgacaattcacggaactgttatcggatatagggtttgcaagggaagggctcagagcaagggaaattgagaaaagggcccaaggaggagatggtgtcttagatgccacaggagaagaggcaaactcaaatgctgagaaccccaagctgatatcagcaatgctgtgtgctgctttgtatccaaatgtagtgcaggtgaaaagcccagaaggaaaatttcagaagaccagtactggagctgtcagaatgcaaccaaaatcagctgagttgaagtttgtcaccaagaacgatggatatgtacacattcacccttcatcagtgaactatcaggtgagacactttgacagcccctacctgttgtaccacgagaagataaaaactagtcgagtattcatccgagactgcagcatggtgtctgtgtacccgctggtcttgtttggaggaggccaagtgaatgtgcagcttcaaagaggagagttcgttgtctccctggatgatggttggatccgttttgtagctgcttcccatcaggtggctgaactggtaaaggagcttcgttgcgaacttgatcagcttctccaggataaaattaaaaacccaagcattgatctgtgtacgtgtcctcgaggatcccggatcatcagcacaattgtgaaacttgtcaccacacaataaaaagcagtcttagagagtgcttgctactcacctgcttctagctcacctgggaaataacagcagaacctctacctcgaactaaagacctattggggctggccctggtggaggagcccagggcatgaagcccaaggcagctgaggcagtgtatatacccttagggccatttctaacaaagccttggccactcccagcacaatttggagtgtcaagggtgagagcctaaaacccagcttgcctgtctttgtctctgtgattgttctggagtgaattaagttcacctgataactcaaaagtgaatgtataatacaattctgttttaatctgtgtattctttttctcctactttttactggggtgagaggggcatgaagagaaatacgccttttttttttttcttttcctgtcgccaaggctcgactgagagaagtcagaacagagaaggggaaaaaaaacccaaaattatgtgaacaagcaaaattaaaatttcattttaggctattggctactgagtaaacttgacttgtgaggggtttttatttttactcattaaaagtcaacttaaaaaaaaaaaaaaaaaaaaaa

SEQ ID NO: 31698 - DNA, 4841 bp, Homo Sapiens
tcatcgctgtcgggaacagcgatgactcgagcgggccgagagtgggtttcccgtccccgagccctccctcatctcggagatgccgcacttgtgagcgacagggcttcatttgaattttcgcacctcgcgagttgcggagcctgcatctctgaagctgcctcggtgaagagccacagcattattttttttctctttgggagagtagctgtctgggatttgagatcctatcttccctgcaaattaccaggttgcatcttcactgataggaatacatttcttcaccaaaggacatggatgaaaatgaaagcaaccagtctctgatgacaagcagccaatatcctaaagaagcagtaagaaaacgtcaaaattcagcacggaattccggagcaagtgattcttctaggttttctaggaaaagcttcaaactggattatagactagaagaagatgtaactaaatccaagaaaggaaaagatgggagatttgtgaatccgtggccaacatggaaaaacccctctattccaaatgttctcagatggctgataatggagaaagatcacagcagtgttccaagttctaaagaggaactagacaaagaactcccagtgcttaagccatattttatcactaaccctgaagaagctggagtgagggaagctggcttaagagtcacatggctgggacatgccacggtaatggtggaaatggatgagctcatatttctcacggatcccatctttagctctcgtgcttcaccatcgcagtacatgggtccaaagcgatttcgtcgttccccgtgcacaataagtgaactccctccaatagatgcggtccttatcagtcacaaccactatgaccatctggactacaattctgtcattgctttgaatgagcgatttggtaatgagttgagatggtttgtgcctttgggtctccttgactggatgcaaaaatgtggctgtgagaatgtgattgagttggactggtgggaggagaattgtgtccccggacatgataaggtcacttttgtctttacaccttcccagcactggtgtaaaaggactctaatggatgacaacaaggtgctatggggcagctggtctgtcttggggccttggaatcgattttttttcgcaggagatactggttattgccctgcttttgaagagataggaaaaagatttggaccttttgaccttgcagctattcccatcggagcttatgaaccgaggtggtttatgaaataccagcatgtagacccagaagaagctgtaaggattcacactgatgtccaaacaaagaaatctatggcaattcactggggaacttttgccttagcaaatgagcattacttagagcctccagtgaagctgaatgaagctctagagagatacggacttaacgctgaagatttttttgtcttgaagcatggagaatcaagatacctaaataataatgatgaaaacttttaataaataatttcctgaggtgaaaaaccgatattgaagattcatttttcttttttccattcttcaggaccttcggcaaggtgagtcaaggctctctacctacctagatgtttttcagaggcctacaaatacaagtatctttcttatatgcacattctaataaatgatgaaattcagtccaacatgcttattataaacatagcaattcttgctctatcaaattagcttatatgccaaatattaaatatggtttatttaggtaagcataaaaacataggggctatcatttttaaagacttgattttctctattgtggtaaaatatataaatacatatttgccattttaaacatttaccgttttaaccatttttaagtgtacagttctttcgcattaatgcacccatgaccaccattcacttaaatttttaaaagaacagtatattctttttttcctagagccttcagatgagagggaacagtatattctattgcacgtctacaattcccaaaagacctcttactttgggaggccaaggtgggtgggtcacttgaacccaggagtttgacatcaacctgggcaacatggtgacctcccgtctctctcggaaaaaaaaaaaagaaaaaagaaaaagccgggtgaggtggtgtgtacctgtagtcacaggtacttgggaggctgaggtgggaggatcacttgagcccaggagatagaggctgcagtgagctgtgatcgtaccactgcactccagcctgggcgacaaaatgagaccctgtctcaaaagaaagccctctccttagctgagcagaggaagggaaggagtgtggctatgagaatatgatttatgccattttctgtttttaaatctagaagatcttctaagcacaaatacagctacaatgaaatattttacagacaaaatgttaatagaccatattctttgaattaaatttgtttttaattttctctacacattttttttttcctggagtctcttagctctaaatatatcaatcagatttatatttttttttacctgattcagatgtcttacatttttatattaaatgaaccttaagcatgattcttttggtaagccagtatgaatgccagtggttggggggcgggggggggagtcagttgacataagatttagtcctaataaggactctgtattcacttgattattctgacccttcctaagggagggaggtggattagataccactggaggcccattctgtattcctaatccagtctcagcactttattcatacaaaataatcaaaataggttttctacaccaaatgctacccaggcagtgctctataatttatttgcacacctgtatgtgtggtgccatgttagccactaaatctgaacttttaccctgctttcatcatggatttttttgtgtaacctgaaacaagtcaccaatgctcactgtgcctgtttcctcatttgcaacaagaggataattccgacctacctctgaaaaatgtgtagattaaatgagtttttaaagcactttagaaaatataagggagaaaatgatttcttaagatatcactgcctaatatagacaggtatatttgaaagctaaatacaggttaatgcttttgataatgtattgttcctgttgcaaatttaagcattatatattaggagactaaacattgaaaactttcactgatttttaaattggagtaatagcctaaataagtgtaaataatctttatcaaaatttagtgtttatctacaaagatgcgaatcagtcaaggggaaatgtgtatgcaatgtgtgtgtatatgatgtatgcgaacatatgtgattttggggtactaaagcacaaaaaaatcccccataaaataaaccttcctgaaaagactgatcataaactttttcactccaagcagatgtgaatcaagatgttaggtttatggtgagttagctttgaggtgtgttgccctaatactagccagcgttgttgtagccatattccctgctgctgcacgccgaattgaaaatccatctcttacctcttctctatgaagcaagccaggtatgtcttgcttaagtatttcttctccatgaatggccttaacattattttgtattcacgtgtactgtttaactgagggtctcaaagcactttaaactgttgtgttctatttccactcgtctggcctgcctcatttttctaggcccttttgtaagctgtaattttttattaccactcatgttctttctacactgacactattcattaagaacatcaagcttcatctctgcttacagaatctcaccttattgagtgggttccactttatttttcatttgttatctacattttgaagggtttatgtgcaaagtgaaaacaaattttgaaaaataagacaaatccattctcttcttcaattcagtctaatatgcattgtagtgtcttttaatcagtcttatcctctaagtcaacttcattttcctctttgtgaatacccatagcaatatgtaagattttattgaagtttcctgtgataactgaggaacactttgctatgcctcactgcccaatagggtgggtcatcaattaggagaaatcccaaattataaaagccaacatatgccgtgacctacgtaggaaaagatgtatttgtgcatcttctttctgggtagttaaaaattactccctcttttctctagcattttgacatttcagactcaatgctctgatctctagggagtgtgattattcaaactaatgagaggacaagaagacacagttttagaatctactgctgctaaagcacattaaaaacaaatcctggtttttaatgtatgcatagtttcatatttaatgaatatgctttcattaaatagggaggtagatttgaaaaaactgttataaagaaatgtgccctttggggaatgaatacttttgttcatgtctagcccactgggaattttgttttcaccttatactgagtcctttttctaatgtaaaaatatttcttccaagtttgatttctgtatcagggtaacattgagaacacacatatttctgtttgaggatttgtgacttcctatggaaacagtcttgcatctatgtatttacaaatgaaatttaaagtattcttaaagctttgccttaaatactgcttgcatactgatttacttaatgctaagcatggcaggggttataaatttaaatactataagacctggctgaatcccagatgtatcaataaattgttatagtagcttatggaaaatgctattaaagataaattttcatacattgtatttttagtcaagtaaaatatggatgaaaattaataaagtactgtcaagggaaaaaataaaaaaaaaaaaaaaa

SEQ ID NO: 31699 - DNA, 3581 bp, Homo Sapiens
ggtagatgcggctgtgacagcagcaaagaatgacggccaagggcgacagcaggggctggccatgctgtaaaggggcttcttgggagggtccagcctcaggaatcaaggggaactcctgagccgagaattctgaagatctcctccctccctgaagctgtgggctgggccatcggaaaactttcagttttgtttccttgcctgcaagaaacgaaactcaaccgaaagcctgcagagagcagaacatggaaggagacttctcggtgtgcaggaactgtaaaagacatgtagtctctgccaacttcaccctccatgaggcttactgcctgcggttcctggtcctgtgtccggagtgtgaggagcctgtccccaaggaaaccatggaggagcactgcaagcttgagcaccagcaggccaatgagtgccaggagcgccctgttgagtgtaagttctgcaaactggacatgcagctcagcaagctggagctccacgagtcctactgtggcagccggacagagctctgccaaggctgtggccagttcatcatgcaccgcatgctcgcccagcacagagatgtctgtcgcagtgaacaggcccagctcgggaaaggggaaagaatttcagctcctgaaagggaaatctactgtcattattgcaaccaaatgattccagaaaataagtatttccaccatatgggtaaatgttgtccagactcagagtttaagaaacactttcctgttggaaatccagaaattcttccttcatctcttccaagtcaagctgctgaaaatcaaacttccacgatggagaaagatgttcgtccaaagacaagaagtataaacagatttcctcttcattctgaaagttcatcaaagaaagcaccaagaagcaaaaacaaaaccttggatccacttttgatgtcagagcccaagcccaggaccagctcccctagaggagataaagcagcctatgacattctgaggagatgttctcagtgtggcatcctgcttcccctgccgatcctaaatcaacatcaggagaaatgccggtggttagcttcatcaaaaggaaaacaagtgagaaatttcagctagatttggaaaaggaaaggtactacaaattcaaaagatttcacttttaacactggcattcctgcctacttgctgtggtggtcttgtgaaaggtgatgggttttattcgttgggctttaaaagaaaaggtttggcagaactaaaaacaaaactcacgtatcatctcaatagatacagaaaaggcttttgataaaattcaacttgacttcatgttaaaaaccctcaacaaaccaggcgtcgaaggaacatacctcaaaataataagagccatctatgacaaaaccacagccaacatcatactgaatgagcaaaagctggagcattactcttgagaagtagaacaaggcacttcagtcctattcaacatagtactggaagtcctcgccacagcaatcaggcaagagaaagaaataaaaggcaaccaaaaagaaaggaagtcgaagtatctctgtttgcagacgatatgattctatatctagaaaaccccatgatcttggcccaaaagctcctagatctgataaacaacttcagctaactttcaggagacaaaatcaatatacaaaatatggtagcatttttatacaccaacgacatccaagctgagagccaaatcaagaatgcaatcctattcacaattgccacaaaaagaataaaatacctaggaatacagctaaccagggagatgaaagatctctacaacaaaaattacaaaacactgctgaaagaaatcagagatgacacaaatggaaaaacattccatacttatggataggaagaatcaatattgttaaaatggccatactacccaaagcaatttatagattcaatgctattcctatcaaactaccaataacattcttcacagaatcagaaaaaaaaagcattaaaatttatttgaaaccaaaaaagagcccaaaaagccaaagcaatcctaagcaaaaagaacaaagctggaggcatcgcattacccaacttcaaactatactacagggctacagtaaccaaaactgcatgatactggtacaaaagcatggtgctggtacaaaagcagacacatagatcaatggaacagaatagagggcccagaaataaagctacacacctacaaccatctaatctttgacaaagttgacaaaaatacgcaatggggaaagaattccccattcagtaagtggtactgggataactagctagccatatgcagaggattgaaactgaaccacttccttacaccatatgcaaaaatcaactcaagatggattaaagacttaaatgtaaaaccccaaactataaaaactctggaagataacctaggcaataccattctggacataggaacggaaaaagatttcatgacaaagatcccaaaaataattgtaacgaaagcaaaaattgacaaatgggacatgattaaacagaattaccatttgactcagcaatcccattattggttatatacccaaaggaatctaaatcattctgtcataaagacatatatacacaaatgttcacggcagcactatacacaatcgcaaagtcagggaatcaaactaaatgtccatcagtggtagaaaggataaagaaaatgtggtggcagggagtggtggctcatgtctgtaatcccagcactttgggaggctgaggcgggtggttcacctgaggtcaggagtttgagaccagcctggccaacatggcgaaactccgtctccgctaaaaatacgaaaattagccaggcgtggtggcgagcacctgtcatcccagctacttgggaggcctaggcgtgagaatcgcttgaacctggaaggtggtggttgcagtgagccgagatcctgccactgcactccagcctgggcaaccaagcgagactctgccttaaaaaaaaaaaaaagaaaatgtggcacatatacaccatggaatactatgcagccataaaaaagaatgggatcatgtcctgtgcagcaacgtggatggagctggaagccattatcctaaatgaactcactcagaaacagaaaaccaaataccacatgttctcacttataagtagaagctaaacattgagtacacatggatacaaagaagggaaccgcagacactggggcctacctgaggtcggagcatggaaggagggtgaggatcaaaaaactacctatctggtactatgctttttatctggatgatgaaataatctgtacaacaaaccctggtgacatgcaatttacctatatagcaagcctacacatgtgcccctgaacctaaaaaaaaagttaaaagaaaaacgtttggattattttccctctttcgaacaaagacattggtttgcccaaggactacaaataaaccaacgggaaaaaagaaaggttccagttttgtctgaaaattctgattaagcctctgggccctacagcctggagaacctggagaatcctacacccacagaacccggctttgtccccaaagaataaaaacacctctctaaaaaaaaaaaaaaaa

SEQ ID NO: 31700 - DNA, 498 bp, Homo Sapiens
cgcagccaccgagacaccatgagagccctcacactcctcgccctattggccctggccgcactttgcatcgctggccaggcaggtgcgaagcccagcggtgcagagtccagcaaaggtgcagcctttgtgtccaagcaggagggcagcgaggtagtgaagagacccaggcgctacctgtatcaatggctgggagccccagtcccctacccggatcccctggagcccaggagggaggtgtgtgagctcaatccggactgtgacgagttggctgaccacatcggctttcaggaggcctatcggcgcttctacggcccggtctagggtgtcgctctgctggcctggccggcaaccccagttctgctcctctccaggcacccttctttcctcttccccttgcccttgccctgacctcccagccctatggatgtggggtccccatcatcccagctgctcccaaataaactccagaagaggaatctgaaaaaaaaaaaaaaaaaa

SEQ ID NO: 31701 - DNA, 3749 bp, Homo Sapiens
gtcgcgcttccggagaggcgcttccggtggcggcggcagcagcggctgtggtggttccgggtgtctttgtccccccggtgtcgctgccctggcccgcagccttttccccacgactctgaaagaggacagcgttcccaatgtcccagtttaagcgccagcggatcaacccgcttccagggggacgcaacttctcaggcacagcttcaacatctcttctgggccctcctcctggtttgctcactcctcctgtggccacagaactgtcccagaatgccaggcaccttcagggtggggagaaacagcgggtcttcactggtattgttaccagcttgcatgactactttggggttgtggatgaagaggtcttttttcagctaagtgtggtgaagggccgtctgccccagctgggtgagaaggtgctggtgaaggctgcatacaacccaggccaggcagtgccctggaatgctgtcaaggtgcaaacgctctccaaccagcccctactgaagtccccagcacctcctcttctgcatgtagcagccctgggccagaagcaagggatcctgggagctcagcctcagttgatcttccagcctcaccggattcccccactctttcctcagaagcctctgagtctcttccaaacatcccacacacttcacctgagccacctgaacagatttcctgcccggggccctcatggacggttggatcagggccgaagtgatgactatgactccaagaaacgcaaacagcgggctggtggagagccctggggtgctaagaagccaaggcatgacctgcctccttaccgggtccacctcactccttacactgtggacagccccatctgtgacttcctagaactccagcgccgttaccgcagcctcctggtcccctcagattttctgtccgtgcatctgagttggctatcagccttccccctgagccagcccttttccctccatcatccaagccggatccaggtctcttctgaaaaggaggcagctccagacgctggtgctgagcccatcactgcagacagtgaccccgcttatagttcgaaggtactgctgctctcttccccggggttggaggaattgtatcgttgttgcatgctctttgtggatgacatggctgagccaagggagacgccagagcatcctctgaagcagattaagtttttgctgggcaggaaagaagaggaggcagtgctggttgggggtgaatggtctccttccctggatggcctcgacccccaggctgacccgcaggtgctggtgcgtaccgccatccgctgtgcgcaggcccagactggcattgatttgagcggctgtaccaagtggtggcgctttgccgagtttcagtacctgcagccgggacccccccggcggcttcagacagtggtggtgtacctgccggatgtctggaccatcatgcctactttggaggagtgggaggccctgtgccagcagaaagctgcagaggcagctcccccaacccaggaggcacaaggggaaacggagcctactgaacaggcacctgatgccttggagcaagcagcagacacttctagacggaacgcagaaactccagaggccaccacacagcaggaaacggacactgatctcccagaggcccctccaccccccctagaacctgctgtcatcgcacgccctggctgtgtaaacctgtccctccatgggattgtggaggatcggaggccaaaggaaaggatctcttttgaggtgatggtgctggccgagctgtttctggagatgctccagagggattttggctatagagtttataagatgctactgagccttcctgaaaaggtcgtgtccccacctgaacctgagaaggaggaggcggccaaggaagaagccaccaaggaggaagaagccatcaaagaggaggtggtcaaggagcccaaggatgaggcacagaatgagggcccggctacagagtcagaggccccgctgaaggaggatgggcttttgcccaaaccactctcttctgggggagaggaagaagaaaaaccccggggcgaggcttctgaggacctgtgtgagatggccctggacccagaactgttgcttctgagggatgatggagaggaggagtttgcaggagcaaagctggaggattcggaggtccggtccgttgcctcaaaccagtcagagatggagttctcttcacttcaggacatgcccaaggagctggatccctctgctgtgctccccttagactgtctgcttgcttttgtgttctttgatgccaactggtgtggctacttgcaccggcgagacttagagaggatcctccttacccttgggatccggctcagtgcagagcaggccaagcagctggtcagcagggtggtgacccagaacatctgccagtaccggagccttcagtacagccgccaggagggcctggatggtggccttcccgaggaggtgctcttcggaaacctggacctgctgccccctcctgggaaaagcacgaagccaggtgctgcccccacagaacacaaagccttggtgtcccacaatggcagcctgattaacgtggggagcctgctgcagcgcgcggagcagcaggacagcggccggctctacctagagaacaagatccacacactggagctgaagctggaggagagccataaccgtttctcagccactgaagtaaccaataagacgctggcggcagagatgcaggagctgcgagtccggctggcggaggccgaggagaccgcccggacggcggagcgacagaagagccagctccagcggctgctgcaggagctccgcaggcgtctgacccccctgcagctggagatccagcgggtggtggaaaaggctgacagctgggtggagaaggaggagccggcacctagcaactgacggcctcgcacggaactgccatcctgtgagggcagcggtggcgcccggcaaagttggagcccttgcggtaccagaaagcagcgagagcgagacctgggagccagggcaggggtggctgaccccatgctcagcctctaggggacggcaggccatcaggctgggggctgtgctatgtgggatggatgtgtgaggaaccccggttccacttaacaactaaatacaacatcttttgcacccctagaatgtcattttgccctcaaccttggtatttctcctggggcccttttagtcttgtgctgactttctcctgtcctcttccagtttagaataagacaggggagaaaaaggcttttcgagtgtgggacaaggtctgatgtcagtgaacggaactgaagagcaagacatggagcctggctggggctaagcagccccctcctccggatggcacaggctctgctaggttccggacacaggcttctgggggaagggtctcccttggccatcacgggaatggagtccatgctagaaagagctcagtgttgggctgggtttgccagtagaacactgcgttccagtcaccccggtcttgccagaagaaaccagcacctctttcccgtggctcctgtgttcagaatgtggtattggctctggcccagccttctcccctgttacccataattcttgcctctttccataatccgtggtttcagtttgactttgtatataaagttggggttttttttttttttttttggcttgttttttaaataaaccaaagtcaaaaacaaaaaaaaaaaaaaaaaaaaaaaaaaaaaaaaaaaaaaaaaaaaaaaaaaaaaa

SEQ ID NO: 31702 - DNA, 1700 bp, Homo Sapiens
gagggaaggcaggaaggaggcagccgaaggccgagctgggtggctggaccgggtgctggctgcgccgcgctgctttcggctcccacggcctctcccatgcgctgagggagcccggctgggccgggccggcggcgggaggggaggctcctctccatggtccagaagaccagcatgtcccggggcccttacccaccctcccaggagatccccatggaggtcttcgaccccagcccgcagggcaaatacagcaagaggaaagggcgattcaaacggtcagatgggagcacgtcctcggataccacatccaacagctttgtccgccagggctcagcggagtcctacaccagccgtccatcagactctgatgtatctctggaggaggaccgggaagccttaaggaaggaagcagagcgccaggcattagcgcagctcgagaaggccaagaccaagccagtggcatttgctgtgcggacaaatgttggctacaatccgtctccaggggatgaggtgcctgtgcagggagtggccatcaccttcgagcccaaagacttcctgcacatcaaggagaaatacaataatgactggtggatcgggcggctggtgaaggagggctgtgaggttggcttcattcccagccccgtcaaactggacagccttcgcctgctgcaggaacagaagctgcgccagaaccgcctcggctccagcaaatcaggcgataactccagttccagtctgggagatgtggtgactggcacccgccgccccacaccccctgccagtgccaaacagaagcagaagtcgacagagcatgtgcccccctatgacgtggtgccttccatgaggcccatcatcctggtgggaccgtcgctcaagggctacgaggttacagacatgatgcagaaagctttatttgacttcttgaagcatcggtttgatggcaggatctccatcactcgtgtgacggcagatatttccctggctaagcgctcagttctcaacaaccccagcaaacacatcatcattgagcgctccaacacacgctccagcctggctgaggtgcagagtgaaatcgagcgaatcttcgagctggcccggacccttcagttggtcgctctggatgctgacaccatcaatcacccagcccagctgtccaagacctcgctggcccccatcattgtttacatcaagatcacctctcccaaggtacttcaaaggctcatcaagtcccgaggaaagtctcagtccaaacacctcaatgtccaaatagcggcctcggaaaagctggcacagtgcccccctgaaatgtttgacatcatcctggatgagaaccaattggaggatgcctgcgagcatctggcggagtacttggaagcctattggaaggccacacacccgcccagcagcacgccacccaatccgctgctgaaccgcaccatggctaccgcagccctggctgccagccctgcccctgtctccaacctccaggtacaggtgctcacctcgctcaggagaaacctcggcttctggggcgggctggagtcctcacagcggggcagtgtggtgccccaggagcaggaacatgccatgtagtgggcgccctgcccgtcttccctcctgctctggggtcggaactggagtgcagggaacatggaggaggaagggaagagctttattttgtaaaaaaataagatgagcggcaa

SEQ ID NO: 31703 - DNA, 3794 bp, Homo Sapiens
gactcagatctcacctcctaccactcccctaggagagctgggggccactgtttcctggattatcctaaaagcttctgaggccgtgaggacttggcagcatccctgctccctccttcacctccccctttggcactgcctgtcacctcctttataaagcctggctcttttatcaccgccacttggccctcactgccgccgccagctctgggctccatggactggtcccgtctgaggtgcccctgaccgtccctgccctcaccccaccccggatcccggcaatgctaaccgctgtctgcggctctctgggcagccagcacacggaagcgccgcacgcctccccgccgcgcctcgacctgcagcctctccaaacttaccagggccacacgagccctgaggccggggactacccctccccgctgcagcctggagagctgcagagcctcccgctgggcccggaggtggacttctcgcagggctatgagctgccaggggcctcctcgcgggtaacctgcgaggacctggaaagcgacagtcccttggccccgggccccttttccaagctcctgcagccggacatgtcacaccattatgaatcgtggttcaggccgactcacccaggcgcggaggatggctcgtggtgggaccttcatccgggcaccagctggatggacctcccccacactcagggcgcgctgacctcacctggccacccgggggcgcttcaggcgggcttggggggctacgtcggagaccaccagctttgtgccccgccaccccacccgcatgcgcaccacctccttccagctgccggagggcagcatctcctagggccgcccgacggggctaaggccttggaagtagccgccccggagtctcaagggctggattccagcctggacggggcggcgcgtcccaaaggctcccggcggtcggtgccccgcagctcaggccagaccgtctgtcgctgccccaactgtctggaggcggagcgactgggggctccatgtgggcccgatgggggcaagaagaagcatttgcacaactgccacatcccgggctgcgggaaagcctacgccaagacgtcgcacctgaaggcgcacctgcgctggcacagcggcgaccgtcccttcgtgtgcaactggctcttctgcggcaagcgcttcacgcgctcggacgagctgcagcgccacctccagacccacaccggcaccaagaagttcccctgtgcagtctgcagccgcgtcttcatgcgcagcgaccacctggccaagcacatgaaaacccacgagggcgccaaggaggaggcggctggggcggcctcgggagagggcaaggccggcggcgcagtggagccccccgggggcaaaggcaaacgcgaggccgagggcagcgtggctccctccaactgagctcctcagtgccgcctccctgcgggtatcccggggggcactggatgcgagcccccaggtctgacgtccttgggggtggcttgaggaagaggggaaggtgcgtatttattcagggaggaggaaaagtggtgcagggacagggagatggggcgctaggggttcttagtctctggggctactaggcaggatgaatttgactgggtcggtaggagctgcgcaatgcccctctgttctcccctgcctcacagtttccctcgcccctgggctggggggttggggtgggacacccgtaccgcggctggctggcggggacaggctagaggagacagcaagtcccagtccccggagcagagagaagtggggccggcccggggcgctggtggtggctgtctggacacgtccttagcgcctgggaaccaggacataaaagcgcctccggagccgccctgcggcggggtccctttcatcccacttaaagtgcttctgcccctagggtttccggagggagagccgagatgggatgggggagcctgggggtcccccttggcaggggtgtctctttctggtttggagggttgttgctgtaaaaataactcctttgatgagcttccttattaaccctttcagacccagtctgttggagccatgaaggaagagggaaagagggctgccattcctgacagcctcccagccagggctggcgataaaggaccgagatagatggagggggcgagtagggaagtcctcttctaaaatgagagatagggatttggtggggtatggaaggaactaaccccttccctctccacctctgattcagcccttaattcttggtctatgataaataaagttcagtagtctcacattccccatctattaccctaggtgtgttttcaaggcagccagcggtagaatccatgtagttcccaccagttgccttcccctcagggatggaaggaagagggtttcttgggctggttgagggcagattgggggtgtctcatcagagggacctccactggttcccactcagagtggaggcctgcagcctacctgaccatctctttagctgtcaccaagaaaataaaccccactgtctctctagcttggcccttgtctttcccttgcccctgccatagcatgttcattaggggattccttcctccccctcatctcacaggggaagggagaggaaagagttgttctcccactggaaggggttctgccttctgaggtgacatccaggaagctgtccccattcccttctcctttagatgctagaaacacattttgattctgatcatggggtgggggagagaggaaaggagggaggggagaagcccagcagaagctgagccaggcagaggggaaagaagctgatatgaggaagggtctgacaggccacagcccttgcagccggagggctttcccacactcaagagaggggccttacagtccctctgacacccctcccccttcccctcgctccctttcttcacccggagccctctgcagagattagctgtgtattgatttttaagttataagcaaagggtattttatttaatattaggttatgtgtgtgcatgttgtgtgtacctgtgtgcatgtatgtgtgtttctctactgagcctggggtctctagccagggagaccccatcttattcaccatgtccaagatcctgggatctgggcccagcatctcttcctcctttgtagatgctggagcccagccaaggtctgggagctatatgggaagtgggggctgggatctgggtgggaatatgtgtttgtatacaaaggggccctccttaaaagggacaggatgaccttcccgaggaactcattggcctggggtagtttaagaagtaatgttctttctttctttctcttttccctacctcctgctaacccaaccagagatccccttccttgctgagagggttgggggcaggaggagatttggcagtgcctgcaggttgcctggccaggtggagagggggaaagaggaagggcaccgtgggtgtaagatgcctttctcctccacccatcgaaaccagccaccccttccctgtgccaccaagacagccttttccagtggccatcctaaggggaactcccaaatgggtgttgctggtggacacagatgctccccccaatggaagccccaagctctgaggtatgcgggtagaggctttggataggttttcttctgctcccctcttttatagatctaggctgcttggctgcctgtctttctaggcagtccccctagaggaaaaatgtaggaatttattttttctttaactgctgtgaactcactttgagggggtaggaggagggagaaacagcctgtgttttttatgcaataaagtcatcaactac

SEQ ID NO: 31704 - DNA, 3628 bp, Homo Sapiens
acatgagcaggcagccccgactggaaggagcccggggccctcattccttctcctccactgggaactgagtggacgacccaccggagcccgtgtacgcgaacatagagaggcagccccgggccacttcaccgggcgccgctgcagccccccttcccagcccggtgtgggagacgcacacggacgcgggcaccgggcgcccctactactacaacccagacacgggagttaccacctgggagtcgccctttgaggctgccgagggtgccgccagcccagccacctcccctgcctcggtggacagccacgtgagccttgagaccgagtggggccagtactgggatgaggagagccgcagggtgttcttctacaacccgctgacgggcgagacggcctgggaggacgaggccgagaacgagcccgaggaggagttggagatgcagccgggcctgagccctggcagcccaggggacccgcggccccccactcccgagacggactaccccgagtcgctgaccagttaccccgaggaggactattctcccgtgggctctttcggtgagcccggccctacctctcccttgaccacaccccccggctggtcttgtcatgtcagccaggacaagcagatgctctacaccaaccacttcactcaggagcagtgggtgaggctggaggacccccacgggaagccatacttctacaatccagaggactcctctgttcgatgggagctgccccaggtccctgtccctgcccctcgaagcatccataaatccagccaggatggtgacaccccagcccaggccagccctccagaggagaaggtcccagcagagctggatgaggttgggagctgggaggaagtctctcctgccacagctgctgtgaggaccaagaccttggacaaggcaggggtgctccatcgcaccaagacggcagacaagggaaagcggctccggaagaagcactggagtgcctcctggactgtgctggagggtggcgtcctgacattcttcaaggactcaaagacctcggctgcaggcggcctgaggcagccttccaagttttccacccctgagtacacagtggagctgaggggggccactctctcctgggcccccaaagacaaatccagtaggaagaatgtgctggagctacggagccgagatggctctgagtacctgatccagcacgactcggaggccatcatcagcacctggcataaggccattgctcagggcatccaggagctgtccgcagagctgcccccagaggagagcgagagcagcagagtggacttcgggtcgagcgagcgcttgggaagctggcaggagaaagaggaggacgcgcgaccgaatgcagccgcgcccgccctgggccccgtgggcctggagagcgacttgagcaaggtccggcacaagctccgcaagttcctccagaggcggcccacactgcagtcgctgcgggagaagggctacatcaaagaccaggtgttcggctgcgcgctggccgcgctgtgtgagcgcgagaggagccgggtgccacgcttcgtgcagcagtgcatccgcgccgtcgaggcccgcgggctggacatcgacgggctgtaccgcatcagtggaaacctggccaccatccagaagctacgctataaggtggaccacgatgagcgccttgacctggatgacgggcgctgggaggacgtccacgttatcaccggagccctgaagctcttctttcgggagctgcccgagcccctcttccccttctcgcacttccgccagttcattgcggccatcaagttgcaggaccaggcccggcgcagccgctgtgtgcgtgacttggtgcgttcgctgcccgctcccaaccacgacactctgcggatgctcttccagcacctctgccgggtgatcgagcacggcgagcagaaccgcatgtcggtgcagagcgtggccattgtgttcgggcccacgctgctgcggcccgaggtggaagagaccagcatgcccatgaccatggtgttccagaaccaggtggtggagctcatcctgcagcagtgcgcggacatcttcccgccgcactgactgctggcctgtgactggggcggtggccgcggtcctgccacacaagctgggcggcggaggccacgcagccgggccttcttctctctgggaccctccgccagcgcatagccgcaggccggtgtgacttctgcaccctcggttctgagggtacggtgacccctagtgggcagtttgcaaaatgtgattccttcttcccaactccccatccccccttcccttcccgtcacgtcctgtttgggggttaattcggttttttctctgttgcatcgcgcctactgtgcgtgtgcgatagcgtgtgtgggggtgagagtttgttttctggaatggtaggtgctgggaggaggagtttgatggagggcttcctggctgcttctggccctcacctcgtggaggccttcacagagaccctgtgggccctggccctgtgctggcactgtgccagtcatgaggcagctctgatcacttccccactgtggaaacaggactgacccagccttcagtgtgggctgctgaagctatcctcctcaggcctcagggatgacctcctgcctgagcctctcacaggctggctgtgggccagtttcatctgctttcctgttgggggtcccgggcctctgctgtccttgacccactggtgttctgtgcaaggcttcttcccattcaccaagtgcacaccttgcatctgccgctcggcatgcaccagttccacacaccatcccattttacagacaaggacgctgaggcctgcagcagcagtgtgacttgcttaaggtccagtgagtgacctcattccccagaaaaggctcctcccacaccagagtacagcctgggtagggggaaaatcagttctttcagctaccacccatccaacctttgggcctatgtgaaaagaaaggaactaagctgggtgtgttctgtctggacctggggaggcccctgaaggcaaagagggaaactgtcccagctgttctgtcctaggggagggggacatagccctagcaggagctcccagcccctcttggcactctgacacacaagtacacccatctggggcccgctttgccacgaagagctgggcaggcctgcagggtgtggggagggaggacacaacctcaagaaaggaagcgtgaaccccagggaacagcgggtcccttccctcctcagacacaagccacctcagcttgtggctcttggcccccagccccaccaacccacctgttcatttattcaacagacaatgacagctgatatttattggacatttgcaccatgccaagcattcggcttggattatcccatttgtttctcacagccggtatttattgtctgctcctctgtgccaggtgctgtgctctgggcaggggcactgcatgggctgcctgccctggtggagcttgtggtctgatgggtgaggctgacccaagcccaccccattgccaacagggccagggcaagagtacacacaggggcctcataccatatgtctaaatatttaaaagttatcaatcaagctaacaactgttaaataaaatatgttctattctcct

SEQ ID NO: 31705 - DNA, 1251 bp, Homo Sapiens
ggagctcctgataatgtgtactgcgttacatgatctgtaaatcgtgggctacgcatcctctacacccgactggaacacgctttgcacctatgcgcacacgtgtttcgcggagagtggtgctcagcgttgtgccaggcgctgaatcaggctctggggtgcagcagtgacctcggtggtcatgtccccgcgtcgcccggccacctccgcagagcaagctgagcagggggctggctggaggccgacggcggaatcccctcaacggagcgccgccagggggcgcgcgaggcagggcggagctgcgtactttgtccgcccgcgcggcccgtcgctcgcgccgcggcgggaaaatccgacctggccgcgcaccaccgccccttctcggccctcctgcgtttgcccagggtcggcccgcagtgatggaggaggaggcggagaccgaggagcagcagcgattctcttaccaacagaggctaaaggcagcagttcactatactgtgggttgtctttgcgaggaagttgcattggacaaagagatgcagttcagcaaacagaccattgcggccatttcggagctgactttccgacagtgtgaaaattttgccaaagaccttgaaatgtttgcaagacatgcgaaaagaaccacaattaacactgaagatgtgaagctcttagccaggaggagtaattcactgctaaaatacatcacagacaaaagtgaagagattgctcagattaacctagaacgaaaagcacagaagaaaaagaagtcagaggatggaagcaaaaattcaaggcagccagcagaggctggagtggtggaaagtgagaattaaagtccctcgccgcttggaaagtgcagccttctacaggtagagccacctagaaatgcatatggctgcaaaggaaactttgaagggttaaatagagatttaaaaaaataaaataaaaaggctgggctagggtgctttttgtgctgaattctccacattgttaactgccaaagctagttttagagaatgagaaagtcttaagcaaaatactcccaggtctcactccagaacataaaaatggtgtgtgatcaaatggtatatattagaaattacatctgttgtaattaaaattgtgtgagcaattaaacatggttgactttttcaagcaaaaatcagttcatcttttgatgtaattttctaggctaaatggcaatctctgaaagatgaataaagctatatttatttaaaaaaaaaaaaaaaa

SEQ ID NO: 31706 - DNA, 6980 bp, Homo Sapiens
gtattgcactctcagtctcgccatgttgaagtcagaatggcctgtattcactatcttcgagagaacagagagaaatttgaagcgtttatagaaggatcatttgaagaatatttaaagcgtttggaaaatccacaggaatgggtaggacaagtggaaataagtgccctttctcttatgtacaggaaagattttataatttatcgggaaccaaatgtttctccttcacaagtaacagaaaataattttcctgaaaaggtgttactgtgtttttcaaatggaaatcattatgatattgtgtatcccataaagtataaagaaagctctgctatgtgtcagtctctcctttatgaattgctgtatgagaaggtatttaaaactgatgttagtaaaattgtgatggaactagacacgttggaagtagctgatgaagataacagtgaaatatcagattcagaggatgacagttgcaagagtaagactgctgctgctgctgctgatgtgaatggatttaaacctttgtcaggcaatgagctgaagaacaatgggaactctactagcctgcctttgtctagaaaggttcttaagtcactcaatcctgcagtctatagaaatgtggaatatgaaatttggctgaagtctaaacaagctcagcaaaaacgtgattattccattgctgctggcttacaatatgaagttggagacaaatgtcaagttaggttggatcacaatggaaaatttttgaatgcagatgttcaaggaattcattctgagaatggaccagttttggttgaagaactgggaaagaagcacacatcaaagaacctcaaggcacctcccccagaaagctggaacacagtgtcagggaagaagatgaaaaaaccttccacttctggacaaaatttccattctgatgtggattacagagggccaaagaatccaagcaagccaataaaagccccatcagcactacctcctcgactgcagcatccttcaggagtaagacaacatgcgttctctagtcattcttcagggtcacagtctcagaaattctccagtgagcacaaaaatcttagccggacaccttcacagatcataagaaaacctgatcgtgaaagagttgaggattttgatcacacaagtcgagaatctaactatttcggcctttccccagaagagcgcagagagaagcaagctatagaagaatcccgtttactctatgagattcagaacagagatgaacaggctttcccagccctttccagctcatcagtcaatcagtcagcttctcagagtagcaatccatgtgtccagagaaaatcatcacatgtaggtgatagaaaaggaagcaggcggagaatggatacagaagaacgaaaagacaaagactctattcatggacatagtcagttggataaaagacccgaaccaagcacattggagaatattactgatgataaatatgcaacagtttcatcaccatcaaagtcaaagaagttagagtgcccttctcctgcggaacaaaagccagcagaacatgtgtctttgtcaaatccagctccccttctagtttctccagaggtacatctaactcctgcggtgccttctttaccagccactgtgccagcctggccaagtgaacctacaacttttggaccaacaggtgtccctgctccaattcccgttttgtcagtgacacagactttgaccactggacctgattcagctgtatcccaagctcatttaacaccctctccagttcctgtgtcaatacaggcagttaaccagcccttgatgcctttgcctcagacattgagcctttatcaagacccactctatcctgggtttccttgtaatgaaaagggagatcgagccattgtaccaccttattcactgtgtcagactggggaggacctacctaaagataagaatattcttcgattcttcttcaatcttggtgtgaaggcatacagttgtcctatgtgggccccacattcttacctgtaccctctgcaccaggcctacctggcagcctgcaggatgtacccaaaggtccctgtccctgtttatcctcataatccctggttccaagaggctcctgctgctcagaatgaaagtgattgtacctgtactgatgcccactttcctatgcagactgaggccagtgttaatggtcaaatgccacagccagagattggaccgccgacattttcttcacctctggttatccctccatctcaggtgtctgaaagtcatggacaattgtcttaccaggctgatcttgaatctgagacccctgggcagcttctgcatgctgattatgaagagtcactaagtggcaagaatatgttcccccagccatcttttggacccaatccattcttaggcccagttcctattgcacctcctttctttcctcatgtttggtatgggtacccttttcagggattcatagaaaatccagtaatgaggcagaatattgtcctgccctctgatgaaaaaggagaattggatctgtctctggaaaatctggatctgtctaaagattgtggttcagtttcaacagtagatgagtttccagaagccaggggtgaacatgtacattctctccctgaagcaagtgtgagcagtaagccggacgaaggccggacagagcaatcttcccagacacgaaaggcagatacggcattggcttccatccctcctgtagcagagggaaaggctcatcctcccactcagattctaaacagagagagagaaactgtgcctgttgaacttgaacctaaaaggaccattcaaagcctgaaagaaaaaacagaaaaagtaaaagatcctaagactgctgctgatgtggtcagccctggggccaactctgttgatagcagagtgcaaagaccaaaagaagagagttcagaagatgaaaatgaagtgtctaatattttgagaagtggtagatccaagcagttctataatcaaacttatggaagcaggaagtacaaaagtgattggggctattctggtaggggtggatatcaacatgtgagaagtgaggagtcctggaaaggacagccaagcagaagtcgggatgaaggttatcagtaccatcgaaatgtcagagggcgaccatttaggggagataggaggagatcagggatgggagatggccataggggacagcacacttgatggttgttgccgaagtattttctaacagaaactcttaggtggaatgtttctgaaggctttaaaaaaaatacaataaagtaaaaaccgcagttggaactctttcctctccccagccccccttaccttcactcccatactggacaagacattttggacatgagttcaagggggcaggttaattcctggcattgccagttttcttcattcagaatctgtttgttgatcaagtgactgtccccgtaaaaagtagaagataagtttgttaaagtattttttataaacagcttaatataaaacattatagatttagtgtttggcttttttccttataagtttataagtttgatttcagatgttggaaatgtgtgctttatagtgtttactaaagtgacaagaaaatataccatttgacacactatagattccaaacataacgttgcaccaaatagaaatgtatattttattatgcaatgccttagtcataaactgggctcaaacaattctcagcctaaaacactgttgtcttttaaaatgcttccaacccaaaggcctttcatctcaatatctgtcaaacttgaataatgtcttctctttaatattcacataaggcagcctattaactgtgtcttagcaatgttgtatatagttcttttaatattcataaggtatatttttgaattttggtatttgttgagattgcatagaagaatagtaggaaatccaatgaaatggctgtttccaccaagaattcttagcactggtgtaaatatcatggtgcctactcgaaagaaatgtagatgctatgcattttgaaaataatctgcatcagttagaactgcagaagtttttttaatgccactttaacactaatgcactgacagattctaaatattttgtgagaagaaatgttaaaaatttttagcttgacaggtttctagagttgttttcttcctcccccccccccccgcaccattggttgtgtatcactttcactttacacttgcatgttctacttgtcagggctggaactattgtatagaagataatatgattgtgacttctagttcttttctagaggatgctgctagaaaatggttttgctttgtattttatagcttgttacccttaggtaggtaacatcttacattctgttttcttccagtctttgcagtattcactagaggttccctttgcatgttgcactctgttctcatttggagattgaactctgaattaacacagtattcattcatctgtgttattttgtaaaaataactgtagcttatattctttatttgtgcataccaatgtgaaaatccactcttttattatgttgagattatcttctgatcaggaagtttgagtgctatgcaaataacatagtagtaatttctctttgcatgccatgtgtaatatacctagccaaaaccagatgcggtgactttctttttttgtaaagcaaattacttaagaaaatacaattcacttgaatttgacaaactgaaacagatgggttttctgggttctctgataacctatgggaatgtttggatgccagttgggctagtgaatcgccactgtactgtaataatggttatttacctctgtgctgttttaattacctaacgtctgtgtaactgctgatttgagtagtgattagcatttagataatgtaacaggattttagagagcactttgaaagataacattttattatgatggtgctaggtaaaaaattgtaaagactgggatggttgtgtggaaaacttttcttgagagaacctattgaaaggaatttgttgtcaccttcttaactagaatagttgttgaaggtaccgcttaagccatttttttcttaacatcggtggctcagttaaggaatgagaagatagagggtcctccactttcagctcatgcttttttatgtaggactagcttacctgattttaatgaaaatcacattttgatacaaacaccagatttgaaagttcaatgtgtttgatctcaggagtccaaaataagttgttgcttctagtgtcctgcattttattgactggggtttgatctcagcttctgaaaatgtttaaaaattggaaggaaatactactcatatcttcattgtcactttgtcttacctcaattgagtaacagaatatagctcctgaaggaaacactgatttgctttctgtttcccatatctcacctctaggatatgatggaagaagtgcttgaaagagaattttagcagatggtacttttctcagtgacctctggaataaaagaactgacttttgatagttttaaaattaatctttgcatgaaggttggtttcgctttttttcctttaagtttgtttttaaatgtattagtccaggggattttgccttatgctgaggtcaaactaaggataagcaagcttttgtccttcattttaactgttatgtcatactgttatgttgacatatttctttataagagaatagaggcaaaagtatagaactgaggatcatttgtatttttgagttggaaattatgaaacttcaccatattatgatcatacatattttgaagaacagactgaccaaagctcacctgttttttgtgttaggtgctttggctgaacttgattccagcccccttttccctttggtgttgtgtatgtctcttcatttcctctcaaatcttcaactcttgccccatgtctccttggcagcaggatgctggcatctgtgtagtcctcatactgtttactgataacccacaaattcattttcatggcagacctaagctcagaccctgccttgtcctggcaagcataggttttcccagaccacaatgctgatatatcttatttaatgcagactgtattcttgcagcgtgttgtttcctttgtgactcaaggttgaattaaaatgcctgtgaactgcaaacttgcttatgattgacttggtgcaataaagttcctttctaaccatttctggtttagaaaacattcagccatcctagaaactagcaatatttatttttgcctctttcgttttaccttcatttttagatgaggtaaatgttttgtcttttacttaagggtactaagcaaggtccactctagtgtagctgaagagaatgcatatttggctacactatttctgtttactgtattttgcttcctactttatgtctaaatgctattgtttgtttaaaatcctaataatgtctcatttccaatatgttattttcagataactaaggttttgctactaatgtcagccatttactctcccactaattgggattattttttaaaagaggtctttctccccgaaatacaagttttagaaaatcttagaagaggggtgggtgcatgtcttaatgctgggaagcggcaactttggggttgaacttacttgaatggattaaaaattgcattgtgttacagagctagaaaattttatgtatgaaaaacgataatagccttacactgagtacaaataatactttaagagcatgtgaagatgtgatcatttgtgatgttacttgtaaaaaaaagtatatatacatatcttttgaagtgttaaaaggaaactagtactttatattctttatcatatcactttttgtaagtgttgaatatattcctgtttatttttctatgttctgttttgtagccttaagaagtgtttcaaacatatctgaatgtataaaataagagtaaatgccctacatggtgtgatgctgcattatatataaaactgtgtgcatatattaaattttgtctcttgaaaaaaaaaaaaaaaaaa

SEQ ID NO: 31707 - DNA, 1618 bp, Homo Sapiens
atttttcaggtgaggaaacagaggctctgggagctctcgcctgaagccactcgctgtccgccgggccggtggcgttcaccccgcaccgcgctgccccgcccggggcactatggcctggggctggactatgccctccccacctcagccggcgccccccacccacgcgcgctgagggtgcggtgagctgagtgcggggccaagcatgttctggcgtcgacttcgcccaggggcccaggacctggcgcccaaggggctccctggcgacggagacttccgacgcagcagcgacccgcggctgcccaagctgaccccgcccgcgctccgagcggctctgggcgcgcggggctccggggactggaggatcccggggggcggcgccgcgtggtggccggaaggggacgccaagcccggggtgggcgtcggacgcctcccgccgcgcctgcccgccttgctcaccgcgacccggcgggccgtgcggaagcgggggctgctgcggtccctgctgccgcctcccctgctgtcggccggcgcgtcccgggaatcggcgcccaggcagccagggcctggagagcgcgagcgcccccggaggcgcgtggccagggaggaccccgacttcttgggcgccttcctaggagagctcctccccagcaggttccgtgagttcctgcaccagctccaggagaagtgcaccgaggagccggagccactgacatccccagcaccgcaacatcaaaggggtgtattagagcactgcccagggtctccgcggtgtcccaactgttcattcctcccagacctgtggggccagtcatcgcacctccaggatagtcttacgaagatttcgctccagcagacacctattctggggcccctgaagggtgatcactcacaattcaccactgtcagaaaggccaaccacaggccccacggtgcacaggtccccaggctcaaggctgcgctgacccacaacccctcgggggaaggctctaggccctgcaggcagcgttgccctttccgggtgcgattcgctgacgagaccctgcaggacacaacgctccgctactgggagcgcagacgctcagtccaacagagcgtcattgtgaaccagaaggccgccctgccagtggcgtccgagcgggtgtttgggagtgtcggaaaacggctggagagtttgcccaaagccctgtaccctggggccaaggaggagaccctggccagctcctcgtgttgggactgcgctggcctgtccacccagaagacacagggctacctttctgaggacacctccatgaacagcagcctgcccttctgttcatggaagaaggccgctgcttagaggccgcgaagcagcctccgagccttcttggacccgcacagaaacctggagcaggagtccctcctgcccaaccgggtgctgcagtcggtcctgaagcaaggctgccctaaggggtaccatctcctcctggcctccgcaacactgcagccagataagaggtgaacactcgcgaacccaaggccaggggcacacatgggccaggcaatgaggagcgtccttccttgccccacaaataaaggcacatcccaggtggctgggacctgccagtaggtgtcacaccac

SEQ ID NO: 31708 - DNA, 1616 bp, Homo Sapiens
atttttcaggtgaggaaacagaggctctgggagctctcgcctgaagccactcgctgtccgccgggccggtggcgttcaccccgcaccgcgctgccccgcccggggcactatggcctggggctggactatgccctccccacctcagccggcgccccccacccacgcgcgctgagggtgcggtgagctgagtgcggggccaagcatgttctggcgtcgacttcgcccaggggcccaggacctggcgcccaaggggctccctggcgacggagacttccgacgcagcagcgacccgcggctgcccaagctgaccccgcccgcgctccgagcggctctgggcgcgcggggctccggggactggaggatcccggggggcggcgccgcgtggtggccggaaggggacgccaagcccggggtgggcgtcggacgcctcccgccgcgcctgcccgccttgctcaccgcgacccggcgggccgtgcggaagcgggggctgctgcggtccctgctgccgcctcccctgctgtcggccggcgcgtcccgggaatcggcgcccaggcagccagggcctggagagcgcgagcgcccccggaggcgcgtggccagggaggaccccgacttcttgggcgccttcctaggagagctcctccccagcaggttccgtgagttcctgcaccagctccaggagaagtgcgccgaggagccggagccactgacatccccagcaccgcaacatcaaaggggtgtattagagcactgcccagggtctccgcggtgtcccaactgttcattcctcccagacctgtggggccagtcatcgcacctccaggatagtcttacgaagatttcgctccagcagacacctattctggggcccctgaagggtgatcactcacaattcaccactgtcagaaaggccaaccacaggccccacggtgcacaggtccccaggctcaaggctgcgctgacccacaacccctcgggggaaggctctaggccctgcaggcagcgttgccctttccgggtgcgattcgctgacgagaccctgcaggacacaacgctccgctactgggagcgcagacgctcagtccaacagagcgtcattgtgaaccagaaggccgccctgccagtggcgtccgagcgggtgtttgggagtgtcggaaaacggctggagagtttgcccaaagccctgtaccctggggccaaggaggagaccctggccagctcctcgtgttgggactgcgctggcctgtccacccagaagacacagggctacctttctgaggacacctccatgaacagcagcctgcccttctgttcatggaagaaggccgctgctcagaggccgcgaagcagcctccgagccttcttggacccgcacagaaacctggagcaggagtccctcctgcccaaccgggtgctgcagtcggtcctgaagcaaggctgccctaaggggtaccatctcctcctggcctccgcaacactgcagccagataagaggtgaacactcgcgaacccaaggccaggggcacacatgggccaggcaatgaggagcgtccttccttgccccacaaataaaggcacatcccaggtggctgggacctgccagtaggtgtcacacc

SEQ ID NO: 31709 - DNA, 1511 bp, Homo Sapiens
ggttagggcggggcgtgcttccgcgtctagccggagaaacttgagccggctgccccgcccacggtgcccgaagccccaaaggctggaattaggggctagaagtctggcacccaccgcctggccaggtgttcgggacgcgaccaggtgggcggtcgccccgccccgggagcgcggcttaatagctgagagcccgggggccaggccgcggctgcggcccaggcaacgccctgagggtggccacgctgccaggtgttccactcccccgggactatgggcaagggcccggggcggggagggcggcaggtgctgacactggagctgcgccggaggtcggggaactcggcctcctaagactgaggacactcgcctgctgggccggtcgagctgtgcggtgccctccgggacgcagggggcgctgcagccacgctgggtcaggctccgcagggccctcccaacccggggactaacggcgccggtgacgacttcgccgcgcgttggtcagccatggccaccgctctcgcgctacgtagcttgtaccgagcgcgaccctcgctgcgctgtccgcccgttgagcttccctggtgagcttggaccccgcgccctcgaccatccagccccctagggccggcgactgccagcccagcaccttccggcctctcgggctgcccggcccggccccgcgcccctgaccctttccctccgcagggccccgcggcgagggcatcggctctcgccggcggatgacgagctgtatcagcggacgcgcatctctctgctgcaacgcgaggccgctcaggcaatgtacatcgacagctacaacagccgcggcttcatgataaacggaaaccgcgtgctcggcccctgcgctctgctcccgcactcggtggtgcagtggaacgtgggatcccaccaggacatcaccgaagacagcttttccctcttctggttgctggagccccggatagagatcgtggtggtggggactggagaccggaccgagaggctgcagtcccaggtgcttcaagccatgaggcagcggggcattgctgtggaagtgcaggacacgcccaatgcctgtgccaccttcaacttcctgtgtcatgaaggccgagtaactggagctgctctcatccctccaccaggagggacttcacttacatctttgggccaagctgctcaatgaaccgccaggaactgacctgctgactgcactctgccaggcttcccaatgctttcactcttatctaccctttggcacttatcttgcttatcaacataataatttatacacttctcccattttgtatcaggtgtgttgctggccaggagctgatggctcactgggctcttggaggggaatgtgaagaaaccaaggagtcactttttcatctagattacttaggattccttgacttttcagaagtcgggaagcagtatgtttgcctgttgtagacctacttgctcacatgcagatttgagaggacctcaacggcttttctcacaaaaaaaaa

SEQ ID NO: 31710 - DNA, 2854 bp, Homo Sapiens
ggcaggggcgcatccctcgccacccgcggtcgcccagcacgccgggacgcgcgtggccatccagctccccgggggcgttggggggctccgcgggcctgggcctcgggattcgcccgccgcttccccggggagccgctgctgcaaagccaggttggggcgccgggcccggccagcgccctctaggcagcggaagtgcagcttgctttacatccgtcctccccgcctcgcagagttgggagaaggcagggtggggggtgtggaaaaataaaaggaaaagtccttgcaccatgtagatcagcgtcccccactttggcatcccggccggccggggacctcccagtctgcggccatgaacgcgagcagcgagggcgagagcttcgcgggctcggtgcaaattccaggtggcacaacggtgctggtggagctgactcccgacatccatatctgcggcatctgcaagcagcagtttaacaacctggatgcctttgtagctcacaagcaaagtggctgccagctgacaggcacatccgcagcagcccccagcacggtccagtttgtatcggaggaaacagtgcctgccacccagactcagaccaccaccagaaccatcacctcggagacccagacaatcacagtttcagctccagaatttgtttttgaacatggctatcaaacttacctgcccacggaaagtaatgaaaaccagacagccactgtcatctctctccctgccaagtcacgcaccaaaaagcccacaacaccacctgctcagaaaaggcttaactgttgctatccaggttgccaattcaagactgcttatggcatgaaggacatggagcggcatttaaaaattcacacgggagacaaaccccataagtgtgaagtctgtggcaagtgctttagccggaaagacaagctgaaaactcacatgcggtgccacacgggcgtgaagccctacaagtgtaagacgtgtgactacgccgctgccgacagcagcagcctcaacaagcacctgaggatccactcggacgagcggcccttcaaatgccagatctgcccctacgccagccgcaactccagccagctcactgtccacctgcgatcccacacggcttcagaacttgatgatgatgttccaaaagcaaactgcctctccactgaaagcactgacactccgaaggcccctgtcatcactcttccctcagaggcaagggaacaaatggccacccttggagagaggacgttcaactgttgctacccaggttgccacttcaaaactgtccatggcatgaaagacttggaccgccatctcagaatccacacgggagacaaaccgcacaagtgtgagttctgtgacaagtgcttcagccggaaggacaacctgaccatgcacatgcggtgccacaccagtgtgaagccacacaagtgtcacctgtgtgactacgctgccgtggacagcagtagcctcaagaagcacctgcggatccactctgatgagcggccgtacaaatgccagctctgcccctatgccagccgcaactccagccagctcaccgtccacctgcgatctcacacgggggatacccccttccagtgctggctctgtagcgccaagttcaaaatcagctcggacttgaaaaggcacatgatcgtgcactcgggggagaagcctttcaagtgcgagttctgcgacgtccgctgcaccatgaaggcgaatctcaaatcgcacatccgcatcaagcacaccttcaaatgtctgcactgtgccttccagggccgggaccgggctgacctcctggagcacagccggctgcaccaggccgaccacccggagaagtgtccagagtgcagctactcctgctccagcgcggccgccctgcgcgtgcacagcagagtccactgtaaggactgtcccttcaagtgtgacttctgcagcttcgacacgaagcggcccagcagcctggccaagcacgtcgacaaggtgcacagggacgaggccaagacggagaaccgggcccctctgggcaaggaagggctcagagagggcagctcccagcacgtggccaagatcgtgacgcagagggccttccgctgtgagacctgcggcgcctccttcgtcagggatgactctctgagatgccacaagaagcagcacagtgatcagagtgagaacaagaactcagacttggtcaccttcccaccggaaagcggtgcctcgggacagctcagcaccctggtctccgtggggcagctcgaggctcccctagagcccagccaagacctctagctcagccgaagagggtggtcagctgtcggaacttctgaccagtgctgttgcccagccctccagaggtgaggccactgagagacaggctttgggcaccacttctggggctggccgctccaacttcacaggccttcagaggcgatggctgggcgacagtgacgaaagcaaagcaaagcagggctgtggagacactcctcgcatttgtctcttccctccaaggattatctgagcaagtcgacttgttcattcaaaggcggggtctgccaagccctgctctatccaatggggatagcttctacgtaacggattccaattttaaaactgatccatctctgatggaattattaaacttagacgatatagaaaactaaaactaatctctagagtggaaagggttaaagtgaggaaggtgtacgtgaagggtctggggttgctggaaaacttctatttcataacctgggtgatcgttctaagagtgtttgccttatatgtttgtgtggtttcttttacctgttgtcttacaataaaaaaggcagactcatggtaaaaaaaaaaaaaaaaaaaaaa
